United States Patent Application Publication US 2026/0103690 A1 - sequence listing, part 103

SEQ ID NO: 512292 - protein, 346 aa, unidentified
MNHYAGIDVSLECSSVCVVDASGKIVREAKVASEPEALIAWLGSLGVCLERIGLEAGPLSQWLYAGLKRAGVAVELLETRHVRDAFKSMPVKSDRNDARGIAQLMRLGWFRPVHCKSIEAQEVRAVLTARKLVQSKLLDVENSLRGILRGFGLKVGRTTARSFAGRIQELVAGHPSLEGIGEALLSVRAVLLREFNAFEKRVRLMARADAKARLLMSTPSVGPIVALTYASAIDDPGRFRSSKQAGPHFGLTPRKYQSGEIDRSGRISKIGDGAVREALYQAAHVMLTKPIKGCTELKSWAMRIAKRAGMSKAKVALARKLAVVLHRMLADNAPFNPIAKAAALAI

SEQ ID NO: 512293 - protein, 404 aa, unidentified
MKICVGIDAAKVTHWAVAVDGEGRVVLDRAVENDPEAIDGFVAELRGLGQEMAIGLDVVGSFARFLEATLLAEGFALVHTPGIAVNRAGQGFAGGESKSDPRDAARHCPRTNGGQCLAIAELVRTRELRPILPDGDSLVAIRLKVGRRRELVQAQTRRIARLRGLLCGIHPGLERALDIGCKGPLALLARYVTPAGIRHAGKARIVAHLKKTPHLHGAQALADRALEAAHARKIAVPGEAPTAELIRELAAEALDSRAKIARIDRDLETLLTDHPDGALIRSLPGMGAVLAAEFIACTGDIRRFGSADALASAAGLAPVQRQSGKRAGWRRAYGGDKALKRVFYQSAFCAVSARDPLSKAFYDRKRREGKHHNQALIALARRRVTVIWAMLQRRQTYDPLIKAA

SEQ ID NO: 512294 - protein, 418 aa, unidentified
MNEEIDTRTSRRYVALDIHKHYCVVAGVDREGRVLVQAVRVEHTDLEGWLKKNLQATDHVVIESTTNAWHVYDLLVPLVERVLVANPIKVKQIACARVKTDIRDTLILARLLAANLVPIVWVPPAHVRELRQLLSQRRQFVETHTQIVNRMHSVAHRHHFHHPAGKRFNEKNTAWQKDQRLSQIEQFQLELEMENRVYIEKQISRIGKEVAKMSHQTPWAESMTYLMQLPGFGVITGMTVLAAIGDIQRFDSARHLASYSGLTPGLEQSGTKYREKGITKEGRKELRWALVEAAQRAVKSDPLWKHRFQEMQKRMHRNQAIVAVARRLLELVWYVLTRRQPYRHFSQERIAYKYLTWAWQMDEVARDGLTRQQFTRYYLMRLGIGHDLTRIAINPKYPRKIATEAELLALRPKLNHLE

SEQ ID NO: 512295 - protein, 383 aa, unidentified
MKAVCGLDVHKDSIFLCILHSDGELFEQVFGVLTFQLEEMRKLLQKHHVFEVCMESTSIYWIPIWRVLSPHFTLRLVNPYFIKQLPGHKSDVKDAQWIAECTLKELVRGSFVPPEIIQQLRQYDRRIFDLNAEIVRKVSKVDGVLQRCNIRLSNYVSNIECKSYRDVVRRFSEGVTNPNELMKLVHGRIVNRHGAETILASLTGVVSQAEIDVLRQLHEEIGIAESHRNECQQRMLEICEKHFPEELERLQKIPGIKERAATSLIAEIGTDMSKFETANHLASWSGLRPRNDESNKKIKSRKITHGNVYLRNTIIQCAWAASRQKDCFFSRFSYHQTIVRRKNKMKVIVAVARKLLVAVWHVLHDKTDYVDFKPDREESANNG

SEQ ID NO: 512296 - protein, 341 aa, unidentified
MKPAMNVLGIDIAKHVFHAVGMDNTGEIVFRKRLSRHDLIPFMAKLPPVLIGMEACGGAHYWARRFREHGHNVKLMAPQFVKPYVKSNKNDSRDAEAIAEAVTRPTMRFVPIKDVDQQDIQALHRVRERLIGERTALVNEVHGLLHEYGIVIPKGVAKFRQAVIGKLESEKDKLTSLSQEMFWKLIEEFAGLEKQLAYYQEKLEALATTHPECQRLMTIPGVGPLTATALVAAVSDASAFKNGRQFAAWLGLVPRQHSTGGKDRLLGISKRGDSYLRKLLVHGARTTIRWVGRKTDRRSPWIRQLVERRGKNRTAVAVANKNARIVWALLTSHQDYQLATG

SEQ ID NO: 512297 - protein, 339 aa, unidentified
MKVTTFGLDLAKRVFQLHWVDMETGEIHRRQLKRVQLMEFFANREPSLIAMEACGSAHYWARKVAAMGHEARLIAPQFVKPFVQGNKTDAADAKAIWEAAQRPGMRFVAVKSESQQGVLLLHRMRSQLVKMRTMQVQQLRGLLYEFGADLPPGRQRGMARMPAELERLEQTLPAMVIEALRGQIARIEALDLDIAGIEKKLAVGKKEDKSVRRLMEIPGVGLLTSTAATATLGDAKAFRNGREFAAFLGLVPRQSGTGGKVKLLGISKRGDVYLRTLLIHGARAVINCAKDRDPWLEQLLARRPKNAAVVALANKMARTIWALLAHDRTYRKDYAASAA

SEQ ID NO: 512298 - protein, 374 aa, unidentified
MAGSSARSVAGASARGRKSSVVTLGASHTNPDHKGGPNVERQYVGIDLHRRRSVIVRMTPEGEKLETVRIENDPVAFSLEMAKAGPNPEVILEATYGWYWAADHLRECGGRVHLAHPLGNNWGHRRVKNDERDAADLADLLRLGRLAESWIPPAEVRELRELVRYRAKLVALRSGLKAQVHAVLAKEGVRVPMSDLFGAKGQTLLDECQLGEAYALRVESLRDLIEVYDGEVEMLEGHIGKRLDGHGGYRAIQAIPGVGPVLGAVFTAEIGDITRFPAADKLSCWAGLTPRHRESDTTVKRGSITKQGSKLVRWAAIEAISRNRGGTFLQATSHRIAERRNNRNIGRVAAARKLLTLVYYGLRDGEIRCLADAG

SEQ ID NO: 512299 - protein, 357 aa, unidentified
MERVYTIALDTHCSFTELVVLTPGGRIRDRGRCATTILALAEQVQQVPRPRAVVFEEGPLADWIARGLRGKVDDLAICDPRRNHLIAKDSDKDDAIDAEKLARLYRGGYIKRVHHAESFDRVVFKRHVGLYHDSVRQRVRLANRIMAELRGYGVFVAERCFAEKDERTAFWERLPAHSVVRADIRCLLNAYDAAAERAVTMRRSLIQLAGQNPQIRRFHALPGVKWIRAATFCAYLDTPWRFKSKQALWKYVGIGLERRHSGAGPEQVHVPRQVNRTLKSSVLGAAKSAIASRNNPFADQYERWIHDGVTPRNARRNVARSQAAVMWGMWKNGDAYRPELVGVEAKAQALVLSGKGG

SEQ ID NO: 512300 - protein, 419 aa, unidentified
MFKIFRKNCCGLDVHKTWIYACIGITDTNGRTEYKQARFSSFSKGLRELDDWLTLYSCDEVCMESAGKYWIPVFNVLEKNHKVTLAHPKYTKPQKGNKTDRKDAKWICDLFMCDMIKPSFIPPPVIRHLRDLVRYLRKLTNMETGEKNRAQNCLTVSNLKLDDVFSDVFGKSALSITRHIIDHPGESFDVAPFVDKRCKTPIEEIQAAVDGAISSEQAVKLRQCLDHIEELETHKEKIVTEISRITEPFSDALAFLRTVPGFDSNPMTAVTVLSEIGSDMTVFPSAKNLCSWSGCCPRNDQSGGKVKSTRISRAGTYLKPLLVQVANALVKSKKHTEFGERYRRIKARRGHKKAIIAICRMLLTAIWNILKNHVPYTADGFRSERPANPSRTLTTSQALQMVRARGYTIKDAPDSPATA

SEQ ID NO: 512301 - protein, 347 aa, unidentified
MNNLNVVGVDLAKNIIQVSVVTPAMKELQNKALTRKKFAEFLARQKPSLVAFESCATAHYWSRMAHQYGHTARIIPAKAVTPFRQGHKTDSNDALAVAEAASRPNIKEAPMKTVEQQGIQAIQRSRELLVHDRTALSNHIRGLLMEFGIVIPQGFAALHRSIPEVLEDAENELPDLYRPTLNLLYGRLITIKEDIDMLNEQIATLVKQNATRDRLPRLEGVGPISSVLLYATLGTGEAFANGHQFSAYLGFTPKQYSSGGKTVLIGISRYVANKRLRSVLIQGARAYVHRLKDPKTPKERWLWALIQRAGYGRAAVVLANKNARTASALLTQGAAYDRDHGELLAAA

SEQ ID NO: 512302 - protein, 353 aa, unidentified
MKSRMESKMSSPMVIGVDIGKEVFHLVGFTADGKIAFRRRIRRLGLKDVFEKLPPCIVAMEACLSAHFVSRTLRALGHEPRIIPAIYVKPFVKGQKNDYNDAEAIAEAALRPNLRFVQEKSQDQLDLQACHRVRSRLVSRRTATINQIRAFLIEQGIAVRTGPRALRKSLFSILENRKEEISPRTAKLIRGLYEDWCCLDERIETVTGETEILSRSEAKCRQLMSVPGVGPLISTAMVAAIGSGEAFERGRDFAAWLGLVLRQYSTGGRSILGRISKRGSKYLRTLLIQAAKVLLMRPHNWARYSFGPWLNAASERLHRNKLAVALANKLARIAWSVLRNDKAFDTHLEVAAI

SEQ ID NO: 512303 - protein, 324 aa, unidentified
MYWVNAQTGEIANRKFGREDLIAFLAQRPAGRVALEACGSAHWWVRKIHALGHEVLLLHAQFIRPFVQTNKTDAADARAIWTAVQQPGMRTVAAKTEDQQAMLSLHRMRSLLIKFRTMQVNQLRGFLYEFGVAFRTGRAAGLAEVRQRMAELQDALPASIMLNLQDQLRRINAFEDDIDQLEKRISAWQKQELACRAISEVPGIGRLTATALVATIGDARTFRSGREFAAFLGLVPRQTGTGGKVRLGSISKRGDPYLRTLLIHGARSVLCHTKVPTAWQKGIQERRPANVAAVALANKIARTAWAILAHDSSYEANHVSVRPA

SEQ ID NO: 512304 - protein, 351 aa, unidentified
MQIVGALDVHRRQITFKTLVLASGESSRGRISPAAREPLRQWLERFDGLEGEFVLEGTTGWRFVVEEIERAGHVARLADPAETAARRGRKRRAKTDDADCDLQLRLLLAGELPEAWIPPVQILELRTRVRLRKTLIDQRTAWLQRLQAQLFHQGVPPGLKPGTAAARDALARVELSPAGREAVELCLRMLDQLDRELVPIDRALRAFARRQPGCRALTGQLYGVGAVTATAILAELGDARRFRSSDDAVRHCGLDVTVWQSDRKRAAGHLSHQGPSLLRWALFEAAQCAARRTSPDHAYYLDVAKRIDHNRACLSVARKLCRRAHHILRELGDDALAPSDPPRAKLVDAAA

SEQ ID NO: 512305 - protein, 402 aa, unidentified
MWYAGIDWADTHHDALVIDESGQQVSSLRVSHTPEGLSQLISFLSRMVPTKEQMACIIETNHGLLIAALLEAGFAVYPVNPKTVDRRRGASGAKTDAIDAYVLAKTGRADLADLRQLKPDSPVVAELKALTRDQDALIQSQTRLVNQLTACLKAYYPVALQLFTKLHQACTLKFLHTYPTPQAAHAASVEQITSLLKAARHPTPVKTAQHIWHTLQQPQLQADAITTRTKARLMLALIAQLSPLIEQIAAYDKEISTLFLTHADQEVFRSLPGAGKRLAPRLLVAWGDDRERYSDANSVQALAGTSPVAYESGNYSKPHKRSACIKPLRNALQQFAWQSTKQEAWALAYYQRKRTEGKSHSMALRALANVWVRILYAMWLNHTCYDGATFEAAQRAHAQLAA

SEQ ID NO: 512306 - protein, 430 aa, unidentified
MSNSNKLFISVGIDVGADTSWMSIALPNQLIVGKPFKLTHSDLSSLEKCVSAIKEAEEMNALESRIFLESTGVYHYPLFCYLIERGFNCYVINPIITKNSTNINIRKVHNDKFDSKKVALIGLKPDLKTSIIPSELVLDLRNLTREYYNLADNRSAYVNKLKGQLRMVFPQYINIFSEVTGKTSLTLLDKYTSPETFLNADKIEIITIIKNSARFGLLYAESKYTAIMEAAKSALTFGHSVDSNFTLIRLYISFIRKLDDEIAHMLNAMNELVDANKEELFVKQIHLIQTIKGAGFLTAITIMCEIGDFSVFKSPKQLFAYFGLDPEVKQSGKFIGTKIKISKRGSPIARRAIHRIALISIGKSKKGVAHNHVLYDYYQNKRKSKPKMVALCAVMHKVCNIIFAILRDEKEFAIISPDDHNTQYRKSLLA

SEQ ID NO: 512307 - protein, 355 aa, unidentified
MNQEKYIGMDVHQATISVAVMDSSGKLIMECILETKAATILEFIAGLRGTLSVTFEEGTSAAWLHDLLKPHVSHLVVCDPRRNALLKDGSKSDRIDARKLAELLHGNKLHAVYHGEHGVRTLKELGRSYLTITKDLTRVMSRIKALYRSWAIPCSGTTVYAVRHRAEWLAKIPEPGVRLRAERLYQQLDLLQPVRQEARRDLLVESHKHHAVKLLRQIPSIGPIRAALLVALLQTPHRFRTKRQLWAYSGFAVETHDSGEYRFVRGKLRRNRERITVRGLNPNHNHDLKNLFKGAAISASTRPGPLCDFYVALVEKGMRPTMARLTLARKMAAITLTIWKKGVEFDAKQLNRQAA

SEQ ID NO: 512308 - protein, 403 aa, unidentified
MNNVVGIDVSKGKSMVSVLRPFGEVVAKPFSVGHTGSELKELADYLKSLDGETRVVMEHTGRYYEPVARFLHEEGVFVSAVNPKLIKDYGNNTLRKVKTDKADARKIARYGLDNWAELRQHTPMDTIRMQLKTLNRQQSLYAKTKTMMKNNLIALLDQTYPGVNALFDSPVREDGSQKWVDFATTFWHVDCVRNMSLTAFAERYRKWCKRHGYNFSQSKAVEVHAGAQDLIAMLPRDALTKTMVRQAIDALNAISASLERLKAEMQALAAQLPEYPVVMTMHGVGDSLGPQLMAELGDVTRFTHRNAITAFAGVDPGADQSGTHEAKSTRVSKSGPPELRRALFLVMDCLLKTQPQDDPVYRFMDKKRAEGKPYLVYMTAGANKFLRIYYGRVKEYLAQLENS

SEQ ID NO: 512309 - protein, 323 aa, unidentified
MKAAWVGIDVAKDTLAVCVLPYKRQHSYANTAEGWAHVLDELSGYEIQRVLLEATGGYEAGVLRYLAAAGLPVVRINPRQARAFAEAMGSQAKTDALDAVLLARQAQVLEAPLYQPQTAQAQALQELVKRRTHLVAQRDDDRRRLAQATLPKVQANISHCLAFLNQQIASLNHDITQACRELDNERTQRLSSVSGIGPVSVANLLAYLPELGHLDRRQIAALVGVAPYNADSGPKKGLRRISGGRSAIRRVLYMAAWSVVRHQADFKRRYEDLRQRGKPAKVALIACLRVLLIRLNAMLRDGTPWRSEPAREDSCSYSLELLL

SEQ ID NO: 512310 - protein, 347 aa, unidentified
MNITTIGIDLAKNVFQVHGVNDRGKPQLRKQLKRAQVMKFFVKLPPCLIGMEACGSSHFWARKLSELGHTMKLIAPQFVKPYVKTNKNDAADAEAICEAVTRPNMRFVPAKNVEQQALLAMHQARQGFVAARTAQANQIRGLLSEFGIVMPEGIRCLAKHIPEILADAENGLPGTSRELFCRLFEHFRELDRQVHELEAQIILWHREETQSRRLEAIPGIGPLTASALVGSVGDARNFKSGRQFAAWLGLVPRQNSSGGKDRLLGISKRGDTYLRTLLIHGARSVLWHAKKQTGDSMGWLARLAARRNPNVAAVALANKNARIAWALLAHGREYQAGYAKTLETLAA

SEQ ID NO: 512311 - protein, 344 aa, unidentified
MNIATIGIDLAKNVFQLHGVNSHGKVVLRRQIHRGQMRGLFVNLPPCLIGMEACASAHYWARTLESYGHTVRLIAPHFVKPYVKTHKTDATDAEAICEAVNRPNMRFVPIKSIEQQSALSLHRVRQGFVRARTAQACQIRGLLAEFGLVMPRGIANIKQVPKLLQVAGKELPAPFCRLIERLLAHLKELDRQTRELEEQIVDWHERSEPSRRLAKIPGIGPITASALVASISDVRSFKNGRELAAWLGIVPRQHSSGGKPTLLGISKRGDRYLRTLLIHGARSVIVRVLKRDDEKDGWLKRLLERRHVNVATVALAHKTVRTVWAILAHDREYCPTYKSLPLAA

SEQ ID NO: 512312 - protein, 365 aa, unidentified
MAEVTRGAAARVGVDLSKRVFQVHAVDRWGHKVLTKAMSPERFFAWCAELPMGCLVAMEACGGAHHVARRLRLLGLDARLIAGHFVTPYRMAGKTGKNDANDAAAICEAAGRPHMRFVPVKTAEQQGQLSVHRLREGYKAERTALINRIRGVLAEFGMSFPQSPEALRRVLADVIEDGGNELTGIARLVLQRAQLHWIDLDLQMKWCDERIEVHVRSDDRASKAAALQGIGPIGASALLASVGDFKQFASAKQFGAWLGLVPSQNSTGGKASLGRITKRGDDYLRTLLIQGAKSAVMTAHKRSDRISQWLVQLKERVGWQKAVVALANKNARILWAVLTRDATFDPNHVPEAPAPHCALSQRPAH

SEQ ID NO: 512313 - protein, 357 aa, unidentified
MMDKVLKEVLGVDVAQKELVVTLGRMLGDLSIDLYAHRVFRNNEAGFAALLDWVEKLSDDGTSVRFVMEATGIYHQKFAFYLYDHGREVSVVLPNKISNYIRTLENKTITDKSCSRAIAQFGLERKLDRWHKPKKIFRLLQQLTRERDQVVGERVAVKNQIHAEQREAEPNERSLCRLRERIQLLNKQEKEIKADLKTIVDGGGDDLKSEIKLICGITGIGELTAIIVLAETNGFELIRNKKQLISYAGLDVREKQSGTSVKGKPRISKKGNRYLRKAMYLPSLVAVKHDGNFGKIYLRIVSRQGIKMKALVAVQRKLLEMVYVIYKNKSEYKKGYSAMKESSALNLKDQYATLAGS

SEQ ID NO: 512314 - protein, 343 aa, unidentified
MGDVITIGVDLAKSVFQVHGVDAAGTVVVRRQLRRRQVLPFFEKLRPCLVGMEACATAHHWGREIERLGHRVRLMPPRYVKAYVKIQKNDAADAEAICEAVTRPTMRFVELKTCEQQSILMLHRTRQLFVRPRTTLINAIRAHLAEFGIVAPIGRNGVEKLLQTIGDAEDDRVPEVARTCLGALAMQLHLVSRQILEADRRVLAWHRSNEASRRLDRIPGVGPLIATALVASVPNPQAFKSGRDLAAWIGLVPKQNSSGGKERLGGISKHGNRYLRTLLTIGALSVIRYAETHGTAHRPWLARLLERRPAKVAAVALANKIARMAWAVMARGEAYREPKVRIA

SEQ ID NO: 512315 - protein, 351 aa, unidentified
MMIIGVDYHPSFQTIAFLIEETGECGERELNHSDGEAEKFYRDLKQRGLRVRVGMEATGYSRWFERLLAELGIEIWMGDPAEIKAKRVKKRKTDRNDALLLLRLMRENNFPRIWVPSPENRDLRQLLWHRHRLVQMRTRIMNQLQALAMNEGYRWKKKLFSEQGRAQLEKLALAPWASRRRQELLELLDRLNPTIEELTAAVEREARKRPEALRLMTHPGVGPLTALAYVMIIGTPARFQRGKQIGTYVGMIPSEDSSGGKQRLGHISKQGNSLLRFLLVEAAQAAARINAEWRRRYIHLALRRHKSIAKVAMGRKLGVRLYWMWRNGCEYSQSLEFGSYAGQLGIGHGVK

SEQ ID NO: 512316 - protein, 350 aa, unidentified
MEYIAFDAHKHYTLASVVTPDGQLVREERIEHDRGTLREFLERCERGSPVAVETIGNWYWIIDEIEAAGCLPRLVHARKAKLMMGEINKTDRLDVRGLNRLQRSGTLPTVWIPPGELRDQRDLPRTRMVFVRQRTQLKNRIHATLAKYALHDLDVSDLFGVRGRALLRERFELLPPHTAYASQQLLGQVEELGRQVHAFDQRIQATFKLTPAIQRLLTLPGVGYTLAVVIALEVGDVARFASAERLAAYAGTTPRVHASGGKSRFGPPRPDVNRYLKWAFVEAANAICLHRGRAAQRHVSRLYERLARRKGHAKAIGAVARHLAEATYWMLSKEEAYREPQSVGRVVHGG

SEQ ID NO: 512317 - protein, 352 aa, unidentified
MTEFIGCDMHKKYSVFVSMNEAGQAQPAVRVEHADRQAFRQYLGTLTKGSAVAVETTGTWYWLVDELEAVGLRPQLTNARTAKLLMGCRYKTDKLDAKGLATLLRNGTLPTVWIATAEVRDLRELTRTRMALSGMRTKVKNRILADFAKYGIALEGYSDVFGLGGRRLLGRSLEALPEHTRQAVEDQLMVLDAVCQRIKAIEPRIEEVIQETPMLALLRSLPGIGKILATVIGLEIGTIERFATAERLCSYSGVVPCVRSSGGRTRFAHTASDVNRYLKWAFVEAANLVVANRERWHHPSLRQLYERICRRKNHPVATMAVARQLAETAFWVLKKEQPYREPSPVRGSSSPR

SEQ ID NO: 512318 - protein, 326 aa, unidentified
MAIDRSEAELARARVRATRKQVPKLLRWAEPLGERVWAVESAGGLGYLLSQQLVAAGETVLDVPSTLAARIRVLGSGRSDKNDPNDALSVAIAALRTPALREVVDAEHSEVLRLLAKRSIDIGNHRTRVVCRLHNLLMELAPGGIAKELNASDAVAFLDRVAPTTPAEAARRDQAVELLADVQRLDEQLKASHRRIRTAVAASETTLTELFGVGPIIACYLIGFTGDIARFAGRDAYAAYNGTAPVERSSGGRVVHRVSQRGNRRLNHALHLAAICQIRQPSSAGRVYFERKLAEGKTKKDAIRSLKRHISNAVYRQLVIDAARTK

SEQ ID NO: 512319 - protein, 335 aa, unidentified
MHYLYYVGLDVSKETFDASLVAFEDANEMAHRKFANSRKGICSCLHWVEKRHGIRLVDVIFCAEDMGSYISEMAVCASDRTLNFNFSLISPLVIKYSMGIARGKTDRVDARRIAEYAITHYRKIALYLPAEKELCQLRTWLILRAHLAKQRVAKLVLLEKLDYKEKFADVSIQRSMLQEEIAYAETHMKTIEREMKELIAADSNICRNYKLLTSIKGVGPITAIVMLCSTLNFTKITDHRKFACYCGLAPFEHSSGTSVCGGCHTSSMANRDIKVQLNRRALIAIRCDPQLKAYYERKVAEGKHKFSVLNAVRAKIAARCFAVVRRGTPYVALQI

SEQ ID NO: 512320 - protein, 431 aa, unidentified
MDAQQFEVIRPKCAGLDVHKKSVVAAVCTSDPVTLTASYKTKVFNTTNSDIAALRDWLLAQDCRDVCMESTGKYWIPIFNILEPHMHVILTHPKYVKAIKGKKTDKRDAKWIANLFRFDIVKASFIPPADIRALRELSRYRLKLSYMRTAEKNRYQNSMTISRIRIDCVLTDPFGLSATRIMDYLLSDEPFDEEKCRSLIDWRVKASKDDVLDSIRGYNIPEEQKFKMTHAKAHMDFINKSIDEIEAELFLRSRQYDTQVKRIATVTGITGLSALFILSEIGADMSVFESDRHLCSWAGLTPANNESANKKKSARCSRAGQYLKPLLIQCALAAVKSKKEPYFAIKYQRIAKRRGKKKAIIAIARMMLTSIYHMLSEDKDFRPDDYEATVNPPKQKPTVLTIENTLQFLREQGADPETLTLIQQQCAAQAG

SEQ ID NO: 512321 - protein, 352 aa, unidentified
MQHFIGTDMHTRDQVVAWIDEQTGEIKKRRLEHAGEEVRKFYAQFPRGTVVGIEATFPAYWFERLLGELGYELWVGDAARIRASEVRYQKTDRRDAEGILDLLRTGRFPRIWVPSLEERDLRQLLVHRMKQVRARTQVKNQLHALAISQGVCRGRQLWSAKGRVELESLALLPWAARRRKELLESLDRLDEQVRELDRAVEEAGRARPEVALLRTHPGVGMVVGLAFVLSVGPIERFPRSRKLVSYWGMNPRENSSAGRQRLGSISKQGNTMMRWLLVEAAQTAARLDPQLRRTYQRLKKQKTSGVAKVAVARRLVVRLFWMLRTRNNYAQLVHMSGSPSSAVVPPKAEPNV

SEQ ID NO: 512322 - protein, 411 aa, unidentified
MHNRQNYLYVGVDLHKEQHTAVIINCWQEKLGEIQFDNKPSAFSKFLLEVETYVSDGLSVVFGLEDVGGYGRALAKYLVDHKQVVKEVNPALSFLERKSHVTTQKSDSWDAECVARILVNKFNQLPDAKPNDLFWSIQQLVSRRNALVKAQSALKNQLHIQLNHHYPSYKKFFSELDGKTALAFWQQYPLSSCLEEANIKQLTAFLLDVSNNTCSVKKASEILKLVKEDGQTMKEYQETRDFLVRSIVRDIEFKKKEMKYIKRELKRLVNLLDYQLETMPGIELVTASALIAEIGDVRQFPNANKLARFAGIAPVYFGSGGKGKTHKSKQGNRALHALFYNLAVQQVQVAKGSKLARSPVFYAYYQKKLKEGKTKGQALVCIMRRLVNIIYGMMKHKTAYELPVVQEKEVV

SEQ ID NO: 512323 - protein, 342 aa, unidentified
MPNRPFILKIEYHHSRANRLNHKENAMNVIGFDISKDTIDVTLLRNSGQVDYIKIDNACEGFEKLNDWIRSKRIRKISISMEATGIYYEEAADYFSAIYQVFVINPLKIKDYSKSQFNHTKTDKADSRLIAEYTKRHLDKLTPFKPSENPTLYKLISLLQQLKQQQNESQNRLHAAKDTFIRATHEAIILLLAKQIDQTAKRIDLMIQQQDSLNMHYKNLQTIPGIGKDTAAILLHHLTDKQFKTANQFVSFAGLSPRIEQSGTSVNKKGRLSRYGHRRLKRALFMPALVAYRIKAFPKLVQNLSQKPKMVVIVALMRKLAKIAYYIHKTQKPFEKMRYQIA

SEQ ID NO: 512324 - protein, 370 aa, unidentified
MNRLFIGMDVHKEKIVVIGLPEEGSHPVVREEFGGGDLRRLTKRIQTLSLSWEVESCYEAGPSGYGLARIFLEAGIPCRVVAPSLIPRRPGNRVKTDSRDAKELALALRADTLTFVRIPALEEEETRGLIRCREDVARQVRLFKTTVSHWLQNRGQRVPAGVKRWTPAYWKWVRALPLSPMDRTTLDHYLDVVSLLENRRKQVEEQICALAKEDPYRERVKRLIVLRGFSPLAAMRLIAEVIEFKRFRSASSFMKFTGLTPSEYSSGDRTRRGRITKAGNSHLRHVLVEAVQKAHFSANPGRLLLRRWQEVSGPVRQIAVDCLKRLHHKFWALTQRGVPAGKTRVAMARELAGFVWALMTHPEIETPLAV

SEQ ID NO: 512325 - protein, 326 aa, unidentified
MNASESTFVGIDVSKDTLEIALDDQSKTQCLANADADIAALVKELVPRSEEIGAIVLEATGGFERQVVASLCAAGLPVMVVNPRQARDFAKSMGYLSKTDAMDAQVLSHFARTLHQSAQRERLLMKLPDANQEALEALLVRHNQLIGMRVAEENRLAMSHRSQHKSIKAVIQMLDRQIAAIDKNMAGMLKEHFADKLALFKGFKGVGPCTQASLMGALPEWGQLTHAQIAKLVGVAPLNADSGRHKGKRITWGGRATVRTALYMAALSAIRYNPVIKTFYERLLANGKLKKVALVACMHKMLTIMNAIVKSGIPWNPEHQNVPKSA

SEQ ID NO: 512326 - protein, 339 aa, unidentified
MENVPVFVGLDYHSKSVQVCVMDGSGAVLVNRRCGNSVMEIGGAIGSGREVRRAAIESCCGAADLAEALITELGWPVSLAHPGYVARMKHNPDKTDFGDARMLAELACAGLIPPVWLAPRNVRELRLLARLRGDLVGAVRAAKTRILAVLRQQRITEPTGFGRWCKKWLAWLTSAECALSEQGRFAVGIYLEELAALRDRISKVESRLREATADDAIVARLLRVKGVGEVTAWTMRALIGRFDRFTSGKQLARFCAVTPRNASSGQRVADSGMIKAGDPQLKSVVIEAAQRLRRYEPRWRELSASMAARGKPASVITGAVANRWLRGLYHQMKELPMAA

SEQ ID NO: 512327 - protein, 350 aa, unidentified
MSSRKTGQIAVIGIDIGKNSFHIVGLDKRGAIILRQKWSRSQVEARFANMPPCVIGMEACVGAHHLSRKLNRLGHDARLMPAKYVRAYSKGQKNDFRDAEAIAEAVQRPTMKFVATKTSEQLDLQALHRVRERLVSQRTGIINQIRAFLLERGIAVRQGQHFLRAELPRILGAPSAHLSPRMAQTIEDLAGDWRRLDGRIDGLSDDIEALARRDAGCARLMSVPGIGPIISSAMVAAIGAGEVFTKGRDFAAWLGLVPKQISTGDRTILGKISKRGNRYLRVLFVQAAWVVLVKPKIWERHGLKPWIEAAKKRLHHNVLAIALANKLARIAWSVLARDRNFEARSIAVNA

SEQ ID NO: 512328 - protein, 355 aa, unidentified
MSQEKYIGMDVHQATISAAVRDAQGKLLIECLLETKAGTIVEFIQGLHGTLSLTFEEGTSAAWLHDLLKPHVNRLVVCDPRKNALLKDGNKSDRIDARKLAELLRTNQLTSVYHEDHGVRMLKELGRSYLTISKDVTRVMNRIKALYRSWAIPCAGTTVYAPRHRAEWLAKIVEPGVRIRAERLYQQLDSLQPVRLQARCEFLLESHKHAAVKLLRQIPSIGPIRAALLVALLQTPHRFRTKRQLWAYSGFAVETHDSGEYRYVRGKLQRNRERITVRGLNDNHNKDVKSLFKSAAISASTCPGPLQDFYVALVAKGIRPTMARLTLARKIAAITLTIWKKGVSFDPKQLHRQAA

SEQ ID NO: 512329 - protein, 460 aa, unidentified
MNKKKSGRRKGSVQKKVDWKALEIVHPDAAGIDVGGSEHWVAISPDRDSEPVRCFGTFTADLHQMASWLVEKGVRSVAMQSTGVYWMPVLEILEQHGLEVYLVNAQHTKNVPGRKSDVEECQWLLKLHAFGLLNNSYQPTDEIRIARTLWRQRGNLVAEAASAIQRMQKVLIEMNIQLGNVLSDLSGVSGMTIIGAILQGERDPWILASLVQPEVQATPLEVAKSLEGNWREELLFVLSQQVELYRIYQSKIVDCDFQLRKHLETFGSKVDLQTQPIGPKPKGKKGSRNAPQFDLRTELYRITGIDWAQINGMDVLTAQTVIAEAGADLSAFPTEKQFTSWLGLCPTNEQSGGKILKRRTRKEVNRASGAFRTAATTLLRSQSYLGAQYRRLRTRLGAPKAITAMARKLACLFYRLIKHGQQYVDKGTEYYEARYREQQIRALATRAQRLGLQLVIPETT

SEQ ID NO: 512330 - protein, 404 aa, unidentified
MKGPIVSIDVSKGKSDYQAFKDLNVKYTGSRSIKHNKEGFDEIVNLVREMEKKLETEVCVVYEATGVYHRVLKKVLEDNNIKQFIINPLLSAKTRKNDSLRSPKTDKLDPKSIAKTYYSHSLHNSHKQETIYHELRELSRYYEDILVHIRKDKVAFRAQLDIVFPGYDTLYDDLYGPVALAIIEKYPHPEMLQKKKINTVSKVIQNKTCHRQAVSDIMADKAIEYSKTIYSGCDKDDIEVLILQRFIKKLNEDMAEAERTIGEMIKLAQELPDFNIIKSIPGIGDNLAARIIAELGDMTRFKKKNELVAFAGLDPRISESGQNDGDHMHITKKGNKRLRCLLYLAVTCSIRLKRDDNSIKDFYIKKKQQSNPMCSKAAKTACASKLVRIIYSMCKTGELYQYNK

SEQ ID NO: 512331 - protein, 364 aa, unidentified
MKRKVYVGMDVHKETIRIANLTNNTKEIVKEQQIKHNEVQIKKFVNKLKSEWNEIHSCYEAGVTGYPLYRYLKSLGVNCILVAPGKIPRQSSDKIKTDKRDAIKLAKLLRSGELESIHVPSEEDEAVRDYLRSRDSLRLDLGRNRQRLMKFLLRKGITYSATKYWTVSHNKWLNTLQFNNEILQETFNDYYSRVRVQEENLKAMDKRIQEIAESEPYREKVGILRCFRGVDYLTAMFLLCEVCDFKRFKTAGSFMSFLGLVPGEYSSGSKRKQTGITKTGSPRLRRILTEAAWQHRFPGTGSKIVTARRSGQPALVVALAEKASLRLHKKFRNLQQRGKTPQVIITAVSRELSGFLWAAMNLVA

SEQ ID NO: 512332 - protein, 338 aa, unidentified
MSNYCGIDLHSNNCVIVVIDGSDNIVLDRKTSTSIGDVLDSLSICRDPIKAIAVESTYNWYWLVDGLQEAGYHVELVNTSAVKQYEGLKYSDDKSDARHLAHLLRLGILPTGYIYPPEERAVRDLLRRRLQLVRQRTTHVQSMQNQLTRNTGKQFKANEIKKLSPATIKRMLPNPNIQEAILSNLTILSVLQATIKKLEKSIINQVKLKPEFKQLRTVPGIGVIMALTIMLETGDINRFAKVGNYVSYCRCVDSKRMSNKKQKGQGNRKSGNKYLAWAFIEVANFSLQFNEQAKRFYQKKLAKTKRVIALKALAHKMARACYYIMKNNEEFNNERLFA

SEQ ID NO: 512333 - protein, 406 aa, unidentified
MQVIYERCCGMDIHKKSITACMITPEGKEIRAFGTMTHEIQALVKWLKEHQCNTVAMESTGVYWKPIYNLLELSEIEAMVVNAQHIKAVPGRKTDVKDAEWIADLLRHGLLKGSYIPSREQRELRELVRYRKSLIEERTREVNRVQKVLEGCNIKLSSVVSDIMGVSSRSMIEAIINNINDPELISKRGTGRLKSSRETLEQALNGLVGPHQRKMLAIQLKHIDFLDAEIKGLDREVAERLRPFEEDLELLETIPGVGRRSAECILAEIGTDMNRFPSDAHLASWAGMSPGNNESAGKRKSGKTRKGNKKLRSTLVQCAHAAARSKETYLASQYRRIAARRGGNRAAVAVGHSILVIAYHILKKHQPYHDLGANYFDERKSQSVLKNAVKRIESLGYSVIVEEKIA

SEQ ID NO: 512334 - protein, 305 aa, unidentified
MKTYIGIDIAKLNLDIHQDGKASRIPNNEKSITAFLKSLSDQSIIVCESSGGFEALLISLAHIHLRSIARINARQVRDFAKAKGRLAKSDAIDAQILAEFGQAFHPSPLSIPDRLQQEIAALVKLRAHFLTQITQNNNLTETISDKSLLAIIKKTVSSLKMQADKIQKLIAEKIKSSPSLQSKVSRLQEVQGIGEITASSLLGLMPELGSLSDTQAASLAGVAPFNHDSGQFRGQRHIRGGRSQVRSVLYMSALVASRHNPILKTLYQRLLVAGKPKKLALTALMRKLIILANRLLKNPNFSLAN

SEQ ID NO: 512335 - protein, 351 aa, unidentified
MIIIGVDYHPSVQQVAFVDMQTGETGERRLKHSDGEAEHFYRDLQRRQVEVRVGMEATGHARWFERLLAELKFELWIGDPAKIKAARVRKQKTDRQDAQLLLRLLVEARFPRIWVPSPENRDLRQLILHRHRLVQMRTRAMNQIQATAMNEGMRRKKTLWSKTGRKQLESLTLPPWSTRRRQDLLELVDRLDSAIGELTAAIEQEARQRPKVLRLMTHPGVGPITALAFVLVIGSPDRFACGKQIGSYLGLIPCEDSSADRQRLGHVTKQGSSLLRFLLVEAAQAAVRWDTDWRRRFVHLAMRRDRRIAKVAMARKLAVSLYWMWRKGYDYQQHLKFGSHAGEPGYVHGVK

SEQ ID NO: 512336 - protein, 450 aa, unidentified
MQQPQEVEDREGERTVARVAAVDVAKASGVVCTRVPREGEPGRFTTKVWPVAATTNAILELADHLAAAQIEKVVLESASDYWRPFFYLLEAAGLTVELVNARDVKNAPGRPKTDKLDAVWLAKLAGWGMLRPSFVPPAEIRQLRDYTRLRTDLTRERTRHWQRLEKLLEDALIKVTTVASRIGTMPVRDMIEAMIAGQRDPHKLADLARGRMKAKRAALIEALTGRFDDHHAELAAILLAQIDSLTRQVEALTARIEQLIPAIPAAQGVDPDGTTGPLAGRGPDAPVLPAIDRLEQIPGISRHAAQVIIAEVGLDMTRFPAAAHLVSWARLCPRTIQSGASIRPGKTAKGNPYLKGVLGDAAAAAGKTSTFPGERYRRLAKRRGKLKALVAIARTLLVIIWHLLADRAARYDDLGDNYYITTINTDRKLRSHIRQIQALGYDVAITPAAA

SEQ ID NO: 512337 - protein, 370 aa, unidentified
MGKSLLYVGLDVHKMSVDVAIAEAGPAGEVRFYGRIGGDLEALDKVTRKLQAQGAELRFAYEAGPCGYQVYRHLTARGLECLVAAPALIPRRPGDRLKNDRRDALALARLLRAGELTPIKVPDEDDEAMRDLTRAREDAICVERRAKQRTVAFLLRHGRVYQGKTTWGRGHWAWLLQQVMEHPAQQIVLQEYLDAVREASARVLRLTGQIRDLVPQWRQAPFVAAYQALRGVSLIVAATVAAEVGDLDRFNNPKELMAYLGLVPSEHSSGASVRRGRITKTGNSHARRVLVEAAWAYRMQARVTRHLLKRQEGLPERVRQLAWKAQLRLCTRYRRLLARGKARQTIVIALARELAAFLWAISRAVAQATA

SEQ ID NO: 512338 - protein, 427 aa, unidentified
MPYQIAGIDVHKKMLAVVVADVEVDSEYQFQRRKVGTSPAELRALADWLVECEVEEVVMESTAQYWRPVWETLERYWMPKRRTREGASPMSGTLHLAQAQSNRGAGGRKKDFPDAERLVKRLVAQELTLSFVPDAEQRLWRTVMRRKYQITRNRVQLHNRLESLLEEAHIKLSSLVSDLLGISARRMLRAIADGETDPATLAALADQRLRATADQLSDALSACTTLNPVYRRLLKLALEELRLIEDHLGQLDQQMADLLAEHHDAVQRLAEVPGLGADSAQQIMAEVGATAATFPSPKHLASWMGACPGNEESAGVNYSHRCPKGNRQMRRVLNQAANAAVKAKGTIFAVVYRRLVPRLGHAQAIGAITHRLCRLIWKILHQSVRYEERGPAVSVEAKKVRARKMIRELRSLGYRVELPPAPSSSPA

SEQ ID NO: 512339 - protein, 426 aa, unidentified
MAWRRKDKGGVMTEDVQWFAGIDWASQTHQVCLIDGGGKIVGERGFAHGGAGLCELCSWLLTMTRGPAPTIAVAIEVPHGPVVEALLERGFQVHAINPKQLDRFRDRFTVAGAKDDRRDAQVLGDSLRTDRHCFRRLSAEDATVIELREWSRMTEDLQQERNRLTNRVREQLWRYYSQALAISDDVAADWFLELWAAAPTPATARRLRESTVERILKGHRIRRITAAEVLALLRQKPLTVAPGTAEAASAHIRTVAQRLKLVNRQIKQAHQRLDALCDRLAENEEDNAAGQNCEQRDVTILRSLPGVGRIVLATLLAEASEPLRRRDYHALRALSGVAPVTKRSGKRCTVVRRQACHTRLRSAVYHWARVATQHDQRSRHRYAELRKRGHSHGRALRSVGDRLLSVACAMLIRRTPFDPDVRQMAA

SEQ ID NO: 512340 - protein, 424 aa, unidentified
MDRVLERPAALDVHKVQVTACVRTPGEGGRRRQEVREFKTTVRGLLGLRDWLAGLGVTTVAMEATGVYWKPVWAILEDEFELLLCNAAHVKNVPGRKTDVGDSVWLCQLLEFGLLKASFVPPKAVRELRELTRRRRTLVRERAQEANRLHKTLEDTGIKLDCVASDILGVSGRSMLDALIAGQRDPQVLADLAKGRLRAKTADLQEAMEGCRFSAQHALLIGGILRHIDFLDAEITALGDAIEAHMAADRQREDSERPFELAVQIACSLHGIQARTAQMLIGEFGTDMSRFPSDAHFASWAAQCPGNHQSAGKRRSGRSRKGPKWLDGALHDAAMGAIRVKDGHFARKYRRIKARSGHKVAIGAIKHAIVIALYHMLRNGEMYRPPTPHPDAERKQRERTTKRLIAQLERLGHSVTLQEGAAAI

SEQ ID NO: 512341 - protein, 321 aa, unidentified
MGAIWIGIDVSKRCLDVAVRPTGESFSIDNDDTGIKNLTKTLAKRSPQLIVLEATGGHEYAAAYALMKAGLPVAVVNPRQVRDFARAVGKLAKTDPIDAKILAHFGEAVQPPARPVPDQQLEEIGHLVTRHRQLVQMIVAEQNRRMSSMGTARRDIDATIRFLRDRLDKIDEQMKTLITKHPEWRAKAELLDSVPGVGPVLISSIVAELPELGTLNRKQIAALVGVAPFNNDSGQWRGRRRIWGGRGHLRSLLYMSVVAGIRFNATIRQFYKHLTGGGKAPKVALVACMRKLLVILNAMLKSQQPWRPAATCDELASLVPA

SEQ ID NO: 512342 - protein, 420 aa, unidentified
MKSARNTLPEEPAGNVTCGIDWARDDHAVSVVDVRGREICRCSVEHSAAGLRELLAVLERTGAREAAIERPDGPVVDTLLEAGITVVVISPNQVKNLRGRYGSAGNKDDRFDACVLAGTLRTDRARLAPLTPDSPATVTLRRACRARKDLVGHRVALANQLRAHLRNAFPGAVGLFAEIDSPISLKFLARFESRDRAGWLSPRRLAAWLASVGYCGRVDPAVLHARLIAAPRGAAGDDGTAQACITLALHAVLATLVEQIRALSEQIGEQLALHADAHIFTSLPRSGTVRAARLLAEIGDCRARFPAPEALACLAGVAPSTRQSGKMRAVSFRWACDKQLRDAVTDFAGDSRRASPRAADLYNRARGRGHDHPHAVRILARAWLFVIWHCWQDETAYDPARHHALQRLLATRDSTAARAA

SEQ ID NO: 512343 - protein, 398 aa, unidentified
MTESSDYESVQVFIGVDVGKDTHHAVAINRSGKRLFDKALPNDENKLRSLISDLKQHGQILLVVDQPATIGALPVAVARSEGVLVGYLPGLAMRRIADLHAGEAKTDARDAAIIAEAARTLPHALRTLKLADEQIAELSMLCGFNDDLAAQTTQASNRIRGLLTQIHPALERVLGPRLEHPAVLDLLQRYPSPEKLASLGEKKLAAQLCKLAPRLGKRLAADIAQALAEQTVVVPGTNAAAVVLPRLALQLITLRKQRDEVALEVEQRVLAHPLYPVLTSMPGAGVRTAARLLTEVACRAFASAAHLAAYAGLAPVTRRSGSSIRGEHPSRRGNKALKRALFLSAFAALRDPLSRAYYTRKMSQGKRHNQALIALARRRCDVLFAMMRDGTFYTPQGS

SEQ ID NO: 512344 - protein, 340 aa, unidentified
MDATTYGLDIAKRVFQLYWVDAQTGEIANRKFGRDELIAFLAQRPAGRVALEACGSAHWWARKIRTLGHEVVLLHAQFIRPFVQTNKTDAADARAIWAAVQQPGMRTVAAKTEDQQVMLSLHRMRSLLVKFRTMQINQLRGLLYEFGVTFRAGRVAGLDEIRERMAELEDALPRSIVLNLLEQLRRINLFEEDINQLEKRIGAWQKHEAACRAISDVPGIGRLTATALVATIGDAKTFRSGREFAAFLGLVPRQNGTGGKIRLGSISRRGDPYLRTLLIHGARSVLCHTKMPTAWQKAIQVRRPANVVTVALANKMARVAWAILAHGTSYEAHHVSLKPL

SEQ ID NO: 512345 - protein, 343 aa, unidentified
MQTITTIGFDIAKSVFQVHGVDATGQVVIRRQLKRRHVLAFFEKLPPCLVGIEACASSHHWSRELQAIGHTVRLMPPAYVKPYVKRQKNDMADAEAICEAVTRANMRFVPTKTPEQQSCLMLHRTRHLFIRQQTAVINSIRAHLAEFGIVAPVGRKGVTELLHVVADPSDKRVPEVARACLAALGTQLLSLKEQILEFDRLIMAWHRSNQTSKRLHYIPGVGPMLATALVASVADPRTFRSGRNFSAWIGLVPKQHSSGGKDRLGSISKQGDRYLRSLFVAGALAVIRYAKIHGTGHRRWLMALLSRRPTKVAAIALANKIARMAWAMMAKGERYKQPVALAA

SEQ ID NO: 512346 - protein, 360 aa, unidentified
MIRQRTSVGLDVHARSVFGCALDGETGEVVERRMTPDHEEIIGWTQSLPGPVRVVYEAGPTGFGLARSFTAAGTECLVAAPSKLIRPSGDRVKTDKRDARHLARMVHLGEVVSVAVPTVEQEAARDLVRARDDCRGDLMAARHRVSKLLLRQGIVYYGGEAWTGKHELWLRRQRFEDRALQAAFDAAFDAMLCTVDRRDRIDTAIAALAADSEFTAVADRLQCLRGISTLTAFGLAVEIGVWQRFTGRTIGAYVGLVPSEYSSGVTRTQGGLTKTGNGHVRRLLIESAWHHRKRYQPGPRLRRCWDRATPAVRARSHAANRRLHTRWVRFDERRKRPVIANAAIARELAGWCWSLAVLED

SEQ ID NO: 512347 - protein, 340 aa, unidentified
MKHIGLDVHSTTTDACIRNDKGVIILRRRIATKAEDLERLMRSIKGAKRVVLEEDQMADWVARVLKPHAEEVIRCQPQYNKLISASEDKCDKMDAAALSELLYLNRIKRVHHPEEKYRTLREAVRAYWIASRELTRAKNRLKGWYLFNGFHESGRKIYSLRNRSKHMKVLQQLGRNIQLAELLYEHMDACRKLKAKHIRMLRTAARPVKDLIELVTTIPGIGPINGYTLVSLLEDGWRIPNKRKLWRYAGLSLRRNESRDMGFKGASRTGNRILKQVVMSAASSIVARGDRNALLALWERDMRQNVDPKRARRNLARKIAVIAQRLLRYKEAYINERIKP

SEQ ID NO: 512348 - protein, 346 aa, unidentified
MEHYVGLDVSLKLTSICIVDRTGKVEREGVVTSDPEAIATYIKLHTSHVVRIGLETGATSTWLWTELNKIGLPVICIDARHAKAVLKMKINKSDRNDAAGIARIMQCGWYKEVCVKDLDSHATKALLVSRALLVKIKRDIENQIRGLLKNLGLVIGRAKMNVFAVRAAQLAEERSELFAAVDPLLKAREAVEQQIADLDRKVLRLARNNAQMRRFMTAPGVGPVTALCFLATIDDPARFKRSRSVGAYAGLTTRRYASGEIDWTGRISKCGDKMLRSYLYEAANVLLTRVAKWSALKAWGIRLAKRSGLRKAKVAVARKLAVILHRMWIDGTEFKWSSRDAADQPA

SEQ ID NO: 512349 - protein, 467 aa, unidentified
MKNYDYNLFVGIDVSKGKADAAVLAVPELRSVKPRFLRKKLSFKFIKSDVVEFLNTVRKYSSDQHCLHTYFALEVTGIYSTNVYSFIKENCNSDEEIHQLNTDFVNKWRESHNISKSDPLDAQTISTIIGTDDDVRYVSDSVFENKNGYQDLKALVHRHYQIKKLHSQETNRLIALCDCYFPELQYVFEPKSAAFLAVLSQYPTSHDIINASKNEVFSLVYEASKHRCNMDKIDKLFNYAQDTLVPHVSDYIRCVIFNTVESIFNIRAQLKLIEKDIRKLAATFNVYSLLMTITGCGPLTAAVIIAETGDIFRFKNADHYVSYSGSSPRNKRSGKSVEIMGKISKKGSKYLRHALYMIAEFARRHNPVLKHLFERVKNGNKKRHKLAVIAVANRIARYIYSIMKSESSFVIMHENIMRLPEETRNTFFNSISLDFPKNTRKQIYQYSDVNGEIHRFVYKNETTESIA

SEQ ID NO: 512350 - protein, 388 aa, unidentified
MIYVGIDIAKLNHFAAAVSSDGEILIEPFKFTNDYDGFYLLLSKLAPLDQNSIIIGLESTAHYGDNLVRFLISKDFKVCVLNPIQTSFMRKNNVRKTKTDKVDTFVIAKTLMMQDSLRFLTLEDLDYLELKELGRFRQKLVKQRTRLKIQLTSYVDQVFPELQYFFKSGLHQHSVYALLKEAPTPNTIASMHMTHLAHILEVASHGHFGKDKARDLRVLAQKSVGVNDSSLSIQITHTIEQIELLDSQLFHTELEMANLVTCLHSVIMTIPGIGFVNGGLILGEIGDIHRFSEPKKLLAFAGLDPSVHQSGNFQAKKTRMSKRGSRVLRYALMNAAHNVVKNNSTFKDYYDSKKAEGRSHYNALGHCAGKLVRVIWKMLTDNVEFNLE

SEQ ID NO: 512351 - protein, 310 aa, unidentified
MDIIAVGIDVSKDRLDVAVHPGGEAFVVERNGAGLEQLTARLKQLAPTIVALEATGGFETIAAAAVGGAGLPVVVVNPAQVRAFAKALGQRAKTDPIDASVIAHFAAATRPEPRPLPDEATRFLSDLVTRRRQIVDMIGAERQREKRATSQHLRKSITRLIKALEKELVSVDTDIDDAVRSSPAWREAEDLLASVPGVGPIIARTLMAELPEFGRLNRKQIAALAGLAPYTRQSGQWRGKSFIGGGRQAVRTVLFMGAMTARRHNPVLKAFFERLVANGKPKLVALIAVARKLLTILNVMIRTKTPWQPA

SEQ ID NO: 512352 - protein, 410 aa, unidentified
MDTLIERCGGLDVHKDTVVACVRVPARGGGREQFIQTFGTTTVQLLALRDWLVAQGVTRVGMESTGVYWKPVYYVLEDALECWLLNARHLRNVPGRKTDVADAAWICQLVEHGLVRPSFVPPKPIRELRNLTRYRKAQIEERTREAQRLDKILQDAGIKLSSVASDVLGVSGRAMLRALIAGTRDPETLAELARGTLRRKIPALRQALHGRFGPHHALLVGTILAKLEFLDEALEHLSAEIEQVIAPFAAEAALLRTIPGVDRRTAEAVVAEIGVDMSRFGAAGRLASWAGWCPGNNESAGRHGPGKTRKGSKWLHTYLTEAAKAAARTKGTYFGAQYARLRGRRGPARATVAVGHSILVAAYHILDRHEPYRELGPDYFRRRHSREHQTRRLVRQIEALGYHVRLEEVA

SEQ ID NO: 512353 - protein, 419 aa, unidentified
MKIVYPVCCGVDVHKNVIVATVAVTDKNNITQYFVESFPTLNSDLIRFRTWLLGHKCYDVCMESTGKYWIPVYNILEEANIKVLLTHPKYVRAIKGKKTDKKDSKWIADLFKFDMVRASFIPPKDIRALRELARYRYKLVCMRSSERNRYQNCMTVSNIGLASVLSDPFGKSASDIMKYVLTSKVFDEEQCKKLICKTAKKKTELILQSIRGCNIESDQRFKMKEATAHMKYLDKTVLRTEAELYVRIQPYYHIVEHLSGQLPGISQLSAALIISEIGADMSVFESDKHLNSWAGLAPANNESAGKKKSVRISKAGQFLKPLMVQCALAAVKNQKEPYFALKYQKLKKRRGHKKAIIAIARMLLTCIYHMILNGESFNPSDYHEFHAPAPRNQPLTDETAIAFLAAHGYDVSSLSKLSV

SEQ ID NO: 512354 - protein, 350 aa, unidentified
MLIIGCDYHPSFQQIAFVDTDTGELQERRLEHREEAEKFYRGLGVQGMKVRVGMEASGHARWFERRLGELNFELWIGDATEIARKRERKQKTDRQDAQHILRLLLKDDFPRIWVASWENRDLRQLLWHRHRMVQARTRIMNQLQAVALNEGLRSKKRLWREHGREQLESFRLAPWASRRRQDLLELLNRLNPTIAELSQAIEHEAEKFSEARWLMSHPGVGPLTALAFVLIIGEADRFQCGKQVASYLGLVPLEDSSGHRRRLGHITKQGSSMLRFLLVEAAQVTVRSLPEWRSKYFHLMMRRGRKIAKVAMARRLAIRLYWMWRKGWDYEQVKKFGSHAGQLGTGDGVQ

SEQ ID NO: 512355 - protein, 341 aa, unidentified
MDHYAGIDVSLEYSSVCVVDANGKIVREDKVASEPEVLIAWFRSAGLSLVRIGLEAGPLSQWLYAAMREGGLAVELLETRHVRKAFEAMPVKSDRNDARGIAQLMRLGWFRPVHCKSRTAQETRALLTARKLVQSKLRDIEASLRGTLRGFGLKVGATTSRRFAERIKQLVPGHSILEVVAEALLAAHAVLLREFNGFERRVRTMARHDAKARLLMSAPGVGTMVSLTFASAIDDPGRFKSSKQVGAHFGMTPKKYQSGETDYTGRISKIGDKEVRTALFEAAHVILTKPVKGSALKSWAMRLAKRAGMKKAKVALARKLAVIMHRMLVDGTTFDFAAAAA

SEQ ID NO: 512356 - protein, 429 aa, unidentified
MGQAETPSSPVDASSFQDVVGIDIGSQTCSFCVLKPDKSQALKPLEFANAPAGFSLLQEHLERLEVAPHHVLIGLEATSRYGENLSRFLESRGYQLCLLHPRQTHQFAHQRALRAKTDQLDASTIARLLLSGEARRGYVPTELIATYRELVRLHSHLSDEVARYKNEIHALLTVLFPEFSQIFLDPSRPTALGILKRYPSAQALAAAGVESMAATLQELAPRHYGRKTAEQLVHLARHSTSAGIAISARSSSLKILCDQLEHTQSNLVHLEEEIDKLLDADTGAKGLQSVPEFGRQTVAVLRAELGDVTRFGRADQVVAYAGRDIQVRQSGKWKGEAKLSKRGSGRLRRLLYLAAVRSTRLPDSAFGQYYHRLIARGMKKVEALMAVMRKMLQVAYRLLRTQDTYDPSKVGVAPVPRPPCSDQLPATGG

SEQ ID NO: 512357 - protein, 452 aa, unidentified
MKHKRAGRGGAVPSLECIEPNAAGIDIGATEIYVAVPPDRDPNPVRSFPTFTEDLLALAAWLLAGRIRTVAMESTGVYWIPLFQILEARGIEVCLVNSRHVKHVPGRKSDVADCQWLQYLHSVGLLRASFRPEDAICRLRALLRHREGLVEMATEHVQHMQKALSQMNLQLHHVLSDLTGQSGLAILDAILAGERNPQVLAERRDPRVKASPETIVKSLVGDYRREHLFTLRQSLEAYRHYQTLIAACDREMETYLQDLDSKIDIEQHPLPPESHPHKPRKNEFRFDLRTHLYRILGVDLTAVPGLNAITVHTALAEIGPDLSRFANVSAFTAWLGVSPDNKKSGGQVLSSKTRRTRNRVNRALRIAAQTLHRSQSYLGTYYRRMRARLGAPKAITATAHKLARILFHLLTTGEPYDESIFAQEEQRHRTRLENRLRRQAREFGYELVALPG

SEQ ID NO: 512358 - protein, 344 aa, unidentified
MTIIRIGLDTSKHVFHVHGVDGDEQPALRRRLRRSQVEKFFAKLPPTRIGLEACGASHHWARVLRSLGHEVVLIPPQYIKPYVKRGKNDAIDAEAICEAMSRPGMHFVPIKSRDEQAALMLLKVRDLLMKQRTMLTNAIRGHAAEFGVIATKGPQNLAELLERLGEDANVPAPARELLNSLAGQIAALEVRLEALEAKLKAHHKADPRSRLLATIPGVGPITALSLTLKVPDATVFRSGRHFAAWLGITPREHSTAGRQRLGKISRQGDEGLRQSLVLGATAVIQQVERRIKAQRVSRTDSPWLLQLLARRPEKVAAVALANKMARIIWAMLVSGELYRQPQAV

SEQ ID NO: 512359 - protein, 435 aa, unidentified
MNTPNIPESEIAAWVGLDWADQQHVICLQAADSAAVETSVVKQRPEAIQAWVAQLQARFPQGKVAIALEQSRGMVLYARMAYECLVLYPIPPKTLAKYREAFHSSGAKGDLSDAALLLDLVRRHGEHFQAWVPDDPSSRQLRLLVEERRKLVAQKTRLTNELTSRLKSYFPQALDWVGELDTRLACDFLQRWPRLDSLQKARPAQLEQFYRRPHCYRSALIQQRLEQIRQAQPLTRDRAVIAATSLMVQALVRLLGPLLESILQFDQQIEALFAQHPDQALWASFPGAGPVLAPRLQAAFGSDRARFQQALELQQLSGIAPITQQSGKSRHVERRWARPKFLHQTFYEYAAQSRLACGWARAYYEQQRARGSKHPAAVRALAYKWIRLLFRCWQNRVPYNEETYLKALARHNPALRLAAEAAQSQMAKKKEKKAA

SEQ ID NO: 512360 - protein, 284 aa, unidentified
MVTYAGLDVSLRSVAICVIDDEGTVVFERTVRCEIEDIAHGLGPFRGDLTLIGFEAGAMSQHLYFGLKAAGFEVVCMEARQVNAALSAMRNKTDKADARGIAKILRAGWFRPVHMKSPQAHAIRALLSSRKAVQRKCIDLANEIRGLFRIFGLRLPSRLNQAHFDDHVRPTIKAHPDLSHALLPLLDARVSLYDAYMELDRRVKRLASHDRVCLRFMAIPGVGPITALTFRSAIDDPNRFTSSRTVAAHFGLTPRRVKRTTQAASPKQAILRSERRSMHLPTPC

SEQ ID NO: 512361 - protein, 313 aa, unidentified
MSQVCTIGLDIAKNKFQVHGEDRHGKKVFNRQLLRKEVLPFVANLPACLIGIEACGGAHYWARELGKLGHEVRLIPPRQVRPFVINNKTDAADARAICEVVRRPNTNFVQVKTVNQQHLSAIHRVRERAIGNRTALVNQIRSLLHELGIIIPQGIQKFRKALPAILTFENSQIPHGMVTLFQSLYEELCLWDERIKTIEEQLHSIAKNNESCARLMKIPGVGVLTASAIVAHVGDARHFKNGRQFAASLGLTPRVCSSVGKQKLLGSSKRGNKYIRKLLIQGARIHCIWWNRNITKEGQRRRLWLHQLTARRG

SEQ ID NO: 512362 - protein, 348 aa, unidentified
MESVAGLDVGVKKSALCVVTRDAASMRPVGRHRTATDPSLIGSWLASQGVVRVGLEAGAQSSWLARELEHRGFEVTVMEARRQRAFGAYSKVKTDERDARLIGEALATGLYTRVHVRSVWSQEARALLGARLQLKRQVQQARQFVRGHLRAIGVELGQVTGKKWLVAAEAAVTARGGVLGLSLTAMLEACHALGRQVSVLDKEIRRLVRQDAPCRRMMTAPGVGLLSALALRASLDDAARFARSAEVGPYLGLTPSRWQTGATDRRGAITKQGDSLVRAYLYEAATSLLERQKRDCPLRRWGLAQQDRLGKRRTRVAVARKLAVLMHKLWSSGETFDWNRGMEAKKIN

SEQ ID NO: 512363 - protein, 313 aa, unidentified
MATYIGVDIGKKSLQLYLPAIDKSFILNNNLSGFTALITQLNKHYTKLTDLILVFEPTGGYEVHLRSFLKEFQINFTTVHPNKVRAFARAKGLFAKTDKLDSKLIYDYATTFSLEAKTCHNTEAQNILHNLLKRREQLINFKNQEINRLETETNELISKSLEKHIDYLTHELTTVNSNIAECSQNPVIKDKIIKLTSIPGVGIILATKVVCELPEIGIIDFRKLTSLVGIAPFARDSGSYNGKRGIYSGRSNLRKVLYMAAVASLRCNKTIKSFYDRLIVNHKPPKVALVAVMRKLLAFMHTLIKNNNHWKYT

SEQ ID NO: 512364 - protein, 355 aa, unidentified
MNDAKYIGMDVHQATICAAVRDSSGNLAMEATLETKAETILEFVRGLRGSLRVSFEEGTCAAWLHDLLKPHVTAVLVCDSRKNALLRVGNKNDREDARKLAELLFLNKLHSVYHGETGIRALKELARSYLTITRDLTRVMNRLKAIYRSWGIACAGQQVYAPRYRAEWLAKITEAGVRRRAEIYYQQFDVLAALRQEARRELLAESRKHPAQRLLRQIPAIGPIRAALLIALMQTPHRFRTKRQLWAYCGLALRTYDSGEYRFVGGQLKRSKKAVTIRGLNKNHNHDLKNIFKGAATRAAATVGPFQNFYEARIASGMKPPMARLTLARKIAAITLLVWKKGVRFDANQLKQQAA

SEQ ID NO: 512365 - protein, 345 aa, unidentified
MAEIIRVGIDTSKAVFTLHGIDAAGRPVVRTELRRAQMIPFFRKLPTPTILAMEACGSAHHWARELSKLGHTVRLVPPQYVKPYIKRGKNDRKDAEAICEAAGRPGMHFTPVKTMEQQAEGMVLKAREMLVGQRTALINAVRGHAAEFGIIAAKGAAKVEMVFSAIEQQADIPPAARETFVLFRRQIDDVSARIAELDARLNAAHKANPISQRLATIPGVGPITAMTLAIEVDPAQFESGRHLAAWVGLTPKEKSTGGKQRMGGISRAGNERLRSLLVIGATAVIKVACRPGNRQMTEWLRALLARKPRKLAAVALANKMARIAWAMMSSGETYRRDAVAGAATA

SEQ ID NO: 512366 - protein, 389 aa, unidentified
MKIFVGIDIAKLNHFAAAISSDGEILIEPFKFTNDADGFQLLVSKLESFDKNSIIIGLESTAHYGDNLVRYLVAEFYQVCVLNPIKTCQMRKNNVRKTKTDKVDTFVIAKTLMMQDDLRFITFFDLDMMDLKALGRFRQKTIKQRTRLKIQLTTYVDQVFPEIQYFFKSGLHQNAVYALLKEAPSPKEIASMHMTHLANLLKVNSHGHFTKEQAKELRVLAQKSVGANDSAISIQITQTIQQIELLDSQLEKIEVEMTDIMKFNDSVIMTIPGIGYINGGMILGEIGDIHRFSNPNKLLAFAGLDPSVYQSGNFQAKTTRMSKRGSRVLRYALVNAAWNVVRNNATFKAYYDAKRAEGRSHYNALGHCAGKLVRVIWKMMTDEVEFNLK

SEQ ID NO: 512367 - protein, 355 aa, unidentified
MNSEKYIGMDVHKESISIAVMNGAGKIVMECVIETKASVILQFIHGLSGDLHVTFEEGTWAAWLYDLLKPHVTKLVVCDPRKNASMKEGNKSDKIDARRLAELLRLNHLSPVYHGEHGLRSLKELVRSYLTITKDLGRVMSRVKAIYRSWGIPCTGKQVYAPRHRAEWLGKISELGVRRRAEFYYQQLDALRALRKQVRRDLLAECKKHQAWKQLCQIPSMGPIRAAVLLGILQTPHRFRTKRQLWTYSGLGIETRSSADHRSVDGQLERAKKQISVRGLNQNCNHDLKNLFKGAAIVASSKPGPFQEFYTALLTQGIRPEMARLTLARKIATIALMVWKRGASVDAQHLKPQTA

SEQ ID NO: 512368 - protein, 398 aa, unidentified
MAGLADDAVDKADPADLPAEPVDIFGTAPPKLMGWMAPSRHQSAKLVVVEEHQEREPSMNEITTIGLDLAKNVFQIHGVDGLGTAVLRKRLRRGQLLAFFAGLPRCLVGLEACATAHHWARELQAVGHDVRLMPPQYVKPYVKRNKHDAADAEAICEAVRRPSMRFVAVKTAEQQAALLMHRGRELLVRQRTMLANALRGHLAEFGLIAAQGLHKVAGLIAVVRDEKDDRVPGMARQVLRLIAEQIDELEARIAAIEAQIMVWHQANPVSQRLATIPGIGPIIATAVAATVADPSVFRSGREFAAWLGLVPRQNSTGGKARLGGISKRGDSYLRRLLVNGAHAVLLRSKAGKADPWLIALRGRKPRLVVAVALANKTARIAWAIMSKQDIYRRAAAAV

SEQ ID NO: 512369 - protein, 353 aa, unidentified
MSSKANSTVATMGIDIGKNSFHIVGLDRRGAIVVRQKWTRGQVEARLANMPPCLIGMEACVGAHHLSRRLHLLGHDARLMPAKYVRAYSKGQKNDFRDAEAIAEAVQRPTMRFVATKTPEQLDLQALHRVRGRLVSQRTGIINQIRAFLLERGIAVRQGLRFLRAELPQVLAKRTDVLSIRMVHVIEDLAGDWRRLDERIEGLSTEIEALARQDRGCKRLMTVPGIGPIISSAMVAAVGNGAVFSKGRDFGAWLGLVPKQISTGDRTILGKISKRGNRYLRVLFVQAAWVVLIKPQTWERYGLKQWIAAAKKRLHHNVLAIALANKLARIAWAVLNKDRDFDCVRTNVAPRRA

SEQ ID NO: 512370 - protein, 343 aa, unidentified
MGIDIGKNSFHVIGLDRRGAIVLRQKWSRGQVDARLANMSPCLIGMEACVGAHHLSRKLQAHGHDARLMPAKYVRPYSKGQKNDYRDAEAIAEAVQRPTMKFVATKTADQLDLQALHRVRERLVGQRTGIINQIRAFLLERGVAVRKGLGFLRKELPAILATRVDVLSPRMMRVIEDLAGDWRRLDERIESLSTDITTLVEQDPACERLLTVPGIGPIISSAMVAAIGTGDVFSKGRDFAAWLGLVPQQISTGDRTILGKISKRGNRYLRVLFVQAAWVVLTRIKDWERYGLKAWIDAAKKRLHHNVLAIALANKLARIAWAVLNKESKFQCVTTRAMTPRPA

SEQ ID NO: 512371 - protein, 371 aa, unidentified
MSKVRFVGLDVHAETIAVAVAEPDGAVRSVGVIPNRPESIRTLLKKLGPADQLRVCYEAGPTGYVVYWQLTGLGVKCDVVAPTLVPTKAGDRVKTDRRDALKLARSYRAGDLTAVWVPDAAHEALRDLVRAREAAKKDQLRARHRLGKFLLRHGRRPPTGMKAWTQAHLAWVKSAVRFEHAPQEATLLDYLHEVDHVAARLVRLEAAIDAAITTAPIRMRAVIEALQALRGIARLSAATIVSEVGDLSRFAKPRQLMGYSGAVAREDSSGERTRRGGITKTGNAHLRRIVVEAAWAYRHRPALGPALRHRQASVSAEVQAIAWKAQHRLHTRYRALTARGKCKQNVVTAIGRELLGFIWAIGVCVESTRVA

SEQ ID NO: 512372 - protein, 356 aa, unidentified
MDKYIGFDIDSKKTVACVVEKGKKERYATIGSDVQSMRNYLKGQKSDGSRIHLTFEVSGQAGFIYDSLIDCADTITVSNPSKMTWIYRTAKKNDRIDSRKQAILLSIGEIPKVHMPEAEIRQWRNVILHRRNLVNKTTEVKNRIRAVLKSQGFSRPEQKGSWWKRSNRLWMRSLSEQQVSSIGLWRMNLCNLMEQLELLDGQVKRVTEYLDNYLGRHGGGKLLMSIPGVGPRTAEAILAYTDDVRRFGRTKQYCSYFGLTPRLDESGTSRRLGHISKLGPSVVRWLLCESSWKVIRKSSAMRAFYERVMAGQAGRKKIAIVAVCRKLLSIMRAMLETGELFNEELVCKKCEVKRAC

SEQ ID NO: 512373 - protein, 404 aa, unidentified
MEVVYPNCCGLDVHKQSVTACLRRGRQTEVRTFRTMTRELLALSDWLAEAGCTHVAMESTGVYWKPIYNLLDGHFQLILVNAQHLRAVPGRKTDVKDSEWIASLLAHGLLQPSFVPNREIRELRDLTRHRTKLVQQRAAAINRIHKVLEDANIKLASVATDVLGKSGRAMLEQLVAGNGDAQQLAELSRGALRRKRPQLRDALEGRVREHHRFLLRELLDQTDYLNAAVDRVSERIALQVQPWLPEITRLDTVPGLSQRLCETLIAEIGPDMSWFPNAKHLVSWACVCPGSNESAGKRKSGHTRSGNNWLRGALIEAAWAAARTKDTYFGAFYRRIMRRRGKKRAVMALARVILVTVYHILRDQSTYRELGVDFYDRQNLPHVKHRLVQRLQALGFNVQLEPTG

SEQ ID NO: 512374 - protein, 311 aa, unidentified
MDCYVGLDASLKKTSVCVVDGTGKVLCEGVVDSQPSAIAKFLKSRALGAIRIGIETGPTSIWLTTELRALGLPVICIDARHAKAVLKMQINKSDRNDAAGIARIMQTGWFKEVRLKGFDSHAVRALLTSRATLVKIKRDLENQIRGLLKIAGLLVGTARGNAFSQRVLELAEQSPELAVSVMPLLTTREAIGKQLYDLDRKVLRLARGDRQAQSFMTAPGIGPVTALCFRATIDDPARFSRSRSVGAYVGLTTRRYSSGEVDWTGRISKCGDPMLRSYLYEAAGVLLTRTEMVGAEGVVHAPGQAYRHAQG

SEQ ID NO: 512375 - protein, 345 aa, unidentified
MTIVEARAITGGVDTHADVHVAAALDPIRGLLGVQEFPATAGGYARLLGWLGGFGTVALVGIEGTGSYGAGLARHITAAGVRVVEVDRSDRQDRRRQGKSDPLDAVSAARAAQSGRARGAPKGRDGAVEAIRALMVARRSAAGERTRTINQARALILTGPDDLRARFAKHTAAALIAGLASLRPRPGDVAGQATRVALRELGRRAVFLDGQLERLDELIIPLVSARAPGLLALYGIGPHTAALLLIAAGDHPGRLRSEAAWAHLCGAAPISASSGKVTRYRLNSGGDRQANHALWRIAFTRMGSDPATRAYAERRTAEGKSKAEIIRCLKRYVAREVYPYLRPAS

SEQ ID NO: 512376 - protein, 402 aa, unidentified
MPFFVGIDWASQAHAVCVIDDTARIHWHGVVPHTAAGLTDLRDRLRRFQPRGPLRVALERPSGLLVDTLLDAGVEVVPVHPNALKASRPRYSAAGGKSDPGDAFILADLLRTDGHRLRPLHPPADETRALRALVRGRDDLVAHRVALANQLRALLERFWPGAAAIFADVDSPIALAFLTRYPTPQSAARLGDKRLAQFLRQHAYCGRRPVPELLARLRNAPSSQVGDAEAEASGEVVRTLVAVLGPLVLHLQQLSAAIDAALREHPDGPLVQSLPRSGAVNAAQILAELGDDRARFATDAQLAAEAGLAPVTHASGKHHAVVFRWACNKRLRRALTTFADNSRHSSRWAALVYQRARARGCRHPHAVRILARAWSRILWRCWQDRRPYELARHRAAAGLVAA

SEQ ID NO: 512377 - protein, 323 aa, unidentified
MSLSAVLGIVLAKQKFDAALLVDGKTKHKTCKNSVEGFEALTLWLTKQEVEKVHACLEATGSYGEDLAVYLHDAGHIVSIINPARIKGFAQSEMIRTKTDKMDAALIARFCLAMKPKEWTPPLPEKRSLEALVRRVYSLIDMRSQEKNRLSTSHESVSSMIKEHIAYLDREIEKLRKQIDELIRKNPQLKEKEELLESIPVLGKATIPRLMAELDDLDKFNHVRELVAFIGLAPREKLSGSSIKGKPRLSKIGHAKLRKALYTPALVPIQCNPVMIDFYKRLKNKGKNEKVIVCAIMRKLVHVIFGVLKSGKKYDPNFKPILA

SEQ ID NO: 512378 - protein, 399 aa, unidentified
MSNPQSLQLRVGVDVGSRCHSVAIGLSDGRLLEEFEIPHTAAGFREFFSRIEGRAKRHPYPIAVAMEGYNGHVRPLDSLVRARGWQLFNVNNLKLARFKEIFPAPAKSDRIDTRKNLELFQLRDHLPMAGDVLQEVMATPAENDILKRLSRRRRRLVDERGRVLNSIQADLQAVAPGLLQITRYVGNLWFLNFLTCRKDIRKLARLRRASLLKLPAIGPGYADCIQAWQRDACFGPDASLVSNMIRQDAMRIRQLNRQIKALEDETARIAATSTIACQLASIPGYGSVCTAELAGEIGTIARFRSEASLALYLGMAALDNSSGKFRGSKAPKHVNTRAKAAMMAAVDHHRKRVPQSERYYEKKRAEGKKHNQAIRALGRHLCRVIFKMLSEERPYWIDT

SEQ ID NO: 512379 - protein, 391 aa, unidentified
MDEAWAGVDAGKEFHWAHVLEDSGRQLLSRKVENDEADILRLIDEVLSLAEEVVWAVDQPGGGAALLLALLWERHQRVLYVPGLSVDRARDTYRGESKTDARDARVIADQARMRPDLGELRPGEQEISELQLLLARRRDLITDRSRTVTRLREALLSLFPALERALDLNSKGPLILLTHYQTPAKLRRAGQKRVAAYLRSRGVKGSTNVAHKALSAAGSQSVTLPAQEVASRIVAELAEEILASKERIESIDKEISQRFFARPEARILNSLPGMGPILGAEFLVAVGDLRAFESADHLAAYAGLVPAARDSGKRVGNRRRMRGGNKTLKRVFYQSAFASLRGCAQSRAFYDRKRAKGKRHTQALIALARRRVNVVWAMLRDGTAFESRSAA

SEQ ID NO: 512380 - protein, 342 aa, unidentified
MNYYAGIDVSLKCSSVAVVNGNGEIVREAKVETDPTSVIEWLRSCGLPMERIGLEAGPFSQWLYAAMKEAGLAVELLETRHVRNAFKTMSVKTDRKDARGIAELVRVGWYRPVHCKSMDAQETRTMLAARKLVDQKLKDVEMSLRGLLRGSGLKVGRTTPTRFADRIKELVSGNATLQIIAESLLAVHQVLLREFKSFEKRVRIMARDSAEARLLMTTTGVGPIIALTFAAGIDDPGRFKKSKAVGAYFGLAQRKYQSGETDITGRISKAGDAGVRTALYQAAHIMLTKPVKASALKSWALRLAKRVGMSKAKVALARKLAVVMHRMLVDGKPFNPAAGAVA

SEQ ID NO: 512381 - protein, 387 aa, unidentified
MIYVGIDIAKLNHYASAISSDGEVLLEPFKFSNDNDGFYTLVSKLNQFEKDKVIIGLESTAHYGNNLLAFLVPKGYNVCLINPIETSTMRKNNIRRTKTDKVDTYIICKVLMMQPHRFITLYDIGLMQLKNLGRFRQKTVKQRSRLKIQLTSYVDQVFPELQYFFKSGIHQKGCYALLKEAPSPEAIASMHLTHLTNVLKSSSHGHFKKETAVELRVLAQKSVGTSDNSLSIQITQSIEQIELLDRQLELIESEMEDIVKSLDSVIMTIPGIGYTNGGMILGEIGDVTRFSNPSKLLAFAGLDPSVYQSGNFEAKRTRMSKRGSRALRFALINAAHNVVKNNATFASYYNQKRSEGRTHYSALGHCAGKLVRIIYKMLTDNVAFNLD

SEQ ID NO: 512382 - protein, 430 aa, unidentified
MSYRIAGIDVHKKLLAVVVSDVEVEGEYQFERRMFGSNPEQLRSLAAWLLEQEVEEVVMESTAQYWQPVWAALERYWKPIREKQQGASRKSGTLHLAQAQSNRGRRGRKKDFPDAERLVKRLVARELILSFVPGAEQRLWRTVTRRKYQLTRDKVRLQNQLESLLEEAHIKLSSLVSDLLGASARRMLKALADGETNPGALAALADQSLRATPEQLCDALGACTDLQPVYRRLLKMALEQLQFLEQQIGQLDQEMAKLLSQHQDAVQRLAEVPGLGVDSAQQIIAEVGATAATFPSEKCLSSWVGACPGDDESAGVNYSHRSPQGNRHMRRLLNQSANAAARTKGSIFEIVYRRSVPRLGHNQAIGAIAHRQCRLIWLILHQGVRYEERGPAVTKRSKQKRTARMIRQLRSLGYRVEPINSQLATPGLAR

SEQ ID NO: 512383 - protein, 442 aa, unidentified
MVRFVGGDLQGRFMARVRGVDALRCLVVPVDVGKWSAMALIADHHGEVVVAPFEFRLDEPGVRRLVSVIVVAGVERDAAVCRVGVESAGHYHRTLVARLRAGGIEVVELNPAAVKEARSQQLLRRLKSDERDLGAMAELLVRGAGRLPQVRDDAMAAQVAWAAHRRRKVAAHVALSNQVQGHLDLVFPGLGACFNDILRTKAGMVIVRDLADPDRMRRLGVEGLRRFVARRGVVLRRAKAEQLLEAAKIALRLPAAERAPVGALLAADMALLNVIGDEIRRCEHALEEVLAATPAGVLLSLPGVAVIRASAYGAAIGDPSRFPNAGAAYRASGLVPAEYSSAGRRRGGQHISREGSVELRSAIIELGRGLAGHDDDFAAYKRRLHSNGKRPAVAAVAVGHRAHRLAFAMLRSQEPYDSQRWASAVADGPVMAKTGGRPTKTT

SEQ ID NO: 512384 - protein, 414 aa, unidentified
MDVLHERCVGLDISKKDVKACVRTPSTKRRGSFTTETTTWGSTTNAVLALRDHLLAARVTLVVIEATSDYWKPFYYVLACELNVILVNARQVKNLPGRKTDVSDAAWLAQLGAHGLVRPSFVPPEPVRELRDLTRARTTATRERSRVVQRLEKLLEDTGIKLSAVASDIMGVSGRAMLEALIRGEGDPQVLADLAKRKLRNKIPELTEALTGRFREHHAFLARLHLDHYDQLTTMIDQLTGRIEEAMAPFRGALDLLDTIPGINRAVAEVIIAETGGDMNRFATAKHLASWAGVCPGHHESAGRTKSTKVRPGNPYLKGALGLAAFGAVRTKDTYLQARYKRLTARRGPLRALVAVEHSIITALWHMLTDNVPYQELGGTYFTQRDPERATRRAVNQLNQLGYTVTLNPRENPA

SEQ ID NO: 512385 - protein, 323 aa, unidentified
MSKIVLGIDISKKDFHVTLILENQTTKSKVFKNNPEGFVNLQNWLIKQGATQVHGCMEATSTYGEALAEFLVENGHKVSVVNPSRIKGFAKSELLRTKTDKVDAAVIARFCLAIAPELWTPLPVEVKELQALLRRLESLTDMYQQEQNRLETATPTVAALIESHLEQLKQLIVQVKQLIHDHFERHPDLKAKRDLLTSIPGIGEQTAAVLLTEIGCLEQYRNARQLAAHAGLTPQERSSGSSVQGKSRLSGVGNARLRKALYMPAVAAMRHNPLLKLFAQRLLDRGKVKMQVLAAVMRKLLHLAFGVLKSQKPFDPDYLAHAS

SEQ ID NO: 512386 - protein, 427 aa, unidentified
MSVTQNEKIRQVTDTTMVIGVDIASELHWARAFDWRGLELGKTVKFENSAEGFNFFLRWVSELTVEQKKDSVMVGLEPTGHYWFTLAAHLQGGDFKLVLVNPYHVKRSKELDDGHPSKSDKKDPKTIAKLVLEGRYVYPYIPQGLYAELRVAMNCRWRIRKELASLQNQIQRWLKIYFPEHSKVFGRFTGAGSMALLHSAPFPSDLISLGVEGISGIWKQMKLRGIGRKRAQRIYEAAQTSVGCTTGMEAARMELQILLEDYDAKLQQYERVMQVVENLCSQIPAVAELLKIQGLGLVTVAGLFAEIGDIRRFESPRQIQKLAGLAITENSSGKHKGPTEISRRGRSRLRAILFRAAIPLLAKNREFQLLHRYYTTRQNNPLQKIQSVIAICCKLLRVFYALATKDCAYSPEKMLADIQRNQPLKAA

SEQ ID NO: 512387 - protein, 359 aa, unidentified
MEAIRPQTVIGMDSGKKHSWGNAVNAETGEVLKERKLANDPESFQAFTEDLPRPIRLVMESTGNWAYLYECWEELVEEVQLAHPLKTKAIASARIKTDRIDAKILADLGRADLVPQAYIPPREVRDLRERLRHRAFLVALQTKLKNRIHSALGKLGISLPEVSDLFGKAGMAWLESLAMREPFRSLMDQDLRVLETVRQEIKQATQEVESLAEEDPRVEWIRPIRGIGPYSAMLILAEIGEIDRFPDPKKLVSFAGLCPSTYQSGGTCYHGRLTKQGSKWLRWILVEAAQHYSKAPGRLGNFYRRIAHRKGSKVARVALARELLVAIYHCLKKGVAFQENPVSERTDRSQHAPQFTGRA

SEQ ID NO: 512388 - protein, 385 aa, unidentified
MLSERRFAHEEDGLAELCGSLVEHGVGRVAIERPEGVLVERLLEAGVVVIPIHPNQLKAARPRFRASGYRAKSDSFDALCLAELARTDNHRFRVLTPDSDQTKALRALTRSREDLVGRRVALANRLRAELEAFWPGAAIMFKEIDSAISLAFLKRYPSPKEASKLGEKRLLGFLRRNRYCGRKSASELLRRLRKKAPQGRAGEAEMEARREAVLALVAALETLVGRIKRLEGRIAEAVRAHPDGEVFLSLFLAHKSTLTAACLLAEIGDRRERYPINEAMAADAGMSPVAIESGKRKVAGFRRACDKRLRKAVTTLAESTRHHNRWAKDIYQRARGCDHAHAIRILGRAWVRVIFRMWREGMPYDPARHGGLRRLQSQEGLPQGV

SEQ ID NO: 512389 - protein, 341 aa, unidentified
MKSTFFVGLDVHLRHTNVCILDQRGNRVKQATVRGPWSEIVTLLQGLTGEIQVCFEASCGYGHLFDQLSRVASRVKVAHPGQLRLIFRSKRKNDRVDAEKLAKLLYLDEVPAVYVPSDQVRAWRQLIEYRSRVVAKRTRAKNSLRALLRSLGIASPRGPSLWTRKGITWLRELKLELMYALRRDLRLDEMELLDQQIARCETQLKRFADTHPAVGLLQTIPGVGPRTAEAVVAYIDDPRRFSRSKQVGCYFGLAPSQDQSGPANRLGHITREGPATVRRLLIEAAWQGIRRSPTIRGFYERIQEEKSDRRKLALVATAHYLARVMHAMLKNGELWHESLAA

SEQ ID NO: 512390 - protein, 398 aa, unidentified
MLYVGIDVAKHKHDLAVIDTEGMIFIRHLQIENNREGFTKLQMTLANLQKTTGENIQIALEDTGHYCFNILRFLRTQGYSTYSYNPYLIKEFAKNQSLRKTKTDKKDAMTIARKLRTDLDKQCFNTQPLMIELKYLTRYTTRLKEDCTRKKVSYTRILDILFPELAPSLDSSSAKHQSYVYAILKEYPSARKLGNAHLTKLTNLISTHSKGHFGKDQAIKLKTLAKSSIGQESPALEFELLQTIDTIQYLTAMRDKAEKEVARLMSEIDSPILTIPGIGFKLGSVILAEIRDIKNFRSPNQLLAYAGAEPSVSTSGMNQTETGRMVKRGSSQLRWALHESARLMSIWSPSMRLYFQKKLAEGKHYNVAISHVVRKLVRIIYQLLKDNKPYEEQKMIVN

SEQ ID NO: 512391 - protein, 312 aa, unidentified
MAILSFCGIDVSKDRLDVVVLPEGWFFSVSNDTAGWAELVVRLRPLAVSAIGLEPSGGYERGIIRALLAAGLSVRRINPNKLRQFARARGVLAKNDRLDARLIAEYVAIMPTRVVQRDAAVERLAEIVTMRRQLCDEHVAAENQAAHLEDAMLRRLSKRRQMRLEADIRLLDKRLAEMVAANVALAQRYELLTSMPGVGPVLAFTLIALLPELGKMSRKQIAALVGLAPYDFDSGKLKGHRSIYGGRMSVRNVLYMAALSASRYSPALKAFHKRLAAADKKSKVIIVAVMRKMITTLNAMLRDSAAWQPRSA

SEQ ID NO: 512392 - protein, 374 aa, unidentified
MENDSTVYVGLDVHKESITAAYAIGMGEVELLGKIGTTKTDIDRLCTRLRSKARHVRVVYEAGPCGYGLYRELVEKGFDCMVCAPSLIPRKPGERVKTDRRDALKLARALRAGDLSAVYVPGVEDEASRDLARAWAAAKTDLKQARQRLKSFLLSHGVRYTGSANWGPAHRRWLSTYSFGNHWQQLAFDECRRTIEDRLSQCDRLEAALREAVIQWRFYPAVLGLQAMRGVQFTTAVGMLSELGDLSRFEHPRQLMAWLGVTPSEHSSGERRRQGSITKTSNSYARKLLVEAAWSYRYPARVSPDIQRRHDGIPKAIIDRAWDAQVRLCRRYRKLAARGKNVNIAVVAVARELAGFIWDIGRLAMSLAVPSTAL

SEQ ID NO: 512393 - protein, 356 aa, unidentified
MSSNVKYIGLDVHKEAISIAVLNGAGKLVMESIIETKAVTLVQFLQGLRGELHVTLEEGAWAAWLYDVPKPRVHEVVVCNPRRNALLKEGSKSDRVDARKLAELLRAGLLRPVYHGEHGLRTLRELARSYQTISKDLRRVMNRLKALYRGWGIPCTGTQVYAPRYRERWLNKIAEAGVRRRAELFYQHLDGLQVLRRQVRAELLVESRKHKAVKLLRQIPCIGPIRAAQLLALMQTPHRFRSKRQLWTYSGLGVETHDSAQHCYVDGRLQRSKKPQQIRGLNQNHNHEMKEIFKSTAMSASRRAGPFGDVYAGLLAKGIKPEMARLTLARKIAAITLTLWKKGANFDAEYVKPQAA

SEQ ID NO: 512394 - protein, 368 aa, unidentified
MNKSITGFVGLDVHAASTAISFATAGRAKPRFVGTVGAKRPQLTKALAQLGKPESLMVVYEAGPCGYKLARELADQGYHCEVVAPAKIPRSPGDRVKTDRRDALQLASLARAGALAPVVIPDARDEAIRDLSRAREDAVRARLKARQQLKALLLRHGLRYSGKTSWTAAHERYLAALTFDHSAQDIAFAEYRRAVAECQARVEHLTQALAQQVEQWRMRPVVYALMTLRGLDLVAATTLVAELGDLRRFARPRELMGYVGLVPSEHSSGAKRRLGAITKTGNGHARRVLVEAAWNYRFPARISRILQVRQENQPAEVRDIAWRAQLRLCDRYRRLSARGVQHNKVCVAIARELLGFVWDIGQQVTPEA

SEQ ID NO: 512395 - protein, 344 aa, unidentified
MKLTTVGIDLAKNVFQVHGIDEHGKVLVKKQLRRDQMAAFFVNLPSCLIGMEACGSAHHWARKLAAMGHAVRLMAPQFVKPYVKTNKNDAADAEAICEAVGRPNMRFVPIKNVEQQAVLALHRVRQGFVKARTAQANQIRGLLGEFGLIIPQGLGYIAARVPELIEDASSDLPGRFRMLVQRLLDHLKELDRQVDEIEAQIQAWHRNSELSTRLAQVPGIGPITASALIASIGDAKNFDGGRQLAAWLGLVPRQHSSGGKSNLLGMSKRGDSYLRTLLIHGARSVIYRASQKADPCSWVNAVVQRRNKNVAAVALANKNARIVWALLAHDRRYDTGYRKAAEVV

SEQ ID NO: 512396 - protein, 343 aa, unidentified
MTQYVGLDVSLKDTAIAIRQNGKRIWRGKCCSDPATIARTIRKHAPDPEKVVFETGPLATWFFHSLSGEGLPAICIEARHAQKILGETLNKTDANDAEGLARLAETGFYKAVRVKSFGAMLIRALVAARAQLLGVTTQLSNQIRGIMKMFGLIVPKSKGRAFLSRVQDLLQEQSQLAQIILPLVEVWQAVRARVSELSRQLLAAARHGRNTRLLMTIPGIGAITAVSFVAAVEDPGNFRNSRSVGAWLGLTPRRYQSGTVDFDGHISRRGDHRLRGLLYEAATALLARTRADTTSDLKVWGLQLRERLGFKRAAIAVARKLSVIMHTMLKTGQPFIPTREGFA

SEQ ID NO: 512397 - protein, 369 aa, unidentified
MKKGTLYVGLDTDKKSIDVAVAEPLPAGEVRYWGRTANTPASVDRLLRKLGQGGRSLAICYEAGPCGYGLYRQLAGKRGVTCSVVAPSMTPKRPGERVKTNRRDAVKLARLLRAQELTEVWVPDTAHEAMRDLVRARSTAVAVLTRCRQHISSFLLRQGIGYEGQPWSKKHRAWLDTLRFELMAHRLLFAELLLALDQAQARRDRLTDHIRELVPGWSLAWLVAALQALRGYDLVNAAIVVAEIGDPRRFASPRGLMGFLGLNVSEFSTGDRVRRGRLTKTGNKRARKALVEAAWTYSRPVAAKAKPGAQALPTAVQQIADKARHRLARRFRYLVAHGKLRQVAIAAIARESLGFIWAIAHAAAPQPAG

SEQ ID NO: 512398 - protein, 342 aa, unidentified
MAILFVGIDLAKNVFAVHGVDEHGKAVLVRPSVARAKLNELVASLPACTIGMEACSGAHHWARMFKQHGHTVRLMAPKFVAPYRMGGARGKNDAADAAAICEAVQRPNMHFVPIKSEDEQARLCVHRVRQGFVEQRTATINRLRGLLSEFGIVLAQKAAIVRREAAAHLEDLPGWANAAVGDLLSEVHRLDERLAEYDRHVTQMAADDERSRKLMQLQGVGCTTASAIVATIGNAHDFKNGRQLAAWPGLVPGQYSSGGKTRLGSITKAGDGYLRTLLVLGAKSVLAAAKNKQDRLSRWAVSLQERRGYWRAVVAIAAKNARMAWAVLAKGEGFKPLEPQAL

SEQ ID NO: 512399 - protein, 339 aa, unidentified
MENNNNPYYKHYLSIDWSQQDVSIARMRAGSNQPETKMFPADIKKIKEYLKGLQGKKILTIEETTGSHWLYVELLESVDKILICDPYRNSLLSEGAKNDKIDARKLCLLLRSGLLKEVYHTSNEDYKIRKLASAYIALVKSGVRIKNQNSALYRGEGLKYKKDKIKKGEEILSFVEEQQKRAIKLYEEEKKKYEEVFKELKKKNEVIKMLCQVSGIKETSAVKIYSVVIEARRFENKYKYWAMCGLVKHDRESGGKNYGKKNPRYSRILKNVYKSAALAAIGGNNDIREYYDVLLQKGYPIAEAKNQIARYIAKVTYAVMKNKKPYKAYQWRELNKQKS

SEQ ID NO: 512400 - protein, 353 aa, unidentified
MKSDKYIGMDVHQETTVVAVVDCDGKVILETIVATEASAIVRLLNGLSGPLHVTLEETTQAGWLYEVVRACAGDVIVCDPRRNGLLTEGSKGDKPDARKLADLRRAGLVRAVYHGHDGTRKLKELVRGYETLSIDTERTMVRIKAVFRGRGIRTPGTAVYQAKQREQWLGLLNEEGVRQRTTWLYDQLDHLRALRKEAKRTMLAESQQHRATALLKTIPQLGPIRSALIVATVDTPNRFRTKRQLWSYSGLGIVTHTSAEYEIQAERVVRRRKAVSTRGLNRNFNRRLKNVFVAAAIGGSHCEPYRKYLEGLTQKGMRAEMARLTLARKIAAVALSIWKKGETFDPKKLNWTT

SEQ ID NO: 512401 - protein, 422 aa, unidentified
MRAARIMNHNWTKHEYFAALDWAIDHHDLVVVNRLGVIYARFRFAHTAAGWAEFTQKMQPFADAPITLETSCGPAVDQLLQRGWSVYPVNPKSAQRYRERKAPSGNKADQPDAWSLADALRTDGHAWRRLVPQDEATSVLRALCRDEIGLIEQRTQLVNQLMATLREYYPAAFEAFEDWTQPTAWALIQQFPTPAQLQQAGKRKWEKFLHAQSLWRPSTAPRRLEVFAAANALPASPAVVRAKSLLATSLVRVLQTLQQQLNQYRQQINEAFARHPDHDVFGSLPGAGEKLGPRLLGEVGSAREVYPDVDALCCQAGVSPVRFQTGRIDKAHIRWACDKTLRYTVHLWADCSRRSSPWAQAYYARKRDQGMGHAAALRCLGKHWLKILWRLWQNRTAYDVKVHQQSLKNHGSWVQAQIQMNM

SEQ ID NO: 512402 - protein, 347 aa, unidentified
MSHKTTASVAHTIGIDTGKNTLHLIGLDDKGAIVLREKIARGRIAARFANVPRCLIGIEAGMATHYVARELIALGHDVKQVPPAYAKPFRQGHKNDFRDAHAIAEAVQRPSTRCVPVKTDDQLDLQALHRVRSRLVGQRTAVINQIRGFLLEHGIAVRQGLRFLRQQLPDIMAKRSDVLSPRMVRIIEDLSADWRRLDGRIEHVTEEIEVLAQGSEGCRQLMTVPGIGPLIASAMVAAIGNGAAFAKGRDFAAWLGLVPKQMSTGDRTILGRISKRGNRYLRTLIMQGARVILLRPANWAKHSFGPWLTAAANRLHHNVLATALANKLARIAWTVLMQARSYEARVN

SEQ ID NO: 512403 - protein, 413 aa, unidentified
MKKHTYRAQKVNTINWQQVKEQTLGETLVLAVDVAKSQQYALLTTEDHTKSWMMQWNHLEHTFYLIEQLKSLQTPVSVVMESTSTYGDSLRYQCRQAGFAIYQAHAKKVHDAREIFDGVPSLHDAKSAWLIAKLHKDSITKLWCESTIEERRMNALRLEYDLHQDQHLRNQNRLEAYMSRHWPEVLALMPIGSVTLEQLIKHYGSPQKVAAEAKQAALNMRSWGKTGLSVEKIAAVIASAINTLGEPCIEAECQFLMALASELEHSRLQKQTAKQALEALVDNDEGLREMGRVIGKATTAVLVSLHLDPRRFTSPKSYQKALGVNLTEKSSGQINGRLRLSKRGSSVARKFLYMAALRLLVKDPLIEKWYKAKKDDRAKLKTVIALMRKLPLALWHIARGERFDASKLLKIAI

SEQ ID NO: 512404 - protein, 366 aa, unidentified
MKKTSTVRVNGNMIFKGHKLTIGLDLGDRWSFYCVLEEAGQIILEQKLPTTPEAMKQTFESIPRSLIALETGTHSPWVSRLLRELGHEVLMAHAQKVQWISKSNRKDDRHDARTLARLARIDPELLGPVRHRSAKAQIHLTVIRARAELVSARTALVNAARGLAKSYGERLRKCGTQQVSRELAAELSVELPEVLEPLLQEVESLNERIKQYDARMEKIARESYPQVELLKQVKGVGTQIALTFVLTLEDPHRFPKSREVGCFLGLRPGRRDSGESQPQMHISKEGDPYLRTMLVQGAHYILGPFGQDSDLRRWGLKLAARGGKNAKKRAVIAVARKLAVLLHRLWVGGEVYEPLRNSHKAMRAVA

SEQ ID NO: 512405 - protein, 404 aa, unidentified
MHYIGIDIAKYNHVVGVLKKDGTPVGNARSFTNDFEGFSDLLRRLAELKVRADDSIVVMEATGHYWMALYVFLVDHGFDVAVVNPALINAFRKSDTLRKTKTDAIDAFLIAKFAKEKEITASPATIEATDGLKQLTRYRRHLVKEQTMLKNKCTAVIDRVFPEFGSLFSDMYGGAAKALLKADPTPAGIAATDIRTITKRIKEGSKGRLGREKAEKVKAAAKDSVGVQFASSTLAFEISHIVALIEHLDNQLDELEAEISRLLEETPGKWLTTIPGIGDTYAAIIMGELGDAERFESPKKVIAFAGIDASKNDSGQFESSGNRMSKAGSPYLRYALIEAADKARIYDPYFGDYYDSMIARGKHHLVALSGVARKLAGVVLTLMKEQRAYEPRPSIQSAKPEDVR

SEQ ID NO: 512406 - protein, 464 aa, unidentified
MRTLSVINPNAAGIDVGSEKLFVSIAGDEPAVFGTVTDEVYRLRDFLKQEGVTTVAMEATGVYWLYAYGVLEAAGLQVIVVNGRYVRNLPGRKTDMSDCQWLATLHAHGLLRGGFVPPAEIRRLQDYQRLRADHISEAASQVQKMQQALERMNIKFHDVISDLTGVSGMKVIKAILAGERQPARLLELCDKQIQKKKSERVLESLHGVWAPEHLFALGQALSVWEFYQKLLAQCDRQIEAVLKDLAGPPPASPPSSPESGETKAKGPKPPGKNAPQIDDLHALLVQICSGRDATSLPGVADYLWLQLVAETGTDLSAWATEKHFVAWCGLAPGTKQSGKRKGSVRRQCNRAGRLFSAGARSLVQSVDKGLGGFVRRISRRKGGLVATKALARKLAGLYYRVLRHGLEYAERGLREYEQKYEQSQRRLLAKLAAKHGFQLVSQQALALKAAISQAASPNPSQSHA

SEQ ID NO: 512407 - protein, 343 aa, unidentified
MAQQTIIGIDLAKHVFQVCMVTPQGTIKTNTTVARGKLLTLMARQPPALIFMEACGGAHDWARRFRAMGHEVRLLAPQYVTPFRRGQKNDPNDALALTEAGQRPNIPTVPIKTIEQQDLQALHRVRERLVKHRTAVVNQVRGLLLEYGIVIPQGMARLRKRLPRVLEEADNGLSFLMRDLLQSLQSELSALDTRITEVTSQLTRLSHELEACQRLQAMEGIGPLSATALVAALGNGHDFQTGRQVAAWLGLVPRQHSSGGTTRLGSITKGGNSYVRRLLIHGARSVISHVRDKPDAKSAWIRQLVTRIGVNKACVAVAHKMARVAWALLHTGEQYRKPAVLSI

SEQ ID NO: 512408 - protein, 416 aa, unidentified
MTDDVRWFVGFDWAREQHRACLIDTDGKRVAERDVTHGGTGLSEFCNWLLDTTGAQPAAIAVAIEMPHGPVVEVLLERGFQVFAINPKQLDRFRDRFSMSGAKDDSRDAEVLGHSLRTDRHAFRRLAIDDPLVIELPEWSRIYDELKQEQSRLANRVRDQLWRYYPQAGELGDPAANWFLDLWEKIPTPAKAARASEQTVARILKNHRIRRFDAAEVLRILRQQPLTVAPGTVEAATAHIRTVAARLRLVNEQIKEAEHQLDKLCAAIEAAAETTPGQMSEQRDMAILRSMPGLGRITIATLLAEACEPLRRRDYHVLRALSGQAPVTRRSGKSCIVLRRYACNTRLQNALHHWGRVAIQHDPISKQRYAELRRRGHGHARALRTIGDRLLHVLCTLLERQTLFDPTLKTPQSVAA

SEQ ID NO: 512409 - protein, 339 aa, unidentified
MKLYGSIDLHSNNSVVAVIDETDAVVFEKRLPNELERIVLALGAYKAALVGVVVESTFNWYWLVDGLTAAGFRVHLANPAAIVQYEGLKRTGDEHDARWLAHLLRLGILREGYIYPKAARGVRDLMRRRMQLVQTRSTQLLAMQTQLMRSSARSLSAAQLKRPQAAAQLQGWVDDANVASALQANLAVVQVLNAQIERLECEILSQVRLAAQFAPLLSGPGIGKVLALCIMLETGEIARFAKVGNFASYARCVDSERVSNGKRKGEGNAKCGNRYLAWAFVEAAHFAVRYHPRIQRFYARKAAKTNKMVAIKAVAHKLARAAYQVMRTCQPFEEQRAFA

SEQ ID NO: 512410 - protein, 348 aa, unidentified
MNATPKSVVGVDTAKSVFQLYTVDKETGEVINQQIKRAQFLQWFANRVPCLVGMEACGGSQHWARKLRELGHEVKLMSGKMVKAFVCGNKNDAADARAIYMAAQQPEVKAVAVKSEGQQAVLAMHRIRQQLVRVRTAQINELRGLLGEYGEVFGTGRKAFDTGMKAALERLAERLPVPLIDTLRDQWNELARLDERIARIEASLLAWMRQDRAAKAIFAIPGVGLLTATAAVATMGDAKAFRSGREFAAWIGLIPGQTGSGGKVRMLGMSKRGDTYLRTLLIHGARAVLRHAKEPGPWLKQLSQRRPPNVVIVALANKIARTIWAVLAHERAYHKDHVSVRPLAAAPA

SEQ ID NO: 512411 - protein, 359 aa, unidentified
MRNAGIHANSLLEVRRMYNAVGIDVSKGKSTVAVLQPGGTVIRKPFDVSHTSQNLNELADYLSSLDGTTKIVMECTGRYHEPMVKALSEAGLFVSIVNPHLIKNFGNNSLRKVKSDPADARKIARYTLDNWTELRQYSGMDNTRTQLKTLNSQFSFFMKQKVAAKANLIALLDNTYPGVNKLFDSPTREDGSEKWVDYAYSFWHADCVRKIGLKAFTERYMSFCKKHHYIFQQDRPEKLFNASKELVAVFPKEKTYKLLIQQSIQQLNLASEHVERFRREMNELASTLPEYSTVMGIYGVGKTYGPQLIAEIGDVSRFTHREALTAFAGVGSGVDESGQHKSKSNRASKVGSARHCFRS

SEQ ID NO: 512412 - protein, 364 aa, unidentified
MEITRIGIDLAKSVLALSAADRRGRVVLRKQFRRAQVLGFMRSLGRCVVGLEACGGAHHWARALSALGHEVKLMSAALVASYRKGNKHDRNDADAVLEAVSRPTMRFVAVKTVAQQDLLALHRVRARLLKQRIALSNQLRALLHERGVTAVRGAAGLRTAVRAALAEERNELSAELRQLIAELREEMGQLELRLKTFDQRLERAARQDERCARLREVPGVGPLTASALVATVGDAREFKSGRELSAYLGLVPRQHSSGGKTVLLGISKRGDRYLRMLLIHGARALLHAKRWASVHPRARWAARLRAARGPNVAAVALANHNARLLWALLRRGNRYQARRAVFRPGPPAAGERARNEKPLALKPA

SEQ ID NO: 512413 - protein, 357 aa, unidentified
MPPITPEYAAISDVIGGVDTHQDTHTAAVIDPVGRVLGTQQFPAAAAGYTALLAWMRGFGRLSRIGVEGTGAYGAGLARRLRDEGLEVIEVDRPNRKTRRFQGKSDPIDAIQAAKTALAGERTGTPKQRDGHVEALRNLRVARRSAIDQRADTQRQVKALIVTAPDELRAQLRGLTVKQLIATCANMRPDRADAVTPATATKIALRSLARRHQQLSTEIADLDELLEPLVTAINPDLLAAHGVGTDTAGQLLVTAGENHDRLTSETAFAMLCGVAPIPASSGKTTRHRLNRGGDRQANAALYRVVLCRLRWDPRTHAYAERRTKEGLSKKEIIRCLKRYVARELYQIITSNNLEPAA

SEQ ID NO: 512414 - protein, 355 aa, unidentified
MDRTKYIGMDVHQASISIAVRDASGKLVIESLIETKAATILEFLQGLKGTLWVTFEEGTSAAWLYDLLKPHVVKVIVCDPRKNALLKTGNKNDRVDAQKLSHLLHAGLLTPVYHGESGVRTLRELARSYLTLTKDLTRVMNRLKALYRSWAIPCVGEKVYSPRHRSAWLEQLSEAGVRRRAEQLYQQLDILLQIRRDARQELLRESRKHPAHELLRQIPQLGPVRVALLIALVQTPHRFRTKRQLWAYCGLALQTRSSGEYRFTAGQLQHSNRLPALRGLNTNHNHDLKNVFKSAAMHVSTSPDALGDFYRSLLAKGMKPAMARLTLARKMAAIVLTVWKKGARFDPGELKRQAA

SEQ ID NO: 512415 - protein, 323 aa, unidentified
MTSMTTATVRVIGGVDTHGQSHHAAVIDGVGRQLDDREFPASPAGYGALLEWLRGYGELDRVGVEGTGTYGVALTRHLREAGALVVEVDRPDRRARRAQGKSDPLDAYSAARAALSGAASVVPKLRDGRVEAIRALRVARSSAVKARSQATNQIKALIVTGPAQLREQLRHLRTGMIIAACARLRPGHNLGDAEQATKTALRRLARRHQQLSEEIAEADHELDQLVHQVAPALLALPGVGPEVAGQVLTSAGDNPNRIKSEAAFAHLCGVAPIPASSGRTRRHRLNRGGDRSANNALYVVVLGRMRHERSHPRIRRETNPRRG

SEQ ID NO: 512416 - protein, 373 aa, unidentified
MPRYSTAFGMDVHLRSTTVCALDAETGEAVTRRFRGNPWGEVAEWMSGFPGPSLAAYESGYLGFAPQRELSGLGVDCVVAAVSRVPRSAADLSSKNDRNDAARMAKAILSHDISPVWVPSPEIEGLRDLAAAHDAATARLAAAKQRLLAFLARRGYAYGGTTPAGNPRRYWTYGFLRWLDGIHPADDGGIRALAALRNEVEAAAETRDDLLAEYRAAVAAGPLSAEVEALQSIKGCGFALAAAFASEVGDFSRFRSGRQVTAYFGLAPKQRSSADSVRLGGISGAGNALVRRLAVEGSWSYAQASHQPKLMPKGSGVPLEVRMHGRKGSERLLRRREEMLARGMPQAKANAATAAELVRWLWALGAMCREATE

SEQ ID NO: 512417 - protein, 420 aa, unidentified
MKIFVPVAGVDVSKRFSDLCVLSPDNNVLLRQKIYHDMVSMKLAEKKLHEIELECGARPVVVMESTSHYHLILFQFFTDAGFEVVVVNPIQSGALKNINVRKVKNDRVDAYRIAMLYRLKVLRPSQIPTSSLRGLRLLTRQRSELKGDVARFKNRMTAYLDQIFPGYGEVFSDVGGSASRAVLHMCPTPEELLNADGSLLAKVICEAGNKGPKFGAEKAAKLREAAGSAQVIGVRSASNASLIKNVLDIIEGLLAAIQRIEGEIKELVTQDTRLDEDVKLLCSIPGIGFSSAVVIVAEMGDISLFRKPKQLAAYFGLDPCERQSGTFKGRKNKLSKRGSPQVRAALHMAAVSSVSRNRDGTYRNPVLAEYYERKCAEKPCKVARVAVMRKLSNIIYAVLRDRRPFELRTPQEHMALLAAA

SEQ ID NO: 512418 - protein, 368 aa, unidentified
MPSTARSPKGDGITTIAQRQRPRVTVGVDTHLDVHVAHAKDALGRRLATVSIPTTPAGYRDLLAWARGLGEVDAWGVEGTGCYGAALARFLVVHGQVVLEVNRPDRQARRRRGKSDPVDAEAAARAVQTGEVTAVPKASSGYVEMLRSLRVARATAVKARTQAINALKALVVTAPADLREQLRGRSATMLVREAAALRPGPLDDPTAAAKLALRTLARRHQALRAEITTLDTELDRLTAKAAPRLVALFGIGSDSAGALLVAAGDNPDRLRSDAAFSMLCGSSPIQASSGKTIRHRLNRGGDRQANAALHRIVVVRLRWHQPTKDYMARRLTEGKSKNEIIRCLKRYVAREVFAVLNQMDQDTLTPAA

SEQ ID NO: 512419 - protein, 343 aa, unidentified
MDVSTIGLDVAKSVFQVHGIGAEGQVVVRRQLRRRQVLKFFQKLGPCLVGIEACATAHYWGREIAALGHEVRLMPAHYVKAYVKRGKNDAADAEAICEAVQRPTMRFVSLKSPEQQSMLMLHRTRELLVRQRTMLVNAIRGHMAEFGIVTRVGLPQIKELLAVIADRDDHRLPPGARACLEGLGRQFLSLNEEICAADKRLHAWHRSNPVSQRLATIPGVGPVTASALAASITDPLVFRSGREMAAWIGLVPRQNSTGGKQRLGKISKQGDQYLRWLLVAGAMAVIRHARRRGATRQPWLDDLIARRPTKVAAVALANKMARMAWALLSHGGAYRQPVITASL

SEQ ID NO: 512420 - protein, 328 aa, unidentified
MPMYQLGIDVSKNTLDLCLLREGIKGRIKTRKLKNTADAAKVVTEWLKKQSCELGEVHIIMEATGVYHEPLAYGLHFAGARISLANPHRTREFARGMNILTKNDKVDAWMLACYGSLKEPEAWTPPPESVRYLRALLRRRDALVADSTREKNRLEKSVFTDSPDAVRASIEHMLQELNNEIEHLDVLIQEHIETHPELNQDFRLLTSIKSVGYLLGLNMLAILKSHSFESAEQAAAFLGVVPVERRSGTSVKGKPKLSKIGPPEIRTKLYLAALCGLRFNPVMKQMYTKLCQRGKSKMCAIGALMRKLVHWCYGVLKTQLPFDAEYNQ

SEQ ID NO: 512421 - protein, 378 aa, unidentified
MHSMKHQNTLVIGGVDSHADTHHAAALDQRGALLATKGFPTTTPGYRELLDWLRAFGEVDVVAVESTGSYAAALVRYLREHGVRVLEVNQPHAHTRRRRGKSDPIDAEMAARLALSGKATTVPKQTDGIVESIRLLRAARHSAVKSRTAALVQLGGLIITAPQELRDQLADRKTIRGKASLCRRLRPSTDELWRPAHAAKFALRSIAQRINVLDDEIAVLDRQLEQLVRVAAPRTIQLLGISTGHAGRLLVTAGENIDRLRGEGAFAALCGASPVPASSGKTTRHRLNHGGDRQANRTLHLIVVCRLRYCERTRAYAKRRTAEGKTKPEIMRCLKRYIARETYHTLLADLTMPQPPTPPATTTITCGAGPIGITQRRT

SEQ ID NO: 512422 - protein, 342 aa, unidentified
MNEYDGKQFVGIDLHRQRSVIVRQSESGEQLSAVRIVNDPVALGLQLEDAGAAPEVVLEATYGWYWAVDALRAHGARVHLAHPLGVKGFRYRRVKNDVRDAGDLADLLRMGRLPEAWIAPPATRELRELVRYRAKLVATRSGLKAQVHAVLAKAGVLIAVSDLFGVTGRQRLAKVPLAAAYAERVRSLLELIDILDGHQARFAALIAQQLDADRGYQAIQQIPGIGPVLAAVFVAEIGDVGRFTGPAQLCSWAGLTPRHRESDTIVHRGHITKQGSKLVRWAAIEAVQRHQTTAKIAADKDRIEARRGKNIAKVAAARKLLTLVYYGLRDGHIRALDPDRAA

SEQ ID NO: 512423 - protein, 359 aa, unidentified
MAHGIRWVGLDVHAHESTIAVFDQDTGELVTRRVIGRPHELLPWLGRIPRPARIVYEAGPTGYGLVRRARAAGHEIAVCAPTRSDRRPGDRIKTDKRDAIRLARLLAAGELTLVTIPTVQHEQLRDLVRCREDIRADLMRARHRLGKFLLRREIYYEGPNVPWSRRHRDWLASLTFADRASQLTIADYLHAHDLLIARRDRIETELEQVAADSPWTGAIARLRCLRGIDTLSALGLCAEIGEFDRFEHPDQLSAYLGIVPSENTTGERRRQGAITKAGSTHARRLLIEAAYHYQRRPGITAALERRQRGQDAAVINIAWRAQRRLNARCISSSTCARSQTGLSPSRSHENSPASAGRSP

SEQ ID NO: 512424 - protein, 387 aa, unidentified
MIEGKHRDEHQMGWTAPGFLSHYPGRRNQRIGTARMNISMIGLDTAKSVFQVHGVDESGKAVLKRKLQRSEMVPFFEKLPPCTVVLEACGAAHFWARTLIGLGHDAKLIAPEAVRPFVKKRKKNDAADAEGLVTAGRQPGTRFVPVKDTEQQGILAIHTSRAILVKQQTMLSNSVRGQAAEFGHTAAKGNEKLAELVTEVEADELVPARARQAIVVLYDQHRALDEQIETLEAEIVAHAKNDEKARILDAIPGVGPITASLVVATVSDWSVFKTGRDFAAWAGLVPRQNGTGGKVRLGKITKAGNKQIRKLLVIGATSMVHRAEHWDSALGRWTASLLKQGRPVRLVTVALANKVARVMWALMAHNDVYRPQGAVKPSAAASAAVVA

SEQ ID NO: 512425 - protein, 345 aa, unidentified
MLIIGCDYHPSMQQIAWVDTETGECGERQLRHSDGEAERFYRELRQREVQVRVGIEATGHTRWFERLLAELQIELWMGDPARIAAQRVRKQKTDRQDAQHLLQLLVEDRFPKLWVPSAENRDVRQLLWHRHRLVQMRTRVKNQLQAIALNEGVRRQHRLWSRQGRAQLESFALAPWTARRRQDLLQLLDQLTPPIAELSQAIEQEAQRRPEVQRLMTHPGVGPITALAFVLVLGTPQRFRCGKQVGSYLGLIPCEDSSAGKQRLGHLSKQGNTLLRYLLVEAAQVAVRCDAEWRRRFVHLAMRRQRNIAIAAMARKLAVSLYWLWRKAEDPPPAPQSGSHVGSLD

SEQ ID NO: 512426 - protein, 407 aa, unidentified
MEVLYPRCAGLDVHAGSVTACARIATGATVTYEHRTVSTTTRGLLELVEWLTAHGCTHVAMEATGVYWKPVWHVLEEHVTLVLANAMHIRNVPGRKSDMNDATWIAALLAHGLIRSSFVPPAPIQELRDLTRTRRQLVHEVARHVLRIQKTLEDANLKLTQVMSDIVGVSGRAILTALIAGETDPDRLADLTRGRLKATRADLLDALHGRVTDHHRFMIKLHLTQIDALETAVATIEARIGDALGPFRAAVSLLTTMPGLSETTARVLIAEIGTDMTRFPSVGHLISWAGFCPRLDQSAGKRRSTRTRQTSPWLKPTLINAAWAATRKKDCYLRAQFLRIKSRRGAKKAILAVASSMLTAAYFMLRDGVEYHDLGPHHFEQRDKEQLAKRLIQRLRDLGVAVEVKAA

SEQ ID NO: 512427 - protein, 345 aa, unidentified
MNLTPVGIDIAKTVFQVHYVDHDTGEVVNKPIRRAVLLEHFANWPPCLIGMEACGGAHHWARKLVQMGHQVKLMPGEFVKAFNIRNKNDAADARAIWLAVQQPGKAVAVKTEMQQAMLALHRAREQLVKFRTMQINGLRGLLAEYGEVSAKGRASLDKAIPEILARVAERLPAVLIDTLREQWAGLTKLDEQIAAIERRMREWKKDDHAVKAISEIPGVGLLSATAAVAMIGDAKVFRSGREFAAWAGLVPRQTGSGGKVNLHGISKRGDTYLRTLLIHGARSVLIHANDPGPWVEQLQKRRHPNVVIVALANKIARTIWAVLAHDRPYQKGYVSVNPAGMANIS

SEQ ID NO: 512428 - protein, 411 aa, unidentified
MDVLIERCAGLDVHRDTVVATVRRPGPGGTRRSETRTFTTMTGQLDMLADWLTEQKVTLVGMESTGIYWKPVYYVLEDRFPVWVINAEHLRNVPGRKTDVADSVWIAQLIEHGLVSPSFVPPRNVRLLRDVTRHGRRLTEERTRAIQRLEKVLQDAGIKLTSVASTILGKTGRAILAALLAGEEDPAVLAELAKGRLRPKIPVLREALTHRFRLEHHGALIAQMLAHIDFLESSILETHQRIEVLLRPVAATVELVMTIPGVGRRVAEVLIAEVGLDMTVFPTAGHLASWAGICPGNNSSGGKHRPGRTRHGSVWLRIALTEAAHVAARGKGTYLAAHHAQIRGRRGTQKAIGATRHDILIAYYHIVRDNVPYQDLGPDWNNRRRSTEQQTRRLVRQLERLGVNVTIESMS

SEQ ID NO: 512429 - protein, 381 aa, unidentified
MTTPATCHVPESTTAGTLFVAFELSEKTWKLGFTTGHGQKPRERTVTARHQERVLEEIAHAKRRLGLPDTAPVVSCYEAGREGFWLHRFLQGHGITNHVVDSSSIEVNRRRRRAKSDGLDVRKLLSMLLRYAQGERQVWQVVKVPSVEAEDQRHLHRDLETLKQERASTATRIQGLLSSQGLRVTSLTKLPEQLDALRLWDGSPIPPGLRRRVLRVYAQYTFLSEQIAAVEAERRAQLQTATDARIEKVRQLMQLKGIGINGAWLLVMEFFGWRAFKNRREVGGLAGFTPTPYQSGESAREQGITKSGNRHVRWMTTELAWSWLRFQPDSALSVWFRERFGSGGKRLRRIGIVAVARKLLIALWRFLETGVLPAGAVLKEV

SEQ ID NO: 512430 - protein, 404 aa, unidentified
MNDSMIGYAGVDWATDGHAVCVVNQHGAALVEFDVEHSACGLSEMCRRIKGSGAGRVAIERPDGPVVDALLENGLEVVVVSSRSVKALRERYGTSGNKSDRSDAFVLADCLRTDGHRWRSLEPDSPATVTLRGHVRARKDLVEHRVAVANQLRAHLRIVFPGAVGLFSHIDSPISLRFLERFPSATRAVWLSEKRLSAWLRATSYPGCKSAAELHARLIAAPAGITGTDGDARAAITLAYVKVLQTLRAQIDELDRHLDRLLDAHPDAPIFRSLPRCGTVRAATLLAEIGDCRARFPDPESLCCLAGVAPSTRASGRHRVVTFRWSSDTKLRDAICDFAGDSWRANQWAAHRYRELRAAGKTHPHAERILARSWTHIIWRCWQDHTPYDPTRHGAHQRLIQQAA

SEQ ID NO: 512431 - protein, 317 aa, unidentified
MPQKTGVVGLDVAKNKADGCIRSAGRRLSAPSTPEGEAELVAWVRANRVGRAVMEASGGYERSWAEALRAAGVEVVIVDPKRIRHFAKAAGRLAKNDPIDAETIAWFAETFPDREVQTHDPAREEVDRLVQARTALKELEGRIAQQGEHGPPALVAKALGAIAKAMRAELRKLEAAIAAKIKANPAFARRAEIIGSVPGLGDQAVAGLIVWAPEFGRIRNEAAAVLIGAARLRRRQRRAQRPAIKGGRRKLRNLLYMPVMGAATQHNPVLKAYYQRLIAKGKEPKVAIIACMRKLIVILNTMLARDETWNPPPRAAA

SEQ ID NO: 512432 - protein, 449 aa, unidentified
MPRLHSKLTGLPVVNDRAAAIDIGSRFHVVAVPPDLCEQPVQTFQAFTSDLQRMADWLVSLGIRTVAMESTGVYWIPAYEILEGRGLEVIVANARESRAVPGRKSDVNDAQWLQRLHACGLLRPSFRPSGDIAALRAYLRLRERHLDYAAAHIQHMQKALTFMNLQLHHVVTDVTGATGMRIIRAIVAGERDPGVLAAMRDRNCRSSVETIRAALVGNYLPEHVFALQQALALYDFYQTRVDECDAQIQRTLALLAADKPIPQEPLTKARNRAQQPNALSFDVRGLMYQLAGVDLTQIHGIGSYLAVRLVAECGTDLSRWPTAKHFTSWLTLSPGCKVSGGKVLSSHTRKTTNRVAALLRLAAVTVGKTSTALGAFYRRLAARIGKAKAVTATARKIAVLFYNAMRFGMQYADPGADHYEQRYKERVIKQLHRRAAEFGFCLQPAEGVS

SEQ ID NO: 512433 - protein, 341 aa, unidentified
MQVSTIGIDLAKNVFQVHGVDAIGKVTITKKLRRSQVLPLFERLPPCLIGMEACATSHHWARELRALGHDVRLMPASYVKAYVKRNKNDAADAAAICEAVTRPSMRFVAIKTDEQQAVLMLHRTRDLLVRQRTQLINAMRAHLAELGLVAAQGREGLQALITIVRDRTRSLPDLARTALEIILDQLAALRQQLGEIERHIQAQHRSSDASRRLETIPGIGMIAATAIAASVPDAGVFKSGREFAAWIGLVPRQNSTGGKERLGSISKQGDRYLRRLLVVGATAVIRHARAHPEKHPWLIQLLARRPAKVVAVALANKTARIAWAVLAKGGTYRAPALAASV

SEQ ID NO: 512434 - protein, 389 aa, unidentified
MIYVGIDVAKDKHDCCILGSEADKLYPVFTIPNNKTGFDELYEKIFSVTDDKTEIKVGLEATGHYSLNLLGSLIDKGLPTCVINPLHTNLYRKGLSLRKTKTDKVDARSIAMMLMTNKTLKPYSDTSYHSEELKSLTRYRFDKVQERAKLKSSVARLVNILFPELEKLVPSLHMASVYSLLSKLPGASYITECHLTHLKNLLETASKGHYGRDMAITLRNTARDSIGSVIPAKSMELKHTIHLIKVMTEEIDEIEDSIKSIMDTCNSPIMTIPGISYRMGAMILAEIGDFTRFNYADQILAFAGLSPSTYQSGQLDSSYSHMEKRGSRYLRYALFNAAKFVCKWDENFGAYLSKKIGEGKHYNVAIGHATKKLVRTIYQMELTGEAYRR

SEQ ID NO: 512435 - protein, 410 aa, unidentified
MKLFCGIDWAEAHHDVAIIDGDGHLVAKKRITDDPAGFAELIEILTAAGDESEDPIPVAIETPRGLLVSALRATGRAVYAINPLAVARYRERHSVARTKSDHADAMTLAHILRVDAHLHRQLPKDSELCQAIAVLARAHQDAIWARTKAHNQLRSVLREFYPTFLAVFTGRFALGISSPEARAVLGIAPTPAAAAKLSVSRIAAALRRAGRSRNIDPTAVELKAALRESQLRQPVLVETAMGRQTLALLAALDTACASVVDLGQAAAEAFQQHPDYAVITSFPGLADSTGARVLAEIGDDRSRFSDARALKAYAGSAPVTRASGRSISISHRRIKNDRLANTGWVWAFAAATHCEPARLHYRRRREHGDRHAAANRHLFNKLLGQLYHCLQQGSAFDEAKAFAQTVDAAA

SEQ ID NO: 512436 - protein, 312 aa, unidentified
MTASQDVFVGIDISKDRLDVHVRPLGVGFSVSNEAAGHAALIARLRPLRSKRIVLEATGGYERALWLALSEAGLVAAVVNPRQVREFARAAGRLAKSDRLDAAVIAHFAETFAPRPGKPDPVADRLGEHVLYRRSLQEEIVALEHQRRRLETPALRERAGRRHAALRAEVKEIEREMRAIVDGDPGKKALFACLTALKGVGLVLACTLIANMRELGSLTRHQAAALIGVAPLNHDSGVRRGYRAIAGGRRRVRNVLYVATLSAVRSNPVIREFYRRLSAGGKPAKVALVACMRKMLVMLNGRVRDHLATATA

SEQ ID NO: 512437 - protein, 350 aa, unidentified
MIIIGVDFHPGLQQIASVDTVTGEFEEKRLAHREEAEKFYRDLASRGAQIRVGMEASGYARWFERLLAELQIELWVGDASEIERKRARKQKTDRQDAQHILQLMLKDDFPKIWVASWENRDLRQLLWHRHRLVQARTRIMNQLQAVALNEGLQCKKRLWRGSGRQQLESFRLGPWASRRRRDLLELLDRLSPTIEELSQAIEQEAERCPEAQRLMTHPGVGPLTALAFVLIIGQAERFQCGKQVASYLGLVPLEKSSGKRRRLGHITKQGSSIVRFLLVEAAQAAVRGNPQWRSQYLRLLMRRGRKTAKVAMARRLAIRLYWMWREKQDYRQSRSFGSHAGQPGNRDGVH

SEQ ID NO: 512438 - protein, 320 aa, unidentified
MSEASVVVGIDVAKDQVDVSVLGAELGTEQFDNSSEGHTALAAALEPLKASLVVLEATGGYEAALVCALQAAGLAVVVINPKQARDFAKSMGRLAKTDRVDARMLAELASVLLRRQDLARFIRPLSDTHQKDLAALVTRRRQLLSMLTFERQRLQLAPQLIRPGIEAMIKTIRAQIDDLEAQMERHLREHFAELDQLLQSTRGIGPVASATLIAQLPELGKLDRGAICALVGVAPMANDSGTTRGRRRVKGGRFEVRRVLYMAVVAAIRFNPLIKAFYRRLRAAGKPPKVAIVACMRKLLVTLNAMVRDSSRWDPNHSRA

SEQ ID NO: 512439 - protein, 408 aa, unidentified
MLFVGDDWAEDHHDVELQDETGRVLGRAKLPEGVAGIARLHAMIGEHLGEDVDEATVVVGIETDRGPWVQALITAGYQIYAINPLQVARYRERHGVSGAKSDTGDAHALADMVRTDRHQLRPIAGDSAESEAVKVLTRAHKTLIWERTRHMLRLRHALREFFPAALVAFDDLTATDALELLAAAPDPISAAVLSVETITAALKKARRHNRAAKAEAIATALRTEHLGQPPVVAAAYAVTVRAQAAILAVLNTQIAELEEQVDANFSKHPDADIYLSQPGLGVVLGARVLAEFGDDKKRYADARARKNYAGTSPITRQSGKKKVVLARYVHNDRLVDALGQQAFTALRTSPGARAYYDQLRARGVGHRAALRQLGNRLVGILHGCLKTGKVYSEDIAWAHHRKDLEAAA

SEQ ID NO: 512440 - protein, 350 aa, unidentified
MKKFIIGIDFSKETVDASIVQKEQPETLIAYKKFRNNLKGVDGLIAWAKSKVAQDGEIIFCGENTGTYSTLFSDELTDRGFIIWIEHGMNIVRGMGDVRGKDDKTDSLRIASYAARFYDKMKPYVRPKDETRVLKTLLAKRDRLKSFLKAEITNTKENPLMLQDSNIASSINEFFKRLEESLRKELKELERMILDVVMSSSEYAKNFNILTSMKGIGLINAVALIVYTDNFTKFNFNHRKIATYWGVVPFKNESGTSVRRGTHVSPKCNSWLKALLTEATLCAIRYNSRIKAYHDRLMARGKAIGIVFNNCKKKMLKILVAMVRDSKIYSDMDVSKDPHTTTTTSSIVVC

SEQ ID NO: 512441 - protein, 343 aa, unidentified
MQAITTIGLDIAKSIFQVHGVDAQGNVVFRRQLKRRYVLPFFQKLPPCLVGIEACATSHYWSRELQALGHRVRLMPPAYVKPYVKRQKNDATDAEAICEAVGRPNMRFVETKTPEQQGCLTLHRTRHLFIRQQTSVINAIRAHLAEFGIVAPVGRRGVDQLLAVVSDTNDKRLPEVARACVAALGAHLQMLKAQILEFDRMIRAWHRSNEASRRLDAIPGVGPALATALVASVADPQAFRSGRDFSAWIGLVPKQNSSGGKERLGHISKRGDRYLRSLFTAGALAVIRYAKIHGTKHRPWLTALLARRPTKVAAIALANKLARTAWAMMARGERYREPVALAA

SEQ ID NO: 512442 - protein, 407 aa, unidentified
MDLLKTVFGIDVSSRKSNVCIMVNGQKVNDYAISNDMVGFNQLLDDLKQVTNPQIIFEATGVYSRRLQAFLNMHELRYVMMNPLEAKRKTKDDLHQNKTDKLDAMYLAKLQSEHPQRLAYVQSEEYQELMANNRIYEQVSHDLITNKNRLHKAIQLTFPEIEHVMATPRGKNYWSIVLRFPHPDIVLETKEADIIDFLKSLSGIGKKRANDIMQKLIRLAKVACPAVKKDSAYVHGLKIAINNILSAEEECKTALQEMAKLAPKRDLEILTSIPGIGENTALRIISELGDIRRFKNPNQLNAFIGVDPQVYESGNLTAHLSISKRGTAIGRKVLYLAINQIQSAKKAGNPCHIADYYEKRKRSSETASHKKAAIASIHKLLRTIFALIKNDQLYSYDVAKHNQRLLS

SEQ ID NO: 512443 - protein, 326 aa, unidentified
MDVLGIDLAKLTFDATLLTDGDQQHYQSFPNTPDGFSQLQTWLADHDVTQVHACMEATNIYYEALATFLDALGHIVSVVNPARIKGYAQATMQRNKTDKLDSAVIAFFCRTHRPKVWQPLSDEHHHLRALVRHREDLLQTQLQQQNRLRDTTDAVVRASLQAVLDIVRSQLEAVGQELKKHLAAHAELRANVELLTSIVGIGMLTAAKLLAEFGDIEQYESAKAAAADAGVTPSHFESGTSVRRRPRLSKMGKAELRKALYWPAITAMRYCPACKAYGERLAARGKAKKVVIGAMMRKLVHIVYGVLKHRTPYDPAKVFGETATST

SEQ ID NO: 512444 - protein, 366 aa, unidentified
MKKNSTVAVGRKQILKQARLTIGLDLGDRTSYYCILDAAGNVIWERSVPTTLNGIRQAFGRMPRCRIALETGTHSPWVSRQLSEMGHEVIVAHARKVQLIGQSSRKDDQLDARTLARLARIDPGLLSPVKHRSAQAQIQLTVIRARAALVSTRTALVNAARGLTKSYGQRLKKCGTEQMNRDSSEGLSQELREALDPLLREIESLNERIAEYNRRIEKIAKEVHPEVARLKQVKGVGTLIALTYVLTLDDPHRFRRSRDVGCFLGLRPGRRNSGQSEPQLHISKEGDRYLRTLMVQGAHYILGPFGQDSDLRRWGLKLAERGGKNAKKRAVVAVARKLAVLLHKLWVSGEAYEPLRNNHKGARAVA

SEQ ID NO: 512445 - protein, 337 aa, unidentified
MKYSGIDLHSNNSVVTVMDEEDRVVAEKRLPNDLTKIVGLLMPWREEMAGVVVESTFNWYWLVDGLQAAGFKVHLANTTAIKKYEGLKHSGDETDARYLVHLLRLGILPTGTILPPAQRAVRDLARKRMQLVRSRTGHILAVENITARQHGARISSNQVKHLTAETIDQMRLPEDVALAIKTNVAVIATLSAQIDLLEKRLQEKVGARAEYGLLTSVPGIGQVLATTILLETGPIDRFAAAGNFASYARCVDSARTSNGKKKGEGNTKNGNKYLAWAFVEAANFALRYCAEAKRFYERKKAKTNNVVAIKALAHKLARACFHILKERKPFDVTRCFA

SEQ ID NO: 512446 - protein, 345 aa, unidentified
MPIVGGLDIHRKQITFDYLDTVTGQVCRGQISPADRVHLRAWLARFAGRGDVAFALEGCAGWRYVAEELAAAGVTAHLAEPADTAFARGRKRHAKTDKTDARHLRMLLAEGRLPECWIPPGHILECRALLELYNDLRRERTAWAQRIHAVLFHQGAPVLGEGALRTDKGVAELRAAAAAHLSAAGQLQVATALEVIDGLEDRLHLVRHQLLDAARHLAGAKALAARLYGVGPVTALAITCWLAGAGRFSSSRQAVRFAGLDITVSSSDRKGPPGKLSRQGPPVLRWAVYEAGKTHARTSAPDHRYYAAVKDRKNSKRACLSEARKILRQAHHILAELGDDALAAA

SEQ ID NO: 512447 - protein, 339 aa, unidentified
MKYTPVGVDIAKHLIQVHFINEHTGEVVDKQLRSRDFLTFFSNREPCLIGMEACVGSQHWARELTKLGHKVRLLQARFVKAFVMGNKNDVMDARAIWMAVQQPGKEIAVKTEEQQSVLVLHRTRRQLVKFRTAQINSLHGTLLEFGESIHKGRAAMGREFPEALERMKERLPPYLITVLEDQYNRLSELDSLIDDIEKQLTSVARQNETCKRLLGIPGIGPLIATAAVATMGEASAFKSGREFAAYVGLVPKQTGSGGKIRLLGISKRGDTYLRTLFIHGARAAALLTREPSPWITELKKRRPASVAIVAMANKLARTVWAIAAYGRKYDKNHVSIRPY

SEQ ID NO: 512448 - protein, 345 aa, unidentified
MRDVSITRYNVGVDFGSEQMDAKLAAQYEDGVRKILFSRRFENKETGFKDLDGWLKEKCRRKDIEIRVSCEATGVYHERCCYFLNGLAYYVTVEVPSRVKSYKKSLGFHSKNDKIDASALAYMGLERNLHKWEPINSFYYELRTLTRYHQSVQEMQTLACNQLHAMQAGMRISKLVVKQLKANIKLYEKQLAELEKAIEEKIVSEQEVKRKIDNIIEDMKGVGVMTVAVALAETNGFSWFTNRRQVVKYAGYDVVEDQSGKRKGKTKISKKGNAHIRRALYFPAINLATYNVKPFVNKYERIFERSRIKMKGYTALQKDLLLMLFTLWKKDQKFDPGYQNQQREK

SEQ ID NO: 512449 - protein, 370 aa, unidentified
MLNTTTFVGLDVHARSIKAVALDAMTGEVRSATFAYDAAAVAEWAGSLDPAAKCVYESGVTGFDLQKKLTALGVNCVVGAVSKMIKPSADRKRKNDRNDAEFLARMLSVGNVVEVCVPDDECEAARDLVRALDDAREDLKRCKQRLSKFLMRHGYVFNEATPTGRRKGNWTAAHWAWIRSIEFPERADNDVLAYYVDAVRQAMEDKKRLERLVEAEASKPRWKKRVDSLRCLKGVDAMTAADIVFEAGEFSRFKNARSFAAWLGLTPSEHSSGESARQGGITKAGNKHLRRVLVEAAWHYISASPHPKDLAKGQVPDPAARRHAAKGIRRLVKRREEMLGRGVHKNKANVATARELACWCWAVGRMIENG

SEQ ID NO: 512450 - protein, 309 aa, unidentified
MNTTTIKYIGVDVAKSRLDVDLPAPAHQLPNTAEAIAQALRGLPSGAHLVCESTGGYESTLVAAAQAAGMPISVVPPQRVRNHARCTGRLAKTDRIDAQLLSDYGRMHAPAALRAPEPDRQQLRELVRARAQLLELKKIEASWREHPPSLAVLRAQAEKREAWLDAQLAEVEREIRALVKAVSGRAEIERMQQVQGVGEVTAWTVWAEVPELGQMEPGQPGAIVGLAPYARDSSQHHGKRYIQQGRPQVRRVLYMAAITACHHNPVLKAFYQRLRARGKPAKVAIIAVARRLIELLNLMLKNPNFVLAG

SEQ ID NO: 512451 - protein, 366 aa, unidentified
MKKISTVQTFKSEIFKDQKLTIGVDLGDRLSFYCVLDEAGKILLEQKVATTPEAMKQTFGKIPRSLIAMETGTHSPWVSRLLTELGHELIVAHAQKVELITKSNRKDDRHDARTLARLARIDPELLGPVRHRSAKAQIHLTVIRARAELVSARTALVNAARGLVKSYGQRLPKRGTYQVSRELAEGLSVELRDVLQPLLKEIESLNERIQEYDERMEKIAKEVYPEVSLLQQVKGVGTQISLTYVLTIEDPYRFPKSRQVGCFLGLRPGRRNSGESEPQKGISKEGDRYLRTMMVQGAHYILGPFGEDSDLRRWGLKLAERGGKNAKKRAVVAVARKLAVLLHRLWVSGEVYEPLRNSQKAMRAVA

SEQ ID NO: 512452 - protein, 453 aa, unidentified
MARKRKKGTKCSPQPLMIHPAAAGIDIGATEIYVAVPADRDETPIRCFQTFTQDLNALAEWLQRCGIDTVAMESTGVYWIPLFQILEARGVQVCLVNAHHAKNVPGRKTDVSDCQWLQYLHSVGLLRASFRPAQAICAVRTLLRHREGLVQMASGHVQHMQKALDQMNLQIHHVLSDITGVTGLAIIEAILAGERDPHVLAKLRDWRVRASEETVAKSLVGDYRREHLFTLRQSVVAYRQCQQLIAECDQEIHRGLETLPSRVDVLEAPLPPAKSTAGKRKGGEPDYDLRTQHYRILGVDLTRVPGISSLIIHTVLAEVGPDFTKFRSASAFASWLGLCPDNDISGGKVLWAGTRKVNNRAAKAFRLAAYTLHHSHSVLGDYYRRMRAKLGAPQAITATAHKLARIAYHLITTGQAFDESVFARDEERYKKRTEVRLKAQARVLGFQLVPAEN

SEQ ID NO: 512453 - protein, 400 aa, unidentified
MKQSNATQQVVVVRTAAERLNAASYVHAAYIGLDVHKATIAVSIAEAGRQDPEFRGEIPNEPKAVDKLIRQLSERFGGQPLLFSYEAGPCGYGLYHQVQASGQDCEVVAPSLIPRKAGDRVKTDRRDAQMLARLSRSGELTPVWVPTPEQEAIRDLTRAREDMKAIELKARQRLSAFLLRHGKVYAGKSKWTQAHFRWLETVRFDTPVQQIVLEEYVDAVKEAQRRVAGLEKQMEAALPSWSLAPVVEALMAMRGIGLITAMTVLAELGDLSRFDSPRQLMAYLGLVPSEHSSGCSRRQGGITNTGNGHVRRVLVEASWSYRFPARKTRVIQRRAERTSSTVQAMAWEAQKRLCGRYRRLAATGKATQLVITAVARELAGFLWAIACEAMGKPHGSRATA

SEQ ID NO: 512454 - protein, 456 aa, unidentified
MTKGKKKQKWIQVREDMPPINRNAGGIDVGATEMWVSVPPDRDAEPVQQYGAFTRDLYAMADWLKRCGIETVAMESTGVYWIPVFQVLEERGIDVLLVNARYAKNVSGRKTDMLDCQWLRTLHTYGLLAGSFQPSAEIGVLRSYLRQRQMLIDSAATHIQHMQKALTQMNLQLAHVLSDVTGTTGMRIIRDILKGERDPKRLAGLRDVRTKSDEETIAKALEGNYRPEHVFALKQAVELFDVYQQKISDCDQQIAGYLRTLESKINIQAQPLKPAREKKKKRRNAPGFDCRHEAYRISGVDLTQIDSISESAALTILSEIGADMSPWKTEKHFASWLTVCPNNKITGGKIFQRQTRKSANRVRELLCICAQSLINSKSALGAFCRRMCSRLGPQKGIVATAHKLALLIYRLLKFGKDYVDIGEEAYERQYKERVVKNLARKAKQFGFQLVLSPATP

SEQ ID NO: 512455 - protein, 355 aa, unidentified
MESVKYLGFDVHQSTISVAVVNADGKLVMQSVIATHAATILDFIHGLRGTLHLTFEEGTHSAWLYDLLARRVARVVVCNPRQNALLKAGNKSDTGDARKLAELLRAGLLAPVYHGEGSTRTLQELVRSYAALTEDTTRVMGRVKALYRSQAIACAGKKPYGRRHRREWLSKLSEAGLHRRAERLYEELDALQGLRRAAKRELVLESRKHAAAKLLRTVPLLGAIRAALLIGRVQTPHRFRSKRQFWAYCGLALETRSSADYRFEDGQLVRAKKPVFIRGLNRNHNHDLKNLFKSAATTASVIHGPFREFYEGLLAKGMQPAMARLTLARKIAAITLSVWKKGESFDAEQLKPQAA

SEQ ID NO: 512456 - protein, 349 aa, unidentified
MNDVTTYGLDLAKRVFQVHWVDVQSGEVHRKTLPRTQVSVFFARAPRGVVAMEACGSAHHWGRLLQTMGHAVKLIAAQFVRPFVKTNKTDAADAQAIWEAAQRPEMRFVALKSEQQQAVLSLHRLRAQWVKVRTLQANQIRGLLYEFGVVVPLGWRALLNVATEQLTDPTKGSVPVLLRDELLKQLQALRDATARIVALEKQLASWQRTAAECQRIMAIPGVGLLTATAVVASVADAQQFRSARQFAAYLGLVPRQSGTGGRIKLLGISKRGDTYLRTLLIHGARSVLLSQSRHGRSVDPWLGALLQRRPSNVVVVALANKMARTIWALLAQRRTFDANWHRGAIHGVA

SEQ ID NO: 512457 - protein, 352 aa, unidentified
MALPTLPHPQVLVTLGVDTHADSHVTAALDQAGRPLGTRTISTTPGGYAALLGWARRFGTVDRIGVEGTGSYGAGLARWLRAHGQLVIEVDRPDRAARRRHGKADDLDAHAAARAVQAGTATGQPKAGDGTVEMIRSLRLARRSAVKARTQAANQLKALLVTAPDVLRAQLRCLPPAELVTTAARLRAATKPATPTDAAKLALRSIARRWLLLTQEITALDTQLERLVAMAAPALVAVKGVGTETAAVLLVAAGDNPERLRSEAAFAHLCGVAPIPASSGKITRHRLNRGGNQEANWALYLIAVGRMAWHGPTHTYVERRTKEGKSKAEIIRCLKRHIARELYGILASRPAT

SEQ ID NO: 512458 - protein, 287 aa, unidentified
MFANTAEGSLDLAAFCRQHDVELVAMEATGGYEKQAFAVLCAQGLPVALLNPRAVRRFAEGMGLLEKTDRIDAGVIARFADAKRSVPTTPASAAQQRLRALVTRLGQLTELQTAQRNQRLLVSEVTVLASFREVLALLTAQIRTLEAAIIEVITADPLWQKLDQAFRSIKGVADRTVARLMAEMPEIGLLSNKAVSKLAGLAPLARDSGKHQGKRPIRGGRSNVRAILFVVAGVVRRYDADFAAFHQRLAAAGKPKKVIRIALAHKLLVRLNAKARQTRQEFSAVTH

SEQ ID NO: 512459 - protein, 346 aa, unidentified
MEHYAGIDVSLEWSSICVVDALGKIVKEAKISSEPAILVTFFEALGFAVKRIGLEAGPLSQWLHAGLKRAGFEAVLLETRHVQVALSAMTVKTDRKDARGLAQLIRMGWFRPVHAKSIRSQEVRALLVARKQLLGRLIDVELSIRGILRGFGLKVGPVTRKGFEARIRELVTGQATLERIAGAMLSARVALKAEYEKLHKTVLAIVRDDAVCRRLMTVPSVGPLVAITYKSAMDDPNRITKSKAAGALFGLTPRKYQSGEKDVTSGITRAGDEMVRTALYEAANVLLSRITRFSKLKRWGIDVAKRRGSKRAKVALARKIAVILHRMWVDGSTYRWTETQPIAAQA

SEQ ID NO: 512460 - protein, 309 aa, unidentified
MTYWVGIDVAKDSLAVWLRPQGQSFSVSNDEAGHQQLLALFAEDKPGRIVLEATGGYERGVMFALSRANHVVSRLNPKRARAFATAMGKLAKTDPIDAAVLAHLAQTLEEAPSTVPSPERERLRELVQRREQLVSQRDDERRRLPQAKDVFVRECLKSAIKALQDTIRSYDREIAQAMAAVDAEQVQQLSQVKGVGTVTVAGLLAYLPELGQLSRRQIAALVGLAPYNCDSGQKSGQRRIRGGRGMIRRILYMTTWSVIRHQKDFALRYQSLRENGRCAKVALVACMRVLIVRLNAMVRDGTCWREGAV

SEQ ID NO: 512461 - protein, 306 aa, unidentified
MELYGAIDLHSTNCHLAMVDGQRNRVFYRKFPNRKETVLKALSPFGTQIRGIAVESTYNWYWLVDALMERGYRVHLVNTTQVIQYSGMKYGDDRHDAFWLATLLSLGILPEGYIYPREERPLRDLFRKRAHLVRVRTALLLSQQNMILRNRGLKVSAYELKRFSHDGVASLLQGDPELTLAAEANKAVIDLLTIQIDRLEKAIRVQMVPREGFTKVMSLPGVGDILAMAILLETGPIDRFEQVGDYASYSRKVPGVWLSNGKIKGRGNTRNGNRYLAWAFSEAADHARRHHALSRAHKAGGLNLRS

SEQ ID NO: 512462 - protein, 355 aa, unidentified
MTHRECKIFAGLDVSMELTSLCLVDAGGDLIWRGVCATDPRLLVAEIRRAGAGRRTRIGLETGALSPWLVHGLRAQGFDVICLDARHVRAALSSRPNKSDDADGEGIAQILRSGWYREVHVKSLATHHLRALLAARGLMINQRTMLSNQMRGLLKVFGVKLGSGVAGSFVRRVMAVADADEDLAQITRPLLTAWQTLNEQIAVLDRTLRATARDHPACRLMMTVPGVGTLVALTYLTTIEDPTRFASSRRVAAHLGLTPRRWQSGEMDRRGRISRCGDGMARTMLFEAANVILTRVRAPSQLKAWGEALVPRIGKKKARVAVARKLAVLLHRIWVTGRAFQASGVGHEIGSLAAA

SEQ ID NO: 512463 - protein, 418 aa, unidentified
MFKIFRKNCCGLDVHKTWIYACIGITDANSRTEYFQARFSSFSKGLQELSHWLDKYNCKQVCMESAGKFWIPVFNILEKTCLVTLAHPKYTKPQKGNKTDRKDAKWICDLFMCDMIKPSFIPPPAIRHLRDLVRYRGKLTNMLTGEKNRAQNCLTVSNLKLDDVFADVFGKSARSITEYILAHPGEPFDVAQFVDRRCKSPLSEIQAAVDGAVSPEQAVKLRQCLDHIDQLRLLRQRLEQEILRICEPFADILQLLRTVPGLGNDPMTAIAVLSEIGGDMSVFPTAKNLCSWAGCCPRNDQSGAKVKSTRISRAGSYLKPLLVQVANALTHSRKHPEFAERYRRIKARRGHKKAIIAVCKMLLTAIWNILSKLVPYSPAGFLSTSHDLPPSKSLTVAQGLSLLRRRGFILTDDPLSAP

SEQ ID NO: 512464 - protein, 368 aa, unidentified
MNTVKFIGMDVHKKTITIAITDQGRQNQPRIYGAITNDLDALDKFCRKMVSTSTQLHFVYEAGPCGYGIYRHLNEKGFDCMVAAPSMIPKKSGDRIKNDSRDAVMLARLHRAGDLTAVFVPDAQDEAMRDLSRARGDAVIVAKKAKQRLKAFLLRNRVTFTGSSQWTKAYFRWLADIAMPHPAQQVALQEYIDAVHESLNRVGRLTDQIRQMVADWRLAPMVSALQAARGVSMVVAVTMLAELGDLTRFKKPSQLMAYLGLIPSEHSSGPRVKRGSITKTGNGNARRVLVEAAWSYRMQARVSRVLFKRQKNLSEQVCRIAWKAQLRLCARYRRLTAKGKPKQKVVTAIARELSAFLWAIAKQVPSVT

SEQ ID NO: 512465 - protein, 345 aa, unidentified
MKITTVGIDLAKNLFQIHGVDERGKAVLRKQLRRAQVAVFFCNLPPCVIGMEACASAHYWGRTLSRFGHTVRLMASQFVKPYVKTNKNDAADAEAICEAVGRANMRFVPIKNVEQQAILSVHRVRQGFVKARTAQANQIRGLLGEFGLVIPKGICNIAKRVPELLEDTSNELPVPFRHLIDSLNEHLKELDRQVKEFEKEIIAWHRGSELSRKLEDIPGIGPLAASALVASIVDPHSFDNGRQVSAWLGLVPRQHSSGGKPTLLGMSKRGDAYLRTLLIHGARSAILAAQRKLDNTNGWLTNLLTRRHPNIAAVALANKNVRTVWALLAHGREFKADYTRHRIAA

SEQ ID NO: 512466 - protein, 357 aa, unidentified
MERYIGLDAHGASSTFGVIGPSGRKLRQDVVETNGAALVQYVRNIPGRKHLCLEEGTHSAWLYEILSPHVEEIVVAGIGKSRGQKSDVLDAFQRAEDLRTGTIKTHVFKAPRQFSRLRELSRVHSMLVGDVVRVQNRLKVMYRARGVSTPGKQVYQSKGREGWLKKLPVPCRWATEKLHEEYDRLFDLKQETEKELVAESRKHRISKVLATAPGIGPIRVAQLLPIVVTPHRFRSRSQFWAYCGLGIVMRSSSDWVQTPAGQWGRAQIQQTRGLNRNHNSRLKSIFKGAATTIITHLNSNPLYEHYLQSTSAGTKPNLAKLTIARQVAAIVLRMWKDEKEYDPSKLKQQEIVASAVN

SEQ ID NO: 512467 - protein, 425 aa, unidentified
MKITQTAQKIKVNFAMDVSVDVHKDILNFFFETKGREYADECRNRTTVIEKKLKAYHEVAQAHGMKTLRIICEPTGEYQNKMFRTARKMGFLTCFVNAESVSKFRQVETNDNGKTDTKDPRVIRTLGQLNKTMKHRILDADYLTLRKLNKVLDEVDETKKDIRCRISTLLVELFCDYSFEKDFLYGSSGKALVDKYGCNPYRIVNTGYKRFSTYMKKTVPRIRQTTLKRLWDDAQSSALNEQPETYIEVIETQLQQLLEDYQRHETSGNEIVENMIEILNRLRRKDPKIPEATKGVINDKHIARLLGETGPLDDFVNSRMLVRYAGLNIRMRQSGKFKGQNKITKKGRPLLRKVLQRIIFPLVRKNWMYGPYYHDKKEIDKMPGNKIMTCVARQFLKKFYGWYKSGEAFNQQRFFSCETQYRKAA

SEQ ID NO: 512468 - protein, 396 aa, unidentified
MKDTNNGVVIGMDPHKRSVTIEVMTADETVLGGGRYATDEAGFAAMRRYVSRFPDRIWAIEGCSGIGHHVAVRLLAAGEEVVDVPPKLSARTRVFATGQGRKTDATDAHSVALVGTRMAGLRPVVNDEQLAVLRVLVDRRRSLGEDHTRMVAQLHQLLLELIPGGAKKDLSAAQAKALLAKVRPRDIAGKTRRRVAAELIGDLERVYARKKAANKELTELLAATGTTLTELPGIGPSGAARLLVEVGDITRFPDRGHFASWNGTAPIDASSGDQVRHRLSRAGNRQINRVLHIMATVQLRNPTEGRAYYDRRKADGKTSMEAMRALKRRLSNIVYKAMLDDAVTHTTAGSRTGPGGQRGNDSDSSATGSQPHTNSSDKPLPGPARQHPRTPLPAAS

SEQ ID NO: 512469 - protein, 366 aa, unidentified
MKKISTVQVFGKEILKEQKLTIGVDLGDRWSFYCVLEEAGKIILEQKVPTTPEAMKQTFSRIPQSRIALETGTHSPWVSRLLTELGHEVIVAHAQKVQLITKSNRKDDRHDARTLARLARIDPELLGPIRHRSVQAQIHLTVIRARAELVSARTALVNAARGLVKSYGQRLPKCGTQQVSRELATALSSELREVLEPLLKEIESLNEGIKEYDARMEKIAKEVYPEVSLLQQVKGVGTQIALTYVLTIEDPHRFLKSREVGCFLGLKPGRRNSGESEPQKSISKEGDRYLRTMMVQGAHYILGPFGADSDLRRWGLKLAERGGKNAKKRAVVAVARKLAVLLHRLWVSGEVYEPLRNSQKAMRAVA

SEQ ID NO: 512470 - protein, 413 aa, unidentified
MEAILEICCGLDVHRDNIVACITKGALNCKPTSEIRKFSALQHGLKSLKEWLEKEDCHHVAMESTGVYWKPVYVALEDAFEGDIEILLVNAQKIKNVPGRKTDVKDSEWIASLLRSGLLSGSFIPEKEVRELRDLTRYRKSIVHEVSNQKNRIEKFLQSCGFKLSTFMSDVFGASGRLIINHLIDHGNVNVEELDSLIKGVLRKKQSDIALAINGSLNEHERSFLSMQMRHLLQMEENIEELDNSIDKYLEKFKEAEETLDGIPGISKVAAAAIIAEIGIDMSKFPDPKHICSWAGLSPGCNESAGKTKSTKTRHGNPYIKSILCEVAWTVTRRKGTYLSNWYWKVKQRRGTKKAIIGLARKILIIIYTLLKENLSYDEDKFTEIQVNHEKQREKKLIRELKKRGYMVEPLIA

SEQ ID NO: 512471 - protein, 345 aa, unidentified
MDEAYDGRQVVGMDLHRRRSVLVRMSMDGRKLETARITNSPAALRAVLARCGQNPLVVLEATYGWYWAADVLEEAGAEVRLAHPLGVKAFSCRRVKNDERDAADLADLLRMGRLPEAWIAPPPVRALREVIRYRHKLAGQRTSCKDQVHAVLARLGIPVTHPDVSGTGGGLWLGQLVLPQPYAAKVASLRALIAVLDGQITRLADQAAQMLAADPGYAAVRELDGIGPVLGAVICAGIGDVTRFGRAGQLCSRAGLTPRHRESDTKVVRGHVSRQGSRILRWALIEAVRHQPEGTRPRQAKDAILARRGPEARNIARTAAARVLLTRVFCALRDGHARSARHPAA

SEQ ID NO: 512472 - protein, 357 aa, unidentified
MNRDKYVGMDVDQSTCVIVIEDKAGNFVMETYLPTKASDLRTFFKGLEGRIHVGFEEGTQAAWLYELIEPLVEEVVVCDRRGEKVRGNKGDRVDAYKLVRQLRQGELRRVYQGERGHRELKELIRGYDYLIQDIVRIKSRLKAAFRSRGISCAGQAVYRKAECEDWLSKIDVDSLRARVSSLYEQLECLTKLRKKAKDAMITGAKKHPSYKLLVKQPGLGAVRSAQILGIVGTPHRFRTKRQFWPYCGLGVVVHESSEYEIVDGQRRRRKRAVRTRGLNKNFNRTLKMVFKGAAKTVIAREPFKQYYQRLIDKNIRPEMAKLTVARKISAITLAILKSREEFDPIRVNQAVSDSGDQ

SEQ ID NO: 512473 - protein, 412 aa, unidentified
MNIVYERCAGIDVHKRNVVVCAITPDQWGQRHKEQCTFSTMMPDLLRMRQWFQNLGVTHVALESTGSFWKPIFHVLEGYMEVLVVNAQHLKAVPGRKTDLKDAEWIADLLQHGLLRPSFVPPAFQRELRELTRYRSSVIEERSRTINRLQKILEDTNIKLAAVATDLMGQSARQMLAALLAGETNPSVVAELARGKMRAKRDLLVQALQGQFKPHHRVLISEQLAHIDSLDEEIERKSAEIAQRLRPYEAQIKRLETIPGIKRRLAEVILAEVGPDMQRFPSARHLASWAGMCPGNRESAGKRLSGKTRKGSPWLRTALVEAAHAATHCKDSYLAAQYHRLVLRRGGKKATIALGHTLLVIVYHVLAEEKDYQELGGNFFDDHDRQAVQKRLVHRLEKLGYEVTLVPSPPAA

SEQ ID NO: 512474 - protein, 411 aa, unidentified
MELIVERCAGVDIGKDEVVACVRTPTAGGRRDKQTRTFRSFTSELEAMADWFGAEGVTEVVMEATGSYWKPVWYVLEERGFELKLVNARHVKIVPGRKTDVADAEWLAELLEHGLLASSFVPPAPMRELRDLTRYRKRLTQAHTAECQRIHKTLEDAGIKLDSVASDVLGVSGRAMLAALVAGERDPDVLADLAKGRLRRKIPELREALRGRFRDHHALLIGMHLDHLGYLEARLNELDDHIDRVIAPFAEARDHLVTIPGVARRAAETIIAEIGVDMSRFPTAAHLASWAGMAPGNNITGGKRHSGKTTRGDAWLADVLTECAWGASRARDTYLAAQFWRLARRIGKKKAAVAVGHSILVISWHLLTNHCDYQDLGGDYFTRRNTDRHRDHLIAQLHNLGYRVTLDKLAA

SEQ ID NO: 512475 - protein, 355 aa, unidentified
MNDAKYIGMDVHQATISVAVRDSSGNLVMEAILETKAETILQFIRGLRGSLYVTFEEGTWAAWLHDLLQPHVTRVLVCDPRKNALLKVGNKNDRIDARKLSELLYLNKLSSVYHGEPGIRTLKELARSYIAMTRDLTRVMSRLKAIYRSWGIPCAGQQVYAPRYRAEWLAKILEAGVRRRAGLYYQQFDALAALRQQARRELLAEARKHPAMKLLRQIPTIGLIRAALLIALMQTPNRFRTKRQLWAYCGLALRTYTSGEYRFVGGQLKRSKKVLAVRGLNINHNHDLKNIFKGAATRAASTVGPFQDFYQACVARGVKPHLARLTLARKIAATTLLVWKKGVRFDAEHLKQQAA

SEQ ID NO: 512476 - protein, 346 aa, unidentified
MKHYAGLDVSVKETSVCIVDEAGSICREMKVPSHPEDLTRVLTDPVWNLAHVGLEAGPLSQWLFSGIAEAGLPVICIETRHTKAFLKAQINKSDRNDARGIAQMMRVNLFRPVHVKTLTSQKRRALLTARKVLQEKAIAIENDVRGLLRNFGLKVGAVSVVKFDARIRELVDSMPELADIMGPLLTSRNQLREAFMTLHRKLLSIVRDDAVCRRLMTIPGVGPVVSLAFCSTIDVPARFKNSKAVGPALGLTPVLKQSGESHRVGRISLCGDEMMRHLLYEAAQVMLTRVQKWSWLKTWAMTIAKRRGQQKAIVALARRLAVVMHRMWIDGTEFRWTRDVTPAAVL

SEQ ID NO: 512477 - protein, 347 aa, unidentified
MGYFAGLDVSLEETAICIVDEAGLIVREARVASDPEALIAFFRATGMAMERVGLEACSLTAWLHQGLTEAGIAAICIEARQAKAAMGAMPNKTDRNDARGIAQMMRTGWYRAVHVKNPICRSWRALLMARRMVLNKRRDVENGVRALLREAGLKIGTPSRKNFAARVEELAADDPVLAALAKSLLSVIDVMTREVDRLTRRVLDEVRVEPTCRRLITVQGVGPLTALAFRATIDRPDRFRRSRDVGAHLGLTPRRYQSGETDVQGRISRCGDELARTALYEAAHSLLIRSTKWSALRAWGMNVAKRRGMARARVAVARKLAVILHRIWSDGSEFRWGKQASSPAVAA

SEQ ID NO: 512478 - protein, 474 aa, unidentified
MRTRAKQRPNLQAVPLLKHEPLYIGIDVGKMKHVAGFVSTTLLERHQRFEACPVLAFENTREGFRALLERIHSLAPLEHCFVLLEKTGHYHFSLQQYLQECDLAVYTVHVQTRPAGMLKTDKRDALGLANALYNQLQLGVQIADKTQLVRRAEPPTAAAAQLKGLVRHRYELVRESTQRKNKLTAICDEIFPELTQVLKDPNLPTALTLREKFPTPRAIATASLTALQEARGYTRTLPDSNLLELQRLAASSIGTKDLTRQRGLVLEQGQLMKELRLLQEHVGQLESEIKTIVDQAREGKILLSMGIGPIQAATIIATIGSILNFPNAGTLKSYCGWAPMREQTGTTFDRSHLTPRGSRTMRQMMFLIVASMTRQETEWAYLYKRLVQTKCPYDEHTGERKGKLRVMGRVAGQMLETMYALLKKDAEVLSKVPPGQEPPPPILYDPALHRKHREGHYQPLKTSPHPSVIMLQPK

SEQ ID NO: 512479 - protein, 347 aa, unidentified
MRFYNRPHQYYCGIDLHVKTMYICILDSAGQVLVHRNVPSTPAAFLEIVAPYRTELVVAAECMFTWYWLADVCAAEGITFVLGHALAMKAIHGGKAKNDRIDSHKIAVLLRGGMLPQAYVYPSAMRSTRDLIRRRLHLVRKRGQLLAHIQNTRAQYNLPVFGRKLAYRGNRDGVAEHFPDPNVQKSIEVDLALIDQYDALVTDLELTIVREAKRHDAEAFHRLRSVPGIGKVLALTILYEIHDITRFDRVQEFASYARLIKCLKESGGKKLGTSGAKMGNVHLKWAFSEAAVTFLRHNREGQRLLARLEKKHGKGKALSILAHKIGRAVYYMLARGTVFSMEKFLAA

SEQ ID NO: 512480 - protein, 356 aa, unidentified
MHESNTVVPAGTVGLDVSDRYTQVYVVDAAGQRVEETRIRTTPAGVQRWFTGRPRMRVVLEVGTHSPWLSRAVVACGHEVLVANARKLRLIYQNDRKSDRVDAASLARLGRLDPTLLAPIRHRGEAVQADLALLRARETLVRARAQLVNHVRGAVKAVGARLPACSTPSFPLRVAGALPDVLRPALEPLLATLRQLNTQIRQYDRTLARVAQERYPETTRLRQVKGVGPLTALCYVLTLEDPQRFRRSRAVAAYLGLCPRQWDSGERQAQLRITRAGDGMTRRLLVSAAQYILGPFGPDTALRRWGLGLVARGGRFPKQRAVVAVAGKLAGLLHSLWMHDRDYVPEGLPGRVAAAA

SEQ ID NO: 512481 - protein, 365 aa, unidentified
MASMRMAREGAVRVTVGVDTHKDAHVARAKDQLGRRLGEKIIPTTPRGYRALLAWAKSHGEVATFGVEGTGSYGAGLARYLQSEGHVVIEVIRPNRQARRRHGKSDPADADAAASAVLAGDATGQPKAADATVEMIRTLRVARQTAIKARTQASNAMKALVVTAPDDLRECLRELSTIALVRTCARLRPGKLVDPTTATKVALRSLALRHEALDTEAKVLEAQLTRLATGVAPELLAVFGLGTDSAGALLVAAGDNPRRLRSEAAFAMLCGASPVEASSGKVTRHRLNRGGDREANCALYHIVMVRLRWHQPTKDYMARRTTEGKSKREIIRCLKRYVAREIYAVLRSMQLSDVAIAGQAQGEVA

SEQ ID NO: 512482 - protein, 346 aa, unidentified
MAAFAALDVSKKSTSIHIVDEKGVCLWRGKTLTDPDALAEALSPFSDDLALVGLETGSWTTWLWHELTERGFPMVCMDARQAHAALSVTINKTDANDAQGLAHLLRTGLFREVRVKGWEDVQKRTLLRARSTMLRCVLDLANAIRGALRTFGISLPAGTGNGGAKTFERRVAACLAARADLSIIIGPLLEAWRAGRTQVARHERAIRAIVRSDPRCQLMMSVPGVGYLTAMGFVGAVGDPETFRSGRTAAAWIGLTPRRYQSGTINQQGRISRQGDKLLRAYLYEAAAHILTRSSKDSALRRWGLKLRDRIGFKRANIAVARKLAVVLHAMWRSGRPFEAEGCATG

SEQ ID NO: 512483 - protein, 292 aa, unidentified
MEPIYIGVDFHSRRQTICYLKTETGELVITELKHQDKERVSAFYQQFPGPVIVGLEASGYSPWFEAMLEELGREVWLGDATEIRRRARWRYKDDRRDAELIWDLMVHHEFPRLHQPAPQSREILRMLRYRQKLIKVRTMTKNSLQAIALQAGLAKGKQLFTAAGQVEFKAVAMSPVLQYQRDHWFELLKPLNQELLETMKWCKAAAKGDAAITRLRTHPGIGLLTALCLQHTLQPVSRFRNQRKVVAYAGFDPMVRRSAESVIRLGISKAGSRMLRYLTVEAVRPPSVMTRT

SEQ ID NO: 512484 - protein, 313 aa, unidentified
MDIIVGIDVSKERLDISIAPLGTAFFVENSHAGLDDLIGRLKATHGAEASCVVALEATGGFEMLAAAGLSSAGFAVIVVNPAQVRAYANAIGRRAKTDPIDAEVIAAFVAATRPEIRPLRDAETQALSALVDRRRQIVQMIVAEQNRLRMVVETQAQKSIKRLLAALRRELDSLDADLVEHIRKSPLWRVRERLLVSVPGVGPATARTLLAEMPELGGLDRRQIAALAGLAPWTRQSGQWKGKSFIGGGRGKVRAALFMAALVASRHNPILKAFRDRLVAAGKPRIVAIVATMRKLLTILNAIIRDNKPWQNA

SEQ ID NO: 512485 - protein, 360 aa, unidentified
MDKHKYVALDVDSANIVVGVYDSKGKTVMQCCLRNEGQAIQEFFKLLPGTVQVTFEEGTQAVWLYGLIRPLVAEVIVCNPRENKLLKAGNKSDRIDVAKLGKLLRLGELRPVYQGPTAGQGLKQLVHGYEALVDDTTRVKNRLKALYRGRGLNCKGEQIYGREQRQQWLLQLETKELQRRASYLFEELDCVLRLRAEAEKVMCRAARRHEAYKWISSAPGLGAIRTAQTLATAITPHRFRGKRQFWPYCGLAVVTRSSSDYEWVDGGARRKRKPIQTRGLNQNYNRTMKAVFKGAALSALQQHPEFQEYYQRLCAQGMRPEMARLTVARKLAAIVLILWKKGETYDSKRLNQAAPGAGQQ

SEQ ID NO: 512486 - protein, 489 aa, unidentified
MAKTKRKQSTFERLRSGELNRKQRRNLARRRAGNDPGLTIIHSNAGGIDVGNESHFVAVPPDRDANPVQEFGCWTADLKRMAEWLKACHVDTVAMQATGVYSIPLYDILTGHAIQVVLVNAQHTKNVPGRKSDVQECQWLMKLHTYGLLRDSFHLEERMEGVRTVWRLRDRHVKDASRAVQHMQKALTKMNVQLANVLSDITGVSGQAIIAAILEGERDPWKLADLKHEMVKASREEVARCLEGNWRDDLLFELRQGVDSYHFVHQQMRACDQQIESFLASLPTKILERPPQPDGASAATAKKTKKPRKPRKVRHNQPTVDLTTVLKRICGVDLTSIDGIDVITAQTIISEIGTDISKFKTEDHFASWLGLTPAKDITGGKIIGRGRKKVQNRVAGALRMAATTLLESKTYLGARYRHLRQRLPSYAAAIKAMARYLAVLVYRVLTHGEAWVDRGAAKFEQRRTESELRSLTAKALAKGFQLVPITTTN

SEQ ID NO: 512487 - protein, 343 aa, unidentified
MQISTIGVDLAKNVFQVHGVDGQGKIVLVRQLRRQQIMEFFRRLPSCLVGMEACATAHHWARELMKLGHTVRLIPPNYVKAYVKRSKNDAADAAAICEAVTRPSMRFVPIKTAEQQATLTVHRTRDLLISQRTQLINALRAHLAELGFVTNQGRDGVTKLIAIVIAENNLPALPAMMREALRVVVAQLASLQQQIRELERSIHAQHRASDVSQRLESIPGIGVIGATAIAATITDPNVFTSGRDLAAWIGLVPRQSSTGGKERLGGISKQGDRYLRRLLVVGATAVVRHARRHPDKHPWITKLLAKKPAKLVAIAVANKTARIAWAIMNKGGIYRTPALAAAA

SEQ ID NO: 512488 - protein, 413 aa, unidentified
MLLVPVFCGIDWAEDHYDVALVDQAGVVLTERRIDDDAIGYQRLLALLAEHGDDQVEPIPVAIETPRGLVVACLRRTGRQVYAINPLSVARYRERHSVARTKSDRVDAQLLANILRTDRAAHRPLPADSELAQAIAVLARAQQDAVWNRQQVANQLRSLLREYYPAFIEAFQGRRPGGLAHPDGCAVLALAPTPTQAARLSRPQLQAALRRAGRQRGITAASVRLQAIFRRTWLHQLPMVEQAMGRQALALLKQLEAATQAADDLAEATRLVFQQHPQMAIFTSFPGLGELPAARLLAEIGDDSTRFADARGLKAYAGAAPVTRASGKKLVVLHRKVKNQRLAAVGYLWTFAALRLSTGARAHYDRRRVAGDRHTAAQRHLFNRFLGCLYYCLQTGQTYAEDLAFPTAQPIAA

SEQ ID NO: 512489 - protein, 408 aa, unidentified
MQVEHPVCCGIDVHKDTLTACLRRVEDNGQVHKEGREFATTYTSLLALSDWLVEQHCPVVAMESTGVYWKPVYHVLAGTVEVFIGNAHELRSRPGKKTDKRDAAWIAELLAHGLIRPSFVPPPESCALRDVTRTRVALVQTRSQSKNRVHKLLEDTHLKLGSVVSDLFGVTGRRMLAALVAGERDPQVLASLALGSLKHKRPQLELALTGQFTAHHGTLLGLLLELIEMLDRQIATLDQQIGALVAPLQAPIAQLDSIPGVDIIAARDILAEIGTDMSRFGDAARLASWAGVCPGNHESAGKRYRGKTRKGNRYLRRSLVQCAWGARKTPTFLGRTFRRLEVRIGKKKAALAIAHKILVIVYHLLAAGTCYEEARYDQYNPRQEARERQRAIKALERLGYTVTVERAA

SEQ ID NO: 512490 - protein, 415 aa, unidentified
MQTLVERGCGLDVHQATVVACLLIVLKNGQTEKQMRTFGTTTRELLALRAWLLTQGCTHVAMESTGVYLKPVYVVLETEGTLEIVVANAQHVKKVPGRKTDVKDAEWIADLLCHGLLRSSFVPPKPIRELRDLTRYRRKLVESQAAERNRLLKLLETANIKLASVATDVFGVSGRLMLRALIEGKATIQEMAELAKGLLRKKIPQLEMALEGKLEEHHRFLLKLQLERLEAAEKDLAVLEQRIQEKLQPYAAQLALLQEIPGVDWTLAAVIIAELGVDMKVFGNVSQLASWAGVCPGSNESAGKRKSSRMPKGNVYLKTALVEAANAAARAKGTYLRDKFFRLKARRGYKRATVAVAHKILVAIYHMFSHNVCYNELGDLYLDNLNKHHLTRNLVHRLERLGYTVTLEPKAASAA

SEQ ID NO: 512491 - protein, 369 aa, unidentified
MHSITNTELSSHEETRCQFNGGRCAIKMGIDVHQDFHVVVEQVGGTNPKPPQRFGKQAFVHWAAKLKQSGAEVHAVYEACGFGFTLQRQLAALGIDCHVVCPQKLDERNKRVKTDGLDAKALCLKLDRFVQGNRDALALVRVPTEEEERSRAIHRQREQLVGARKRLEAQGRSLMVNHGLEPVQNWWKPRTFAALPVPQWMRELLLKSQPILLALQEKIAALTVQLQSAAAPNQPRGLGKMTSVVIDREIGDWYRFNNRRQIASYTGLCPGEYSSGNTRLQSCVTKHGNPRLRAALVELAWRLVRFQPNYKPVVKWRHILAKGGANRTGPIATGAARKKAIVAVARQLAVDLWRIKTGRLRAEQLGLTI

SEQ ID NO: 512492 - protein, 346 aa, unidentified
MTIIVETRPITGGVDTHLDVHVAAALDANGGVLGVDSFATTTTGFAALHAWLCGFGTLARVGVEGTGAYGAGLARFLRSVGVAVIEVDRPNRQARRSHGKCDTVDAIEAARSALSGRASAVAKTADGNVEAIRVLLVAYRSGRDSRTTCLNQLRHLGFTAPDELRERFRDVPAGFLAESAASLRPNPNGDPVTSATKLAMQTLGRRVIDIDADCARLHDELAEFVDKTAPALIALPGVGTYTAALLLVAAGDNAERIRSEAAFAHLCGVAPIHASSGKTVRHRLNRGGNRQANHALWRIVFTRMSSDPRTRAYVERRSLEGRSKPEIMRVLKRYVAREVYRHLPRG

SEQ ID NO: 512493 - protein, 369 aa, unidentified
MGHRSMFVGLDVHKDSIDVAVAEGGRTGEVRHYGVIRSDHAALEKVRRRLRALGRRLHFVYEAGPCGFGIYRYLTEEGEDCAVVSPSRIPRPSGDRIKTDRQDATTLARLHRAGELVAIHVPTVDDEALRDLVRAREDAVGVSTQAKHRLKAFLLRQGRRYDGRAGWSRSYRRWLATLTFPSAPQHIALQEYRDTIDETERRVSRLTEQLRHLVAQWRWAPLVEALQALRGVSFVTAAGLVAELGDLRRFDHPRTLMAYVGLVPSEHSSGPSVRRGGVTKTGNAHARRLLAEAAWAYQRRPRVGRELLERQEPVPPAVREIAWNAQLRLTGRFRHLVARGKAKPKVATAIARELTGFIWAIGQEVTVSQ

SEQ ID NO: 512494 - protein, 338 aa, unidentified
MFIIGIDPHKGSHTAAVLDDHEMLVGELRVTADRRQRDRLLEFAAPFEPRTWAIEAAGGLGALLAQQLVAAGETVLDVPPALSTRARLLDSGRTDKTDPHDARSAAIVALRHATLQPVRRPDHTVVLRLLADRRHDLVALRTQSIGRLHALLCLLIAGGMPRQLSAERAAKAIATIRPDGPVEVERTAMATELVGDIGRLDQQIAALRERIVEAVDTSGTTVTDIHGVGPIVAAIIIGHTGHVGRFPTAGHYARYNATAPIEASSGPRVRHRLNPRGNRQINHALHIAAVTQIGHDTPGRVYFDRKVAEGKTRKEALRALKRRISDAVYRQLLTDARP

SEQ ID NO: 512495 - protein, 315 aa, unidentified
MNQTNWVGVDTHKDSLACYKDRQFKEFKTTPKGFSAALEWAGKDSKWAIEGAYCYGKPFTAHLISNGCEVYEVNSLLTKTWRRSLAINNSKNDYGDAKVISLNANNARLQKISLKTIQLKEKITAREHFVKDRTRAINAIKMLFSARGLDLPFEDLTTLKAGKWLSEYDDLVIKNFGKMLSDFNRAIKDFEKEIEKSLPEKALKLKQLKGIGDLTAAIIYTETKGKIISPEALASYAGIAPLEHSSGKSKKHRNNKAGNRRLNCIFYRISIHQSRFDEKGKAYYEKKLAEGKTKRHARKCLARQLVRLVFHLLKD

SEQ ID NO: 512496 - protein, 347 aa, unidentified
MTTLTDTVDIVIGVDPHKHFHAAAIVAAGTGKKLAALNVNADPAGFNLLVKKADEYSKSRCWVIEGCGSWGRNLANWLIEAGEFVREIDSPKRPARRMGKKTDDIDATRAAREALGREDLAEPRSAGDRDALAALLMARRSAVQMATDTERQIHALASICPEALAKRLRGLKTHRMVTTCARWRPRGDIAVVIIAQTMRNLAQRARLLRNESSEYENQIDILVRSWRPDLLELVGVGPIIAATALTVWSHPGRIRNEAAFAMLSGVAPIPASSGLTTRHRLNRRGDRQLNSAFHIVTIQRQRHDARTQAYFEKRRAEGKTDREIRRCLKRYIAREFYKILENPLDKQ

SEQ ID NO: 512497 - protein, 291 aa, unidentified
MQHVAIDLHDEYSQICVMNEQRELLAEIKVPTRRGALRDFFRQRERSRVIFEAGPHALWVSELLTELGHEVVACHARRVRLIAESRNKNDRVDAELLARLSLSDLELIRPIQQRSRSTLEQRSVVRSRAALVETSIADQIRVLNDVIEQLTTDHPTVRRLQTIPGVGSLVALSYIHAIEDPARFGASDVGPYLGLTPSNRSSAGKKLGPKDRGRPGDPYVRSLLVQAAWTLMNSRSESELARWGRALVQRVGPKKAAIAVARKLATLMHHLWLQQQDFRPSPQPRRQAVAV

SEQ ID NO: 512498 - protein, 315 aa, unidentified
MLTAGIDTAKDKLDAAVHGQAGTTTFANTPDGWNRLAAQLAKAGVQRIGIEATGGYERGVTRHLQANGFIVVVLQPLQVKAFAKLHLRRAKNDRLDAILIAACTVALDARNAMPPDPRFDELGDHLTFIEQIEDDIARFKTRIQHIADKRRLRVVAADIARLETRRTAELKRLTAALCVHADLARRFDLVLSIPGIGERTTLALVIRMPELGQLSREEAAALAGLAPFVHQSGKHVGETHIGGGRARLRRSLYAAALPASFRWNPALIELYKRLTKRGKTHKSALVACARKLLVFANTVVHRGNPWQDSAALSAS

SEQ ID NO: 512499 - protein, 490 aa, unidentified
MKGQRAKRNQKNQKTSEKTSGKATPGKWDEMNRKQRREMMRRMQSGDLSLEVIHPDASGIDIGNESHYVAVPPSRDSQPVRCFGCTTAELKKMAEWLTQCGIRTVAMQSTGVYWIAVYDILEAAGMEVYLVNARETKNLPGRKTDVQESQWLMKLHTYGLLRNSFRPSQEIRILRTYWRQRHDLVRSAGRHIQRIQKALTQMNIRLANVISEISGMTGQAILKAILDGQRDPRELAAYRDHRVEASEEEIAQALEGNWQEDQLFVLRQEQAGYEFCQQHITECDQQLEKYLARLEDRTQGATLPKETRKGRLNKKKKRNPQFNLREELFRMIGTDLTQIDGIDVTVAMTVVSEVGWDMSKWKTENHFVSWLKLAPDNKISGGKVIGKGRTPTNNRATTVLRMAATTLRASNTYLGAQFRRLRTRLGPPVATKAMAAKLARLVYRMLRYGMKYVDQGAEFYETQHRKQQVIHLKRKAAQLGLQIIELAETA

SEQ ID NO: 512500 - protein, 337 aa, unidentified
MSLYCGIDLHANNSVIAVLDEQDKVFFEKRLPNDLQPILGALQPYQSELVGCVVESTYNWYWLVDGLMDGGFAVHLAHTGAIPQYAGLKYTNDESDARHLAHLLRLGILPEGYIQPKELRAVRDLLRRRLLLVRQKTLHHLSLQSLITRYTGQRLSANQIKQLHAKEMNDHLSEPVALGGQISCLAMHWLEEAIAVLEREVFKQLKPCAEYQLLTTVPGIGKALGSTIALETGRIERFPSPGHYASYARCVKTEKLSNGKRKGHGNGKNGNKYLAWAFMEAAHYAAIWSPPIKRYYQRKQAKSHILVAKKAVANKLARACYHMLSKQEPFDVKRAFG

SEQ ID NO: 512501 - protein, 412 aa, unidentified
MDVIVERCAGLDVHRDSVVATVRVPGKGKSRRRRAQQTRTFGTTIAQLERLGNWLEGFAVTLVGMEATGVYWKPVFFVLERRFECWLINAEHLHNVPGRKSDVIDSRWLCELLEFGLVRPSFVPPPEIRRLRDLTRLRSTQAEERTRAIQRLEKVLQDAGIKLTSVAAGTYSVSARAMLEALLGGVSDPACLAELAKGRLRAKIPQLQEALANRFDIAHHGVLVAGLLAHIDALDQAVAALDARIAAATDAELIERLSTIPGVKRHIAEVLIAECGVDMSVFGSAQRLVSWAAICPGTNQSGHRRRSGKTRRGNPWPRTALTQAARAAARSKNTYLASHYWQIRGRRGEAKAIGATRHDILIAYYHIVHERVPFRELGPDWLARRHSPEHRTRRLVKQLEALGHNVTLEAAA

SEQ ID NO: 512502 - protein, 433 aa, unidentified
MRVMHERVAGIDVHKDMIKVAIRSPGEKRWTRTTEIFEFRTFYGVLQAMARDLRARGVTHVVMEASGVYTEPVYYALCEQDFDEVAVVNPAHVKALRGHKTDAADCRRLAELFECGLLRGSYIPPAQLKEVRDLTRYRMKTVQARTSEIQRLGKALESAGIKLGSVASEITGASATAMIDALIDGERRGAVLADLARGRMRTAGKIADLSMALAGRFTDHHALLCRLHRDRITLFDDAVAGLDGQIAQKAGRWQQELDLLKTIPGFGDVIAQAWLGEIGPAPRRHFASHEKLACWVSLCPGNNISARKRKHGRTGDAGAYIKPMLIQAAWNAIRTKGRLQARYSRLVRRFGGEKNPAAKKKAITAIAHTLLKIAYQVLKSGQPYQDLGADFYTRRESPAQQHAYLERRLQKLYPGQTIIITISPPPGGPAEAA

SEQ ID NO: 512503 - protein, 453 aa, unidentified
MARKRKDNKKKVSALELHCLNPNAAGVDVGATEIYIAVPVDRDPKPVRHFSTFTKDLHAAADWLKACHIETVAMESTGVYWIPFFQILESRGFTVFLVNARHVKNVPGRKSDVSDCQWLQYLHSVGLLRGSFRPEQAVCTVRSILRHRDSLVQMASSHVQHMQKALDQMNLQLHHVISDITGVTGLTIIEAILAGERNPHTLAALRDGRVKATADTIAKSLVGDYRREHLFTLGQSLAAFRHYQKLIGACDREIAQYLEAFESKEDPPEGSLPKSQDGQKPSDGEPQFDLQSHLYRIFGVDLTCIPGINVLTTQTLLAEIGPDLSQFPSAPAFTSWLGLCPDNRVSGGKVLSVKTRRVKNRAATALRMAAQSLYRSQSYLGHFYRRMRAKLGAPKAITATAHKLARIIYHMVTTRKAYDETFCVQNELQNRQRLEARIRKQARELGFQLVLAS

SEQ ID NO: 512504 - protein, 355 aa, unidentified
MNDAKYIGMDVHQATISVAVRDSRGNLVMEAILETKAETILEFIHGLRGSLSVTFEEGTWAAWLHDLLQPHVTRVVACDPRKNALLKVGNHNDRMDARKLSELLYLNKLSPVYHGEQGIRTLKELARSYIAITRDLTRVMSRLKAIYRSWGIPCAGQQVYAPRYRAEWLAKISEAGVRRRAELYYQQFDALAALRQGTRRELLAEARKHPAMRLLRQIPAIGPIRAALLIALIQTPNRFRTKRQLWAYCGLALRTYTSGEYRFVAGQLKRSKKVLAVRGLNINHNHDLKNIFKGAATRAAATAGPFQGFYQDCVARGMKPHLARLTLARKIAAITLLVWKKGDRFDAEHLKQQAA

SEQ ID NO: 512505 - protein, 344 aa, unidentified
MEPMYYIGLDVNKRKISYCVKDSSGKIYSEGSLSATRLDLDHWMKTLPQPWSAAMEATMFTGWIYDHLKPHAAALKVAHPLMLRAIAAAKKKNDRVDASKICDCLRCDFLPECYMASTAIRERRRTLRYRNLLVRQMVQMKIKISSLLMEAGVNYNKQRLHKAGYFRELLASNPDIDEGLRSLLRLCRETVVRLQKTEIALVRSLETDSLLIDRVERLMTIPAVGPITALTWALEVGEVQRFSSIKKAISYCGLCGAEKSSGNTVQRTPLSKQRNKHLQTTLIEAAKMAPRNSPELAMLYDKEKQKGNANRATLAVARKLVAYLVAVDRGQRNFQVVETSNIAA

SEQ ID NO: 512506 - protein, 424 aa, unidentified
MDSTGLKIDYAAYVGLDWGSEKHSVALKVAGGSEIERSTLKQTPEDLHAWLLNLRDKFCGRPVAVAIEQTKGAVIHALLGYDFVHVFRINPKSLADYRKAFSPGGAKDDPTDAEYLLELIELHRSRIKPWVPDNVQTRALQRLVEFRRELVNQRGAFTNQLTQVLKEYFPQALDWGGEIDRVMICDFLSKWPTLEKIKKARPDTVRTFYRQHGCRSSERVEERLRAMSAAKALTEDLAVMAASVCMVQAIVRSLYPLIESIARLDKEIEERFKGHPDVVIFDSFPGAGAALAPRLLAAMGSDRSRFDSADEIQKYSGIAPVTERSGKHEWVHRRFACPKFLRQTFHEFAGQSIKFCAWARGYYDMMRDREIAHHAAVRALAYKWIRIIFRCWQDRVPYNEGIYIRALHKKGSPLVTFMKRVAET

SEQ ID NO: 512507 - protein, 314 aa, unidentified
MATSSETYVGIDVAKDRLDIAVLGERGEKQVDNNQAGIACLVQQMLELQPELIVVEATGGYQRGVVEALFGAGLAVAVVNPARVRQFARACGLLAKTDKLDAQVLAVFGQRVQPRRYESKSEAGKQLSALLVRRRQLDEMIKAEQNRLRTISPSLRGSVERIIACLKDEKKLLDEQTQQFMKEQEEWQEQTEILSSAPGVGKVTTATLLAELPELGKMDRKKIAALVGVAPMNYDSGRKRGYRKTKGGRGDVRSVLYMSTLVATRYNPLIQTQYQQLLKRGKLKKVALTACMRKFLTILNAMLRDSQPFRCAAM

SEQ ID NO: 512508 - protein, 366 aa, unidentified
MVITHVALDDSKRVIVAGILRAEATQPELREIPNDPRQVRRLFERLLHEGPVRACYEAGVSGYDLYRQLTGLGVECAVIAPALTPRKPGERVKTDRRDAAKLVRLFRAGELTAIHVPTEAEESVRDLTRCRDDIRADIVRWRHRVLKFLARHGRVYQTGKNWSQAHWTWIRAQRFEDIALERTLEASLDALEQAMRRRTDLDRVIEALASDAPYRDAVNALRCFRGINTLSAMILVAEIVDFQRFRRPRALMAYLGLVPSEYSSGERHRRGALTKAGNSHARRVLVEAAWHYRHRPGLGNRLARHTADQPPTVVAEAWRAQQRLHRRYRHLVGHGKRPTVAVAAVARELAGFVWAAMTQAVARQAA

SEQ ID NO: 512509 - protein, 441 aa, unidentified
MSEYFLGIDVSKGYADFVLLDNKKNIVEKNFQFDDTFDGHNRLYSFLFSFIARTPDSHITAGVESTGGYENNWVSLLLKLQEDLPISVARLNPFGVSYSAKADLKRIITDKISAQSIAVYLINHTGKISFVEEDCFAPLRKQWIFIKLLVKQKVQLYNQLESLLYSANPELLVFCKHGKAKWVLHLLKKYPSAASLSRASVSTLTKIPYISAEKADTIINNAKSSVASQTGAVTSSLLKSIVEQILSLDKSIAEQEKLLEKNCSLREIELLKSFTGIGTYSAVGLMLEIRAIERFSSAKKLAAFFGLHPVYKFSGDGIGGIHMSKKGRKEPRLILFNIARTAITFNPLIKEIYQKHLKTGMTGLAALGVVMHKILRIVYGMLKHNTKFNPEIDKFNSQKTINAVSKTVELKHRRYQSFDSVAPISRKQNRKREEQMKSHNG

SEQ ID NO: 512510 - protein, 420 aa, unidentified
MSFKIFRFNCCGLDVHKTWIYACIGITDSNGRTDYKQARFSSFSKGLKELCDWLAKYNCSEVCMESTGKYWIPVFNVLEKANNSVILAHPKYTKPQKGNKTDRKDAKWICDLFMCEMIKPSFIPPADIRHLRDLVRYRFKLTCMITGEKNRAQNCLTVSNLKLDDVFSDVFGKSSRSITEYMLAHPGEIFDVAPFVDSRCKTPMEEIQAAVDGAISPEQAIKLRQCLNHIDELEKHLEEIEREILRLSDKYQAALDLIRTVPGFDKNPMTAIQILSEIGGDMSVFPSAKHLVSWAGCCPRNDQSNKRIKSTRISRAGNYIKPILVQVANGLLRSKKHPEITGRYKRIKSHRGHKKAIIAICRMLLTAIWHILSDLKPYTAEGFLESRPVNKAKVLTTSQALNLLKQRGYTIKDDIVPAMN

SEQ ID NO: 512511 - protein, 429 aa, unidentified
MPYRIAGIDVHKKMLAVVVTDVEIDSEYQFERRRFGSNPEQLRSLAAWLLEQESEEVVMESTAQYWKPVWEALERYWKPLCEKREGARRKSGTLHLAQALSNQGRRGRKRDFPDAERLVKRLVARELTLSFVPDAEQRLWRTVTRKKYQLRCDRIRLQNRLESLLEEAHIKLSSLVSDLLGLSARRMLQAITEGETNPVTLAALADKRLRATPEQLCDALGACTELNAVYRRLLKMALEELRLIDEQIGQLDQEMASLLSAHQDAVQRLAEVPGLGVDSAQQIIAEVGPTAATFPSEKCLSSWVGACPGDDESAGVNHSHRSPKGNRHMRRLLNQAANAAARTKGSIFEIVYRRSVPRLGHNQAIGAIAHRHCRLIWLILHQGVRYEERGPAVTKRSKQLRTWKMIRQLRNLGYRIEPPNPQPSQAQAQ

SEQ ID NO: 512512 - protein, 372 aa, unidentified
MKKIVKYVGLDVHKDSITIAIADEGRDGNVRVYGKISNDLGQIDNVMRKLISQNAELHCVYEAGPCGYPIYRHLTSKGIDCVVVAPALIPKKTGDRVKNDRRDATHLATLHRSGELTPVYVPDQADEALRDLVRARKDIQISLRKVKQQINAFLLRQGINYPGKSKWSKAHLNWLADLKMPHPAQHIALTEYLDAMGDHEARVKRIEKAIEQCCQTSRLLPVIEALQALRGISLLSAVTVVAELGDLSRFDTPAQLMAYLGLIPSEHSSGGTIKKGPITKTGNTHARRTLIESAQAYRMPARKSKAIRKRQEGLPDDVLDIAWNAQLRLCHRYRRLIAKGKNHNVVITAIARELAGFIWAIARAVPIVAAER

SEQ ID NO: 512513 - protein, 565 aa, unidentified
MPNVRHERQTQAKLEAVRSMEGLGACAAIGAVLALHMHLKFGWSCDLPVGGVHCNQATTFDTILQTDKGTVNGLIDATVQSAELLSLQDRRLRKGLFFYFSRTFTKALFNADRPLLNGANCIDVLEELVEVKEFSGLTVLADDDHRRLTFDMSGARRPAQPAGGRPLDGIRRDFPPSSNGVEAPRLRCDLQSGSEKGKSMSEITRALIARVGVDLAKRVIQVHAVDAAGRRMVVRSLKREQFLAWCAQLNPSCLVAMEACSSAHHWARKLRALGLDARLIPAHFVSPYRMEGRSGKNDATDAAAICEAASRPSMRFVPVKTCEQQGVMSLHRVREGLKEERTACINRIRGLLAEFGLVFAQSPKALRAELADVIEDAGNELSAMARLVLQRAFDHWRELDEHLHWCDTQVGQHVRSSSAAQRAARITGIGELSASALTAGVGDFRQFNSGHQFGAWLGLVPSQNSSGGKTSLGRITKRGDDYLRTLMIQGAKAAVMSAGKRTDPTSLWLAQLTARLGWQKACVAMANKNARILWAVMTREQGFDPEHVSQKPRAKKPAELLATAA

SEQ ID NO: 512514 - protein, 366 aa, unidentified
MKKTSTVRVNGNMIFKGHKLTIGLDLGDRWSNYCVLDEAGEVLLEQKLATTPEAMKQTFERIPRGLMALETGTHSPWLSRLLRELGHEVLVAHAQKVELISKSNRKDDRHDARTLARLARIDPELLGPVRHRSAKAQIHLTVIRARAELVSARTALVNAARGLVKSYGERLPKCGTEQVGRELAAELSAELREVLGPLLKEIESLNEGIKEYDARMEKIARESYPQVALLKQVKGVGTQIALTYVLTLDDPHRFRRSRDAGCFLGLRPGRRDSGESQPQMHISKEGDRYLRTMMVQGAHYILGPFGEDSDLRRWGLRLAERGGKNAKKRAVVAVARKLAVLLHRLWVSAEVYEPLRNSHKAMRAVA

SEQ ID NO: 512515 - protein, 392 aa, unidentified
MVVSVGIDVSKDKHDCFIVSSEGEVLADAFIIPNTMDGFHYLLQRIRHCTAPQDKIKVGLEATGHYSYNILGFLLDNGLPTYVINPLHTNLYRKSLSLRKTKTDRVDARTIATMLLSDVDLKSYTDIAYHNEELKSLTRYRFDKVQECAKLKQSVSRLATILFPELEGLVSSIHGTSIYALLSEYPGAKQISEVHLTKLTNLLTTASKGRYGKEKAIQIREAARASIGSVMPAKSLELKHTIKLIQELASEIDEIEDSIQKIIDELNPPILSIPGMGVNSAAVILAEIGDFSNFSSPDKILAYAGCSPSTYQSGKLTNCYAHMEKRGSRYLRHALYNATKYVCYWNPVFAEYLAKKRAEGKHYNVALSHAMKKLVRLIYALQKSGKTYLTAA

SEQ ID NO: 512516 - protein, 421 aa, unidentified
MHRKNDNRQVEKRQRITDATLVIGMDIGCEFNAMCLMSKEGTILGRYPKIYNSRKGFDYFHGIVESMKEKYGFTDVLIGMEPTGHYWRKIAYFAMDKQYEVRFIRTTALKHQRELDESSSAKNDIRDAYTIANIAREGKYIDTVIEDNIFRQLRTLAHTREKIQRISTGAKHALKGMLEDYFPELKHIFWSMKAKGLWALLEHYPFPEDVLKTDIDTVTELIAQSTRRKIQAHEKALQIYKAAQHSIGLQRVGDADRFRVAAYLSEIRHSETQLKEIEAQIEALLKKIPFAEYILSMPGIGTLTCGVFLGELGNPCNFTNPKQIVKYAGYDPKEHDSGQRTGRRIISKKGRWLLRKYLYFMAMRVVHRSPFLKDYYENKQKTMTKKEALCAVVIKLIKVIFALLRDKRTFTEKQSCLKQAA

SEQ ID NO: 512517 - protein, 336 aa, unidentified
MEPTTIAIDLAKRVFQIHYVEPETGAIRSKVLKRAQLAPFFANRPASRVVMEACGSAHHWARVLARLGHDVRLIAAQFVRPFVKSNKNDAADAAAIWEAAQRPGMRFVAVKTEDQQAMLAMHRIRQQLVRIRVMQVNQLRGLLYEFGVVLPQGRRASIEAAKAALASLADELPAMLLDSLQDQLSRLRALDEQIARIEQRILSWRRNDDACLRISEIPGVGVLTATAAVSVIGQARTFRSGREFAAYLGLVPRQNGSGGKIKLGGISKRGDVYLRTLLIHGARSVISSSKHLPERLRQMLSRRPTNVVAVALANKMARTIWALLAYGRTYEAAPSQ

SEQ ID NO: 512518 - protein, 422 aa, unidentified
MSKKRNKVCGIDVHKRFLVASILDNEGNCETKRFEQDLDELISLKNWILDSGCESVAMESTAEYWRPAYGILNPEINITIGNAYHMKGIPGKKTDVLDSQWIAELELNNLITPSRVFTGDLYELRTLTRARNKMVNNSTVFKNKILHQLDVCSIRLCTVLKDVFGKSGYALLKGIVERKTQDEIIKALPAKTRKIAPVFFEQIPEYIPDSAIFLIDSMLKIYDNLQVEIKRIEERIKFYLKDKENELRILMSVPGIGIVIGSNLLAEIGDIRDFPTADKLAKWAGLTPSVYQSANTNYTGPITKQGSKYLRWALIEAAHSAIRRPGKLNDYFNGLLPRKGYKKAIVAVARKILRIVWHLLINNEIFEDGIPRVKTVKIPKFPEKIERVGIAKIIQLLSRGAEIIVQEEGKEIMRINGSCQPT

SEQ ID NO: 512519 - protein, 393 aa, unidentified
MRKPQQCRPPHNDLSRSLTSLNLNHTLIAVIELSQKSWLVAGIIPGVERQPLKKLEPGEHALLSLLDRWRNEANKAGYKVQRIAVAFEAGRDGFWLARWLRAHGIEAHVIHAASVAVSRERRRAKTDRLDTEQLKRAFLGWLRGERDHCKMAAIPTFAEEDAKRPSRERESLVGEQGRIVNRMKATLARLGIRSFNPKLKNAAESLEDLRTAEGEPIPPNTLTELHRDLERRRLVIEQIRQIEAARLERLRRTPKAKPNAMVLLLARVIGVGIETADMLVQEVLSRNLRDRRAVARYAGLTGSPDESGSKRREKGLSRAGNARVRRGMVQLAWRFLQFQKDSALAQWYRVRTEHARGSRKKMIVALARKLLIALWHFARDGVVPEGVLLRPAH

SEQ ID NO: 512520 - protein, 342 aa, unidentified
MEKITIIGLDLAKSVFQIHAITEDGHIAVRRALRRSQVLEFFRHIEPCLVGMEACGSAHYWANAIGKFGHTVRLMPPAYVKPYVKRNKTDAADAEAICEAVTRPTMRFVPVKSPEEQAAGMVLKTRELLVRQRSQTANAMRGHMAELGIIAAAGMTSIAKLIAILRDDQDGRLPHSAKAALLEMADQIERLTERVAVLDSKIIAAVKADDAARRLTTIPGVGPIIAATVRAAVQDPAAFRTGRDLAAWIGITPTANSSGGKERLGKISKRGNKQLRTLLIVGATSILKQARRGSKLPGWVVSLMARRPYKVAAVALANKMARTIWALLVKGGTYQAPSMAKA

SEQ ID NO: 512521 - protein, 325 aa, unidentified
MLPQTARFLREARVASEPEALIAWFRSCGFELERIGLEAGPLSQWLVAAMRKAGLAVELLETRHVRKAFEAMPVKSDRNDARGIAQLMRLGWFRPVHCKSMSAQETRTLLTARKLVQSKLRDVENSLRGILRGFGLKVGKTTEREFAGRIEELVVGHRHLQVIANALLAVRAVLRKEFAAFEKQARKMARSDTRARLLMSTPAVGPIVSLTYASAIDDPGRFKSSKQAAAHFGLTPKKYQSGETDYTGRISKIGDSSVRTALYEAAHVMLTKPLKGCSQLKSWAMRIARRAGMSKAKVALARRLAVIMHRMLADGTPFNAAAAAA

SEQ ID NO: 512522 - protein, 426 aa, unidentified
MKSTQNEKISQIKFSTLVVGIDVAKETHYARAFDFRGIELSKLLKFSNTAEGFQKLEEWMQNICQQHSKTEIIVGFEPTGHYWFTLGDYLKNQGHKLAIVNPFHVKRTKEVDDNSPTKNDRKDPKTIARLVKDGCYREVYIPEDVYQELREAVSERDRLVQRLNSISNQVTRWLDIHFPEFNTIFKDWRRQAALQVLKNFPTPEKIIAVGALKIEESWKSTMKRTAGLKRAQELVKLAGNSIGRKTGLVAAETSLQNLLNEYDLYIRQYEQLEQLMMELLQQVPNAEKMLDIKGVGLITAATFVGEVGDIRRFQDPRQIQKLAGLNLVENSSGKHKSKSRISRRGRRRLRHGLFMAMITILATNPEFRQLHKKYISRENNPLNKMQSIIALCGKLIRIFYALLRTGNDYSAEKMMGDIELGIKAAA

SEQ ID NO: 512523 - protein, 344 aa, unidentified
MSKFNLFCSIDISKADLDAVYGSPSSYRHVKLSNDAKGISQLLNLLLSLETDRSKILVCCENTGSFMSKIANILDGEGIFLWAVHPLLLSYYSIELNRFKTDKADAHKIFAYAIAHQSRAVSFHLPSRAVQELRDLFTCRKNLSQTKSAYTCRNEDRQQRAISNHLVMEIEKQLISILDNYITIIEKAILAAIKSDQKVKRMYQILISIPCIGPVTAWHLLFITDCFDKFDSWRALACFIGSAPFPKQSGTSVKSKDRVSKKAYRPLKADFNQGIVSVCTRPGQLFYNYYQNMIKQNKHHLYILNLIKNVLLKLVFKLIQSNTLFNKELFFKNKISWQKNLVLS

SEQ ID NO: 512524 - protein, 353 aa, unidentified
MKKMQKFIVQGKRIFIGLEDSKKTWIVCVRCERMVVHETGMPARYEVLRTYLLDQYPNCEISLIYEAGFQGVWLHDLLEADGIDCIVTPPNKVSCPKNDRVKTDKRDARLLAKNLEAGVYMSCAVPDRERREDRQISRTLSQVQKDIVVEKNRIRRFLDYHGLNGGLPEKNWTDRDYIRLKEMKLPHPLRVSLDAYIQILETLFSTRDELKSELRALCKKERYKTGVHFKRTVPGIGWLTAIRLTLEWGDLRRFPTGKHMAAFTGLTSREYSSGDTVRRGRITGQSSGYVRSWLIECAWRARRKDPALLDKYLRVWRNSGSKKKAAVAVARMLAVRMRAIEITGQSYCCSVAE

SEQ ID NO: 512525 - protein, 366 aa, unidentified
MSDHTTTRLPVAGLDVHAASIRLAVVRADELLDERTLPFDCQLVERELRRLGATRVCYEAGPTGFGLARHLRDAGLQCDVIAPGLVPRRSSDRVKTDARDARKLALLYQGGMLAPIWVPSLEQEAVRDLIRAREDARQDRARARQRLGKFVLRRDRRLPGKGWSLARRQWLGQQAFEHAAQQAAFDDYLLACDLLDRRIETLERQIDEWATHESFQQLVGRLRCLRGVDTLTAIGLIAEIGDFSRFKTAPAFMAYLGLVPSECSSGERRRQGSITKTGNNHARRLLIEAAHNQRRRPARSAQLARRQAGQPADVVARAQQAQLRLHKRWQRMSARGKHSNKIAASVARELAGFVWAIATEQPLRAG

SEQ ID NO: 512526 - protein, 318 aa, unidentified
MTETICVGIDVVKASLEIALGAQGTVMTYPNTPEGHDELTVTLANYTIDLVVLEATGGYEVPVACVLQTLGLAVAIVNPRQARDFAKAMGNLAKTDKIDAQVLAQLALVLSQRTDRDKIARVLPSTQQQVLQAIIAHLRQLVTLSISERQRLGSCHPEIRESITLMISFIQEQLKVIEAALSKHIKTFHRAKLDLLSTVKGVDPATVATLIADVPELGKLTRREISALIGVAPFNRDSGFFRGKRTIFGGRAMVRRMLYMATLTAIRFNPVLCAFYKRLIVAGKPNKVAIVACMRKLLVILNAMVKTNKPWDESLHTV

SEQ ID NO: 512527 - protein, 387 aa, unidentified
MGKTMSLASPAHAVDYDATLIMAVETSNKSWVVAAHVPGFGHIKAKQTIGPTAEALATLIEGYRGRAAASGRVIDRVIVVYEAGYGGFWLARWLTARGIDVHVIQPSSVPVERRKRRAKSDKIDADLLLRTLLAWLRGEPRVCSMVAIPEEAEEDARRPSREREELIRERIMLTNRIGAILATLGIDDYNPLRRDRRVRLEALRTALDHPLPEHARAKIVRIIERLELVLSQIAALESQRDAVLEDEAPEEAKRMIKALVLLRSIGAQSATVLVYEAFIRRFANGKALGCYAGLTGTPFNSGGSEREQGISKAGNRRLRAAMGELAWLWLRYQPESALAKWFRERLAGAKGRLKKVLLVALARKLLIALWRYATDGVIPEGAVLKPA

SEQ ID NO: 512528 - protein, 455 aa, unidentified
MEKVFFGIDIGGKSHSVHFIDEKKRPLCKDLVIDDDIVGYHQVIEAIRRLKEKHPGARFHGGAEATGIYWRNLFFFFQNELPDVTLSLINPLQTKRFKDLELDRVKTDATDARSIARYTATFEPEAAPSVPEHLADLQELCRYRKAKLKEQSKYTNLLHNYLKQAFPELCGRVKRKAGLRILALLSSFPTARDVREANASEIASIRYGKRNFKVGAETASEMKGLAENSVASRTGPGMGFAVRSVAANILRIRGELAALEEKIAELYSSCPATYLVTIPGVGPLSAAVIESEIKNISRFTTAKKLNGYIGAYPELRESGEFRLLKPRMTKCGNRYLNHAVYMCVLAAISPKAPDSTIKHMYWRQVAQGKERMVAIGSCMRKMNHIIFGILMSGKPFEASYEFPEDSFEVRFVDRETGCVVPEELAASCETAVAVRWKRAAAPKPKRRKKEVARPS

SEQ ID NO: 512529 - protein, 347 aa, unidentified
MTIVEAAPGVTGGVDTHLDNHVAAALDPLGRLVGTESFRADIAGYKALLGWLETFGEVTKVGIEGTGSYGAGLSRFLRRRGVEIVEVNRPNRQARRNHGKSDPLDAVEAARAALSGRATGSGKTKDGPVEAIRVLVVAKRSARVARIAAITQMRHLGFTAPEQLHCRLKGLSVPALVAEAARLRPTRSTDSITAATKASLSSLAHRVQALDDEIAELDEKIESLLHATAPDLLALFGVGPDTAAALLVAAGDNPERLHSEAAWAHLCGVSPIPADSGKSSGHYRRHNGGNRQANSALWRIVMVRIAHDPETRLYFERRVKEGRTKRDIIRILKRYVAREVYRHLPRG

SEQ ID NO: 512530 - protein, 344 aa, unidentified
MNIASIGIDLGKTTFHLVALGEHNKVLLRKKFSRPQLLAYTANLPASLIGLEACAGAHFMGDALRAQGHQVRLIAAQFVKPYRKSNKHDFIDAEAIAEAVTKHNMRFVQIKTQEQLDWQAMHRVRDRLMQRRTALINEIRGFLLERGVTFAARPIYLRKNLPTVIEDAEQNLTPRLRWLLDRLWQEWKQTEIDIKTITDEIERISNEDARCRQLRQIPGFGPLVSTATVAAIGNGAAFRRGRDFAAWVGVVPRQFSTGGKQKLYGISKRGNVYLRRMLIHGARAVLLRVKYDTGGFGQWVHRLAQRAPRNKVVVAIANKLARMAWAVLSSGKDYRHQPLQPAAA

SEQ ID NO: 512531 - protein, 329 aa, unidentified
MNVNSQGRETAPTPRANAGIDVSKDWLDVALGSRSERFANDAAGMESLTALMRQKSIDLVVLEATGGYEAAVAAALQVAGLAVAVVNPRQARDFAKSMGVLAKTDRVDAQVLRAFADVIARHEKRGQFLHQLPDAQRAQLAALVARRRQLLDMRTAESNRLIMAHKATRKSLAAIIKALDQQLRQVDQDLDQHIREHFKPLTDLLKSAKGIGAVTSQTLAAALPELGRLDRRAIAALVGVAPLACESGQHRGSRHVWGGRGEVRHALYMATLTATRFNPVIRAFYERLLAKGKPFKVAMVACMRKLLTILNAMARDGTAWNAQLHVKNP

SEQ ID NO: 512532 - protein, 347 aa, unidentified
MRFYTEQHKYYCGIDLHARKMYVCILNQAGKTKVHKNIDTDPEAFFELIFPFLDDVAVAVECVFCWYWLADVCAEHKIPFVLGHALYMKAIHGGKTKNDKIDSYKIAALLRGGNLPIAYAYPAKMRATRDLLRRRMYLMRRRAELLAHIQNTNTQYNLPEIGKNLSKKCHRKHIGERFDDPAVKMTVETDLALIGFYDQLLPKIEYYIDHSAKQHDPDALCRLRTMPGIGYILALAVLYEVGDIGRFKTVQDFCSYARLIRPAKESDGKWAGRSNKKIGNAHLKYAINEAAMLFLRRSKIAVAYREKLERKHGKGKSYGIFTHKVGRAVYYMLKNKKAFNKRKFLYA

SEQ ID NO: 512533 - protein, 339 aa, unidentified
MGQLYGAIDLHSTNSYCGVTDENDNWIKHKRLRNRIEDIEEFFNPYKDNISSIGIESTYNGYWLIDGLMEKGYVMKLGNPSQMGNYSNLKDQNDKTDTKWLAKMLRLGIFPESYIYPKEERPVRDLLRKRMLFVSTKMKINNSIDNQFQTWLNTKISQKDLLELTAEELEQLFHQKSLCLSAKSSIDIIATIDKQIDLIGKEVYKQVKETSTMKRMMKLPGIGKILGITILFESGELDRFKSMKNYVSYCRLVESKKTSNNKKKGKGNSKCGNKFLRWAYAEAAVHALKYEKINKYYQRLKQKKNAPKAMAIIASKIARITYKTMTDENFVYEHEKLFQ

SEQ ID NO: 512534 - protein, 347 aa, unidentified
MDQIIRIGMDTSKHIFQLHGVDSAERPVLRRKLRRSQLLAFFAKLPPTVIGMEACGAAHYWARELGNLGHEVKLIAPQHVKAYVKRNKNDGRDAEGLCEAMSRPTMRFVPVKTEEQQAALMLAGIRQQLIARRTQLSNAIRSYAAEFGLTMARGLDKIEPLLARIAQDEGLPALARELLAIQGREYAQLQAELKAIEARLMAWHRANACSRRLAQIPGVGPIGATALVMKTPDPRAFSSGRHFAAWLGLTPKDHSTAGKTRLGKITRAGDERLRSVLVAGATAVIQQAKHGRGHPSPWLIALLKRKPPKLAAVALANKIARIAWKLMARGESYDGARLPEASVAAAA

SEQ ID NO: 512535 - protein, 321 aa, unidentified
MELNVVAVDIARKVFQLHWVEAETGSIERLKLKRAQVLPWFANRQPELVVMEACGGAHEWGREFLKLGHRVRLLPPKMVRPFVHRNKTDAADAQGIWTASHQPGMRFVPVKSEAQQVVLALHRLRAQLMKMRIMQTNELRGLLYEFGIVLPEGHRAFLKELPAALLEAQGRLPSMQIDSLDEQVRRINQLEADIGTIERQLSQQMRETPACKSIAEIPGVGLMTATAIVASMGSPAAFKDAREFAAWIGLVPRQTGTGSRVRQLGIRKRDDAYLRTLLMHGARAIVCSDRARKWAWLALKRRHYIVAAHCMAGRMTGRRKP

SEQ ID NO: 512536 - protein, 344 aa, unidentified
MKISTVGLDLAKNVFQVHGIDNAGKVIVRRSLRRRQMMPFFGKLEPCLIGIEACGTSHFWARELRARGHEVKLMPPAYVKPYVKRGKTDAADAEAICEAVTRPTMRFVAIKSAEQQSVVALHRTRDMLVGQRTQLVNMIRSQLAELGVVLAKGIHHALRLVDQLVEGVVPDIPALACKIIIALAEQIRELQARIAMLEGEIKTWFRGNELARRLETIPGIGVITASALAASVTDPHRFTSARQFAASLGLTPKADSSGGRERMGRISKMGDRYLRRLLVIGMTSQLQSARRKPDAYPWVAGLLASKPNKLVAVAMANKAARIAWVVMTRGEVYRAPRPTTEATA

SEQ ID NO: 512537 - protein, 346 aa, unidentified
MRQIVRIGLDIAKRWFQVHAVDEAGKEILNRKLPRDKVLGFLGSLPACEVALEACSSSHHWGREIGQLGHRVRLISPNYVKPFVKRGKSDAHDARAICEAASRPDMRFVRVKTEEQQAALMQHTSRQLLIDQRTAVANSLRGQLAEFGVIENKGIENLADLVRRLDEEDPDIAHIPETALAVMKILADQLRAVEANLAMIDEQIEAWRQSSASAQALKTIPGVGTLISAALAAYVPDPSAFSSGRDFAAWLGLVPRQNSSGGKDRLGRITKQGNPYLRRLLVLGATASLRWLNKRTDPLAMWTRQLLQRRPARLVTVALANKLARIAWAIMTTGELYRREALSVVA

SEQ ID NO: 512538 - protein, 366 aa, unidentified
MISKEYYIGMDVHKDFVQMAVFEEKGENPIYERKLNNDNELLVKEAKLFARKGKTIAAYEAGCLGYVIQRAMEKAKIPCYVLPANKVAKKRDDRIKTDKRDARLIGRELRSGSIRPIYVPDSVDEAARDLLRCREDINGDLRRVKQRLLKFILRHGHMFTEGKEHWTQIHWRWMDKIEFDHEHERTVYEEYRSQIKSLEERLARLEKQIIETAESPRYKTAVSKLRAFKGIDYIIALSLLCEIGDFKRFANAKSFMSYLGFVPSENSSGGRRKQGGITKAGNGHLRRLLVEGAWSYTRGDRVGKRLERRRQNCSAQVIETADRALHRLRKKYIKLVFNGKHKNTAVTAVARELAGFIWAIQVSNAA

SEQ ID NO: 512539 - protein, 409 aa, unidentified
MIPAVIERCVGIDVGKKSVVSCVMAGAAAEEPEWEIREFGTTVEELRRLRDWALERGCTHAVVESTAVYWQPVFNQLEDSLKVVLAQPQQVKARKGHKTDRCDAWWLAHLLRHAMIRPSFIPPRAVRQLRDLTRLRRRILGQATQERNRVEKLLEKASVKIGSVISDLFGVSGQRMLEALLDGRGTAEQVAGLVHGTMRRKVPALVAALENHRLDDHYRMLIRFHIDHLGFLEDKLAAIDEAIAQHIRDSGWQEHQRLLTTIPGVGPTSAASILAEVGPDMSAFGSERKLSSWAGVCPGNAVSAGKSTSARTTPGNQHLKTTLSMCAIGVSHSRSGSLKDKFDRIAPRGRAKAATAVSHAILIQVFRVLQSRSDFREPARHLSESRKARLIRHHCRKLGKLGVFVRPST

SEQ ID NO: 512540 - protein, 458 aa, unidentified
MRKGKERQKAALEVSEDMPVINPNAGGIDIGAAESWVSVPPGRDEEPVRKFAMFSRDLYAMAGWLKQCGIKSVAMESTGVYWIPVFQILERQGIEVVLVNAKYAKNVAGRKTDWLDCQWLRILHTFGLLAGSFQPAADIGTLRCYLRHRQMLIEYAAAHIQHMQKALIQMNLQLSQVVSDITGTTGMRIIRAILEGERDPHRLAEMRDWRTKNDEATIAKALEGHYQPEHMFALKQAVELFDFYQQQIAACDRQIGDYLRTLESKIDTEINPIKPARVKKKNQRNAPGFDCRHEAYRISGVDLTQIDSISESAALTILSEIGTDISLWKTEKHFASWLSLCPNNKITGGRIFQRRTRKSSNRVRDVLCLCAQSLFNSRRALGAFSRRMRSRLGPQKAMVATAHKLALLIYRLLKFGTDYVDIGQDAYEQRYKERTVRNLARKAKEFGFQLTPCDGVVP

SEQ ID NO: 512541 - protein, 369 aa, unidentified
MQDIMFIGLDVHKATISVAIAKEERGGEVRHWGTIPHRPDHVRKLVEKLGTGGRQLHFCYESGPCGYGLHRQLVELGHDCIVVAPSLIPVKAGDRVKTDRRDAVMLAKLHRAGELTAVWVPDAAHEAMRDLVRARATAMRVLGKARQHLQGFLLRHGRIYPGKKGWTVAYRRWLTAVRFQHPAQQIVFQDYVDAVNDAEARVVKLTGQIAELLPNWDLAPVVEAVQAMRGVAFIVAVTVVAEVGDFRRFDNPRQLMAYLGLTPSEYSSGGSVRRGGITKAGSGLARRALIEGAWSYRMQARVSRKLHDRIEGLPKAVRDIAWKGQLRMCQRYRHLVAAGKAKVVVTTAIAREMVGFIWAIARAVTAAPA

SEQ ID NO: 512542 - protein, 355 aa, unidentified
MDIVNKLDFTGQHIYVGLDVHKKSWNVSIHSANLEHKTYSQPADPQVLGNYLRRNFPGAHYHCVYEAGFSGFWTYDRLREQGIDCLIVNPADVPTNDKERVTKSDRVDCRKLAKCLRNGELEGIYVPSSIKIEDRGLLRMRHNLIKKQTRCKNQIKSLLHFYGKSIPDDVVSSHWSRRYIQELENIRMTRPAGAMALQTLLSELTHLRELIAKITREIIALSRTEDYREPVHLLKTIPGISTLSAMTLLTELVDISRFSSFDQLASYTGFIPNTHGSGEKERQTGITGRKNPVLRTLLIESAWFAVRKDPAMMMAFNHLCIRMKKTRAIIHMAKKLLSRIRFVLKKRTAYQMAVV

SEQ ID NO: 512543 - protein, 344 aa, unidentified
MTQYIGLDVSQKMTAICVVDAEGRKLWQGQCGSTPEQIERTIGRHAEDGACIGIETGPMTPWLVHELRGYGLDVVCLDARHARAALKMQLNKTDQNDAEGLAQIMRTGWYRSVYVKSFAAHRARALLGARAQLVGMRTRLSNHIRGVLKIFGLLPGALRGLSFDRRIEILVADRPDVAPIVRPMLAAWRQLRVQIAVFDKAVRGLVKANPTCRLLMSVPGIGVLSVLAFVSTIEEPARFNRSRSVGAHLGLTPRRYQSGEIDRSGRISRCGDGLARTLLYEAAVVVLARVKRGSGLKDWAQAIAKRSGAGKARVALARKLSVILHSIWRSGEPFRWSEHPVVAS

SEQ ID NO: 512544 - protein, 463 aa, unidentified
MRTDKKLWRNRKARKELARRLQSENPGLEVVHPHAAGIDVGNSAHYVAVRPDRDSQPVRRFECFTAELHRLADWLQSCGVKTVALQSTGVYWIPLYDILEERRFEVYLVNAQHTKNLPGRKSDVQESQWLLKLHTHGLLNNSFQPPSKIRTLRTYWRQRLQHVTGAATCVQRMQKALTQMNIQLANVISDLSGVTGQLIIRAIISGERDSWRLAELSHPRIQASRAEIAKSLEGTWRSELIFVLQQELEMYDTYQRRIAECDQQLQKHLAAFADTVTPPVKDELPAKKKKKQNKNNPHFHLANELQRISGVDLTRIDGVDVFVAQTVISEVGLDMGRWKTEAHFASWLGLCPDNRISGDKVLARGTRHVLNRAATALRLGASTLLKSQTYLGAQYRRLRSKLGAPKAITAMAHRLARLVYRMLKYGQHYVDKGAEYSERRNRQQQVDFLRKKAGRLGLQIIPA

SEQ ID NO: 512545 - protein, 356 aa, unidentified
MSRDVKYIGMDVHKEAVVIAVLNSSGTLVMESIVETKASSILQFIHGLRGELHVTWEEGTWAAWLYDLLKPHVQQVLVCDPRRNALLKEGNKSDQIDARKLADLLRTGMLRPVYHGEHGLRTLRELGRSYQTIGQDLNRVMNRIKALYRGWSVPCAGTQVYAPRYREEWLQKIEHAGVRRRAELLYQQLDGLQGLRRTLRPELLAESRKHKASKLLRQIPCIGPIRAARLIALMQTPHRFRSKRQLWTYSGLGIETRDSAQYRYVHGQLQRTKKPQQIRGLNQNHNHEMKEIFKGAATRASCGVGPLRDFYVALLAKGMKPEMARLTLARKIAAIALTLWKKEEGFDAEQLKPQAA

SEQ ID NO: 512546 - protein, 343 aa, unidentified
MKITTIGIDLAKNLIQVHGIDERGKTVLNKQLRRNQVLAFFANLAPCLIGMEACGSAHHWARRLTELGHTLRLIAPQFVKPYVKTNKNDAADAEAICEAVQRPSMRFVPIKNAEQQAVLALHRARQGFVKARTAQANQIRGLLAEYGIIIPQGIGHIGARLPQILEDGANNLPGVFCHLLQRLGDHLKELDRQVGELEVQIQTWHRDNEASRKLAQIPGIGPITASALVASIGDAKSFENGRQLAAWLGLVPRQDSTGGKPRLLGMSKRGDSYLRTLLIHGARAVIRAAERKTNHANSWLARLIGRRNKNVAAVALANKNARVVWALLADGRNYQPGYEPAAQ

SEQ ID NO: 512547 - protein, 350 aa, unidentified
MSMLAELVEVVIGVDTHSQTHTAAVVDARTGAALATATVTADPDGYAELDALADQHSGLRAWAMEGTGGYGAGLARHLADAGELVVELDRPKRPARRAGAKSDPIDAERAARDALARTRLAQPKTGAERAALQMHLTARRAAVEAATAAQRQLLALVITAPETVRARFRGQTTRAMIATAARLRPAASSGDVEITAALTVLRDLARRIRFLETEALGHEQAIRTIVRSWRPDLLNLTGVGPIVAATVLTAWSHAGRCRDDAAFAMLAGAAPIPASSGKTVRYRLNRSGDRQLNRALHTVTLCRLQRDPRTRAYAERRRADGKTDREIKRCLKRYIARELYRRLETPPSTA

SEQ ID NO: 512548 - protein, 421 aa, unidentified
MENTLARKLKQVPEGYLIIGVDPHKKKHAAVAITQDFTVRAKLKFDNTREGLDMMLRQARMEMTKSGCRGVMFAIETGGHYWRNVAYFLDDKGIPFRFINQYTLKRRREGKDLNRRKNDYRDAEVAAQLLCTGEFVESMIPQGIYAELRTAHNGYRRLVKERTRITNLLKGLLDGLFPEFVRVFKDPCGLTALSVLSTCPIPGVIAGMTEDEFVATIEARHCGRLMRKKLRALHHTAEASIGIAAGAQSLSTEISFLAEKLNLIERHIGIIERTLIRLVDATDEGKYLLSIRGLNYIAVAGLVAELGCFKAYRSAKQMIKMAGSNPTESESAGKKGSRTPMSKQGRPVLRYCAWTAVIPMLRFNPDFRAWAKRRRERPVHANPLGGREIVGAALNRLLRLSFALVKNQTYYRSPQLVQVTS

SEQ ID NO: 512549 - protein, 324 aa, unidentified
MIYIGIDISKLTFDAAYILNSRTIHKQFSNNLKGFGEFSLWVNKSKKEVYTCLEATGIYSFDLAQYLSQQKVNVMVVNPIITHAFFKMELNRNKTDKADAQLIARYCEHVVLTGDYKKRSYQPKGADYEAIQRLVTRCDQLEKSKTQENNRLEASVNKQTSRSIKRLQKAIDKEIVRIKKTIADIVKNNQSLSQQVDLLVSINGIGERTAWSILAYIGDINFFSNSKQIASYAGLTPKIIQSGTSIDKSSLSKLGHKRLRKSLYMPALVAIRHNPVLKALYERLVNNGKPKKVAIVAVMRKLLILSYGVLKSEKPFDINYQMAD

SEQ ID NO: 512550 - protein, 391 aa, unidentified
MVCVGIDVAKDKHDCCILDSDGTIRADCITIPNNMDGFKQLLQTIRDCTKKSDKIKVGLEATGHYSYNILGFLLDNDLAVYVMNPLHTNLYRKSLSLRKTKTDRVDARTIATMLLSDVDLKSYTDIAYHNEDLKSLTRYRFDKVQERAKLKQSVSRLATILFPELEQLVSSIHGTSIYALLGEYPGAKQISEVHLTKLTNLLTTASKGRYGKEKAIQIREAARTSIGSVMPAKSLELKHTIKLIQELASEINEIEDSIQKIIDELNPPILSIPGMGVNSAAVILAEIGDFSNFSSPDKILAYAGCSPSTYQSGKLTNCYAHMEKRGSRYLRHALYNATKYVCYWNPVFAEYLAKKRAEGKHYNVALSHAMKKLVRLIYALQKSGKAYLAAA

SEQ ID NO: 512551 - protein, 418 aa, unidentified
MEEVHPRCAGIDIGKKFAKVCVRTPGVNPHSRRAKERISEVVTTWGSMTNTILALREHLIEQQVTLVLMEATSDYWKPYYYLLEDLPGCEVMLVNARHVKNVPGRKTDVNDATWLAQLGAHGLVRASFVPPPAIRELRDLTRTRSAVTRERSRKVLRMEKLLEGAGIKLSSVASDLTGVSARAMLNALCAGERNPEVLADLAHWSMRGKSGELIEALTGRFSDHHSFLVRAHFDLIDKHDQVISEITDRIEAMIEPFRDARTLISSIPGISNRVAEVIIAETGADMSRFPSPAHLASWAGVCPGNNESAGVVKSSKTTHGNAHLKGALGIAAFAASQTKNTYLAAKYRRIAARRGKKRAGVALQHDMLNAIWHMLQTGELYNDPGADFFTTLRPERTKGRALHQLEQLGYTVTLEKAC

SEQ ID NO: 512552 - protein, 325 aa, unidentified
MKNTQSQFTTVIGIDISKNKIDVADNQDSTVKTVGNNNKELTQWINSIADKTVTIVVMEATGGYESLLVELLHKHEIALAVVNPRRVCNFAIGIGRDAKTDPIDAGVLVRFGEVVKPSPQLVQSEEQIKLGVLVERRRQILDLINQEQNRSQQTRDTEIRKSIDTVLETLKKQLKKLDERIAQAVAADEANARKVEILNSVKGIGPVTISTIVAELPELGKLNRQKIAKLAGVAPINNDSGQSIGKRKTAGGRSGVRRTLYMATLVATRFNPRIKEFYQRLLAKGKVKKVALTAAMRKLLTILNTLVSTDQLWIDPVAGSTKTAL

SEQ ID NO: 512553 - protein, 321 aa, unidentified
MKIIGIDVGKSKLDIALLVEDKIRSKVFDNTAPGHLALVEWLDKHGILPQGAHACMEATSTYYERLAECLCRHGYVVSVVNPLQIKAYGESLLRRQKTDRADAELIARYCERHKPPQWQPPLPEVRQLQHLLARLEAIQGMRVQEQNRRHQAEGDARESVERILNALDRELAELEKRINDHIDRHPDLRHRRELLRSIPGVGERISAYYLAWLNTDRFGDARQVVAFVGLSPQHRESGSSVHGKPRICKIGNARLRRALYLPAMSAIRCNPAAHTLFERLRSAGKLGKVALVAVMRKLIHWMFGVLKSGKPFDVQLALAKA

SEQ ID NO: 512554 - protein, 346 aa, unidentified
MTHYVGLDVSVKSVSICVVDAAGSVLARGDTTSDPDEITAFIAKHAPAPDRIVHESGILAIWLTRELEKRGLPITCIDARLAHKALSGRINTSDPGDAEGLAHLARTGWFSQVHIRSEASERVRVLIGTRERLIRLRKDLEGHVRGVLKVFGICMGAVGQAGMRQRFRDQLAEAGETDLAISVMADVFLPIHRALCAATQAMDDELKAIAKESDLVRRLMTVPGVGPVVALSFAATLDDPGRFRRAKDVGAFLGLTPRRHQSGDMDWSGRISKCGDRDLRRLLYSAATTLITQVRKPSPLRTWALRLQERKGFKKAAVAAARKIAIVLMCIWRDGTVFNPTQEANA

SEQ ID NO: 512555 - protein, 371 aa, unidentified
MKKNTIFVGLDVHKNSIDVALADAGRDGDVRFYGTIGGDLESLHKVVRKLQSTGSTLRLVYEAGPCGYDIYRSLTNQGFDCSVVAPSKIPRKSGDRIKTDRRDALNLARLHRSGNLTAVYVPTAEDEAMRDLTRGREDAVKALRVTRQVLLAFLLRHGYRYNGQSYWTKAHLNWIADIKMPHRAQQIALHEYVHAVQEQLERVQRLTLQIQELVAQWQLAPLVKALQALRGVSMVVAATTVAELGDLTRFDSAKQLMAYLGLVPSEHSSGGTTRRGGITKTGNGHVRRALTEAAHSYCHPARESRVLTARLDDLPQEVRQIAWKAQLRLCGRFKKLMARGKNRNAIVTATARELAAFMWAIACAILPAPTV

SEQ ID NO: 512556 - protein, 352 aa, unidentified
MIIIGVDFHPEFQQIASVDTETGEVQEKRLAHREEAEAFYRALAGQKVRVGMEASGHGRWFERLVAELQFELLIGDAAEIRTRRVRKQKTDRQDAQLILRLLLEDRFPKIWVPSWENRDLRQLLWHRHRMVQARTRIMNQLQAVALNEGLRCKKRLWRVHGREQLESFRLAPWASRRRCDLLELLDRLNPTIAELSQAIEQEVEKCPAARRLMTHPGVGPLTALAFVLIIGEADRFQCGKQVASYLGLVPLEDSSGNRRRLGHITKQGSSILRFLLVEAAQVTVRSLPEWRSKYLHLMMRRGRKIAKVAMARKLAVRLYWMMRQGWDYQQWVKFGSHAGQPGNRHGVQSNTE

SEQ ID NO: 512557 - protein, 346 aa, unidentified
MTIIRIGLDTSKHVFQIHGVDENEQPVLRRQIRRQDVAKFFAKLAPTRIGLEACGASHHWARVLRELGHEVVLIPPQYVKPYAQRGKNDKIDAEAICEAMTRPMVQARFVPIKTIEQQAALAMLRVRDLLVRQRTMLINAIRGHAAEFGVTAPKGPQQMTELLRRLASDEGVPDLAREMIGVLAGQLPMLGAKLKAIEARLMAWHRQNAISQLLATIPGIGPIGGVSFALKVAEPRVFRSCRHFASWIGITPRESSTAGRQRLGRISKQGDEDLRRLLVLGATAVIQQAKPGRAVPWLLGLLGRKSKKVATLALANKMARTIWAMMISGEVYRRPAAALPDVTAAG

SEQ ID NO: 512558 - protein, 317 aa, unidentified
MALQRIFVGIDVSKEWLDLWLEPQKRFERTSNDAAGWTATTGLLRALGAAAGLVVAFEATGGYEIGLRQAMLEAGFEVRRLNPLRVRLYAKSLGRNAKNDRIDARVIARYAEAADTMPETLDPARERLAELVTHRRRLVDERVAIGNQTNMLRCRVLEAQNRKRLALIERQLEETDALILEAVGETPSFLAKLQLLKTLKGVKDVTAVTLLALLPELGRISRRAIAALVGVAPFDHDSGALKGTRSIAGGRSAARTALYMAARAAARSKSPLGTFYKRLIAAGKTPKIATVALMRKMLVTLNAILRDNQPWKHAKAC

SEQ ID NO: 512559 - protein, 329 aa, unidentified
MTAVYLGLDIAKDSYDAVLLRDGQDDRGRHRAFPNTTAGHQALQDWLQRQSVAPAALHACLEATGRYGDALAQALYDAGYTVSVVNPARIKAYAASELQRAKTDRLDAGVIARFGRAQRPRPWTPPTPEQRQLQALQRRLDDLQAMYRQEDNRRQAPGTPPAVQASIQTILAALQAEIQAIRQQLAEHIDHHPTLKAQRALLCSIPGISHTTATVLLAEIGNVHAFRSARQLAAYAGLTPRPRLSGSSVRGRTRLAKTGNARLRKALYFPAVVAKKHNPLIRAFCQRLLAAGKTTMCVLAAAMRKLLHLAFGILRSQRPFDPNYIHETT

SEQ ID NO: 512560 - protein, 335 aa, unidentified
MSLNLVAVDLGKRSFHCHGIDSDGVILSRKVSRSKLLETIKELAPETVAMEACASAHFWGRRFLADGRQVLLINPRFVKPFVKGSKNDAADAEGIYEAASRPTMRFVPVKSTEQQDLQSLHRARERVVCARTALINHMRGLLGEYGVILPQGAWRFLAQAQDAIAAAELSDLVRELFGDLLEELRALDLRLDKLDQQLLSLCRTNEACRRLLKLPGVGPVIATALVAAVDDGRHFRSGRELAAWIGLVPRQYTTGGKPRLGGIGRRANHYLRRQMIHGARAVMFRLTKHDDRRSQWLKGVAARRGFNRAIVALANKTARIAWAVLTRKEDYLVAA

SEQ ID NO: 512561 - protein, 357 aa, unidentified
MTDQQHAVDLTGVTGGVDTHKDTHTAAAVDGLGRVLDTRVFPATTAGYTALLAWLGGFGTVTAVGVEGTGSYGAGLARHLAAEGVRVVEVNQPDRHTRRRKGKTDTQDAINAAHAVVSGRADATPKAGTGPAAAITALRAVLNSAVKSRTAALNQLDALIVTAPAALRESLTRLTGKALITACARLRPCSDLTSPATGTKTALRRLARRIQHLTTEITDAKADLTALTQQVLPATTTLFGVGPGTASQLLATAGDNPDRIDTEARFAHLCGTAPINASSGRTDRHRLNRGGDRHANAALYRIVIVRLRHCPRTRAYLERRTAEGIPKRHIIRCLKRYVAREIHKALTTDLANLTNTP

SEQ ID NO: 512562 - protein, 356 aa, unidentified
MNKIIRVGVDLAKHVIQVHAVDAAGKVVTNRALKRDKFLLWCADLPAGCLIAMEACSGAHHWCRKLTERGFDARMIPASSVVPYRIQGRTGKNDANDAAAVCEAASRPHINFVPPKTLAQQGMLCVHRLREGFKEERTSCINRIRGLLAEFGVVLPQSPDVLRHHLSDVIEDASNDIASIARLVLQRAQDHWRELDAHIKWCDQRIADHQKTDAQVQRAAELMGVGSITASAVVATVGDFRQFKNGAQFAAWLGLTPKQNSSGGKSSLGSITKRGSIYLRTLLIQGAKAIALTRQYDNPIFLWVQKLRERAGWQKAVVALANKNARILWAVMTREKRYDAHHISSYPAPVPVMTPA

SEQ ID NO: 512563 - protein, 355 aa, unidentified
MDNVKYIGMDVHKETISIAVLDSSGKLVMESVIETKGITIVQFIRGLRGELHVTLEEGTWAAWLYDLLRPYVHEVLVCDPRKNALLKAGNKSDQIDARKLAELLYLNRLTPVYHGEHGVRALKELSRSYVTISGDAARVMTRLKAVYRSWAIPCAGKQVYAPRYRAEWLGKIREAGVRRRAEFYYQQLDELRALRQQVRRELLAESAKHQASKLLCQIPSIGPIRAAQLIAILQTPNRFRSKRQLWAYGGLAIETHSSADHRYVDGQLRASKRPVSLRGLNRNHNHELKNIFKGAAIIAATKAGPFQEFYAALVAKGIRPEMARLTLARKIAAITLIVWKKGVSFDAQHLKPQTA

SEQ ID NO: 512564 - protein, 340 aa, unidentified
MNLTTIGIDLAKTSFSLVGMDQHGKVVLRKTLKRAQLLPFIAQCPTSLIGMEACSGAHYWGREFTQLGHKVGIIASKFIAPFRKGGKNDNNDAEAICEAVSRATIWFVPVKTAEQQAQLCVHRVRQGLISERTALINQLRGLLSEFGIVMPKGRYSAQREIPLILEDANNGLPMLARQMITNLWERIKIASEQILFYDRELRKQAHHHPVAKRLLTIPGVGEQVASGIVASVPDPSLFKNSRQFAAWLGLVPRQYTTGGNIRLGRITKQGDRYLRMCLVHGARAVLANMKDKQDKISCWARELIARRGYLRAVVAMAARNARLIWTLMVKQEDYKVIAVS

SEQ ID NO: 512565 - protein, 403 aa, unidentified
MNSVGIDISKGRSTIVVMRPFGEVVISPFEVRHTGSELSELARQLKSLDGETRVVMEATGNYHASVAKLLHDAGLYVSVVNAQLVHDYGNNELRRVKTDRKDAVKLANYGLDRWLTLPRYIPEEDTRLLLKNCYRQYRQYSKVQTVLKNNLISLLDTVFPNANRLFSSPIRGDGSEKWVDFVAEFWHCRCVSEKSERAFTSKYLRWCRKHGYNFSEAKAHTIYAEASGHIGVMPKSETTKLLVEQAVSQLRATSTALAALKHEMQSLVSQLPEYPVVMGMFGVGPTLGPQLIAEIGDVRRFYSKKALVAYAGLDAPPNDSGDVTGRHKSMSKIGASSLRRTLFLVMSVYLQTAPLDEPVYQFMDRKRAEGKPYRVYMMASANKFLRIYYATVKAYLESLEHTA

SEQ ID NO: 512566 - protein, 459 aa, unidentified
MVKKKVMEMEIINTNAGGIDVGSRSHYAAVGQSLKDVKEFGVYAEDLTALCLWLLSYGITSVAMESTGDYWQNLYTELMKHGIEVILCNGKFTKHPKGKKTDVIDCRHIQKLHALGLLTGSFLPGETTEKLRTYCRQRNNMLSLASTASRKMQKYLKFLNFRLDVVVKDVCGLTGLKIIEDICKGNLDPYLLAGHRHYNCKKSKDEIAKALHGNNREDFLFGLKQEFESYQFYQKKIDSCDRAISKFVKEELKKSPEKTKLKTIEKPYKRLNKNAPAIKNLNQIAFQYFEGVDLMAIEGVSHATILSIMSEIGPDGFCKFPTSKQFVSWLRLAPNNKISGGKVLSSKIPKGSNRLKIALRQAANAIGNLKDTHLSDFFKRVAYRKGRQAAVSATARKLGVIIWTMITKKVPYKPPTEYLFLDQKRKLKMVTRIKKNIAKFDIKLEDIGLGNSLKPCPYF

SEQ ID NO: 512567 - protein, 353 aa, unidentified
MSSDKYIALDVHQATTVTSVLNAAGREVNQSVIATKSQPIRSYLEGFSGPLHVTLEEGTYAAWLYDLLEGRVAELVVCDPRHNALLQEGSKTDRNDARKLADLLRTGMLRPVYHGRQSLRPLQELVHSYEALVEDTTRAMNRIKALYRRRGIDCAGRGVYTQKQRASWLEKLPAGATRLRGELLHDQLDHTRSLRRKARLALLKESRKHQISTRLREVPGLGPLRVARLIAWIQTPHRFRTRRQFWAYSGLGLVIFDSSEYRLVKGRVVRRAQPVKIRGLNRNHQPRLKEIFKSAALSAIRQPGPFKEYYDRRVQQGRDPALLRLSVARKLAALVLSLWRKGGRYRAQDVKQA

SEQ ID NO: 512568 - protein, 319 aa, unidentified
MAQNDLVVAGVDVAKDKVDVCIRSLSLRRTFASTAEGRRELASWLRRQKVGKAVMEASGGYEREWAKALRDAKIEVRIVDPKRVRSFAQSAGRLAKNDTIDAEMIAWFAETFDEARGQAYDATREQLRQMVHARQALKDMQAKLENQGEHALPAAVQRMHARILKTISVELVKFEAAISTMIQATPHFTELAEIIESVPGLGRTTSAALIAAMPELGQANNKIVAALLGVAPYDDDSGRRRGERHVKGGRRRTRNAFYMACLGAATRHNPVLKAFYDRLVAKGKEKKVALIACMRKLISILNVMITRRQKWDANRYALS

SEQ ID NO: 512569 - protein, 342 aa, unidentified
MNNSVVAFDPCGIEVSARQLVVALRTQDHDQPLREFPNTPEGHQALLRFLARSGQPLRVVLESTGLYGLDLALALHQAGVAIMVANPRAVRHFAQALLQRSKNDRLDAQVLRQYAARMPFEPWRPPSAAAFKLVAVARRLEALTEMMTQEKNRLHAASLSQALPALIRIDLQRSIATQQRAIERLTTAALEFVLSDPLLARRFELLCSIPGFGVTSALHTLAELTLLPVGMDVRQWVAYAGLDPREYTSGTSVHKKVRISKAGNKHLRRALYMPALVAVQHQEHLRAFYEHLLARGKTKLQALVATMRKLLHAIFGMFKHDQLFDGRKVYAPAAAALPQEVA

SEQ ID NO: 512570 - protein, 326 aa, unidentified
MNKDKEIFGIDISKDYFDVYTSLGMNHQFENTPVGFRCFRKLLSGNAHCVMEATGYYHYRLASYLFKEEIKVSVVNPLSVKRFIQMKLSRIKTDKSDARMICLYGEYQEDLKLLKLWRPSEASQRESLQIVRLLDQYTKQTTALKNKIHGEEILGKPSKIVLRSLKRSLRNLQKERVLLEEALMTQVEQEHRDMLARLCTIPGMGRKTAILMLVLTDGFTKFDTASQLCSFCGITPLIKQSGSSIRGRARISKMGNQKLRNLLFLCSFTASRHNKACADIYHRIVNKGKSKKLALIAVSNKLVKQAFAIATSGLCYDENYRSQLPA

SEQ ID NO: 512571 - protein, 421 aa, unidentified
MQRLPQEEFAAFVGIDWADAKHDVCLQAVDSATCECSQLDHKPEAIDAWARALQERFAGRPVAVCLELNKGPLVYALRKYAFLVLFPVNPGTLAKYREAFTLSHAKDDPTDAALQLELLLKHRDKLHPLAPQSAALRALEQLVEHRRRLVGDKVRITNRLTSTLKNYFPHVLEWFDDKDTTLFCDFLAQWPTLKAAQLARRATLERFFHAHHVRYANVIDQRIQAIKNATPLTTDEGVIAPHALLVQALIAQLRALLHAIADFDHAMAHRAQDHPDFPLFAALPGAGAVFAPRLLVAFGEQRARYASADELQKYAGIAPVTERSGTKTWVHWRWQCPTFLRQTFVEWAAESIRHSFWARAYYQQQRDKGTSHQAAVRALAFKWIRILFRCWQNRTPYNESTYLSALKRRGSPLLSTRANVS

SEQ ID NO: 512572 - protein, 354 aa, unidentified
MSQKLEITIAVVGIDIGKNSFHVVGHDERGAIVLRQKWSRGQVEARFANMPPCLVGMEACVGAHHLSRKLNSLGHNARLMPAKYVRPYSKGQKNDFRDAEAIAEAVQRPTMKFVATKTTDQLDLQALHRVRERLVSQRTGIINQIRAFLLERGIAVRQGQRFLRAELPRILATPPDVLSPRMMRIIEDLAGDWRRLDERVEDLSNEIEAIARQDAGCERLMSVPGIGPIISSAMVAAIGAGDVFTKGRDFAAWLGLVPKQISTGDRTILGKISKRGNRYLRVLFVQAAWVVLIKPQSWERHGLKSWIEAAKKRLHRNVLAIALANKLARIAWSVLAHGRDFEAQKMDQAANQSA

SEQ ID NO: 512573 - protein, 322 aa, unidentified
MAMLSFCGIDVSKDRLDVMVLPGQQSFAVRNDAAGWAELIARLRGFAIAAIGLEASGGYERGAMRALLAAGLPACQVNPFKLRQFARASGVLAKNDPLDTRMIASFVAIMPTRPAQPRPPAIERLAEMLAVRRQLNAERVAAENAARPLEDAMLQRLSRRRIARLAADIDMLDRHLVEIVETDAALAHRYQLLTSMPGVGLVLACTLMALLPELGTMSRKQVAALVGVAPYAFESGKFKGRRCIWGGRAPVRLALYMAAMSAGNWNPVLKAFRKRLKGAGKMAKVVIVAVMRKMITMLNAMVRDDLVWADHLHGRHSVPTAW

SEQ ID NO: 512574 - protein, 432 aa, unidentified
MTKITRVAIDTSKSVFQLHGVDESERAVLRKKLRRRDMLTFFAKLEPTRIGLEACGGAHYWARELKALGHDAVLMPPQLIKPYVQRNKNDGRDAEAGCEAMSRPRMRFVPIKSPEQQAAQMLLGVRDRLVRARTQLSNAIRGYAAEFGFVAGKGLNKIEPLLAWLAADPRLPVLAKELFAVQGEEYALLTARLRGIEAKLMAWHRTNALSRRLAEVPGIGPIGASLLAMKVPEPAAFRCGRDLAAWAGLTPKDHSTAGKQRLGTITRAGDEELRRVLVVGAMAVVQRANRGNGPALPWLSGLLARKPARLAAVALANKNVRIAWRLMVSGQHYDRHRGTASAQAAGALAPVAGSASAVGEENATVPTPVRLTPCSPPSRTLRAASGGGLRPSLTAAARGVSATAQVGTKKRPSGRTKKLTKRIEQAGAIAPN

SEQ ID NO: 512575 - protein, 348 aa, unidentified
MSSSTIIAIDLAKNVFGVEIGERHQKATMRKKLSRSELCLLLATSSPCVVAMESCANSQTWAKLAAGYGHTVNIVPTQHVKSLSIGPHKNDLRDAASIREAASRPDMKFVALKSDAQQELQGLICFREGYVKNKVSLGNHLHARFSEFGVTINKGERAIAEMENYLEKNPGKFGKLFKSQLCIAIQEYKQLKSNIVSISKTIDIFCKEHFRDSYRRLLEIPGVGRVTAAEFLCHCGDYTAYKNGRALSAALGLVPRDCSSGGVEKLGKITKCGNKRLRSLLVQCALSALKAQRKDPQDDDLLIWGDKLRDRVAPKKAMVAMANKITRIVWKILATGESYNPKYRSCCA

SEQ ID NO: 512576 - protein, 423 aa, unidentified
MEHYAGIDVSMESASPCVVDATGQIVREAKVASEPDVLIGWFGGLEFAVTRIGLEAGPLSQWLYAGMRAAGLPVELLETRHVRDAFKAMPVKTDRKDARGIAQLMRLGWFRSVHCKSLPAQEIRALLTARKLLQTKNHDVEMSLRGVLRGFGLKVGPTTPRTFVGRIRELAAGHGTLSTVAEALLAARSMLFEQCQKLEKRLRSLAREDGRVQLLMTAPGVGAIVALTYASAIDDPGRFRSSKAVGAHFGLTPKKYQSGETDVTGRISKIGDGGVRTALYEAANVILTRPVKGSTLKSWGMRLAARTGMRKAKVALARKLAVCTAPYAGRRHGIPRRQSGCGRSPLTKGDCRFGRFGTPAARSKVPSPGRWIRSGRCHFSRALPLRVFRLADLLLIRPHQVAAKRRPRTEERPQATRIMAQRD

SEQ ID NO: 512577 - protein, 348 aa, unidentified
MQFYINTHEHYCGIDLHAKTMYLCILDGKAEVLLHKNFRSRPEDFLEAVAPYRDDLVIGVECMFTWYWIADLCRREGIEFVLGHALYMKAIHGGKVKNDEVDAFKIAMLLRGGIFPTAYVYPSEMRATRDLLRRRLDHVRNRGELLAHVQNTHHQYNLPQPSAKIAYKANREGVADAFVDLDARKTVEIDFALIEHYDTVIKDLELHLVRQAKQHDPDVFHRLRSIPGVGKVLALTLLYEIHDISRFARVQDFLSYSRLVKCEHSSAGKKLGTGGSKIGNVHLKWAFSEAAVLFLRNNPAGQRLVRRLAGKHGKAKALSILAAKLGRAVFYMLSREKTFQMDAFLGAK

SEQ ID NO: 512578 - protein, 366 aa, unidentified
MNKISTDAMNRIENLKGDQLTIGLDLGDRFSHYCILNASGEVIAEHHLATTPKGIDEVFGRIPRNRIALETGTHSPWVSRQLTRLGHEVIVAHARNVRLIGDSSRKDDQFDARTLARLARIDPGLLGPVRHRSAQAQIHLTVIRARAGLVGARTALVNTVRGLTKSYGERLPKCGTQKMNREVAQGLSQELRDALDPLFREIESLNERIAEYDRRIERIAKEVYPQVALLKQVKGVGTLIALAYVLTVDDPYRFRRSRDAGCFVGLRPGRRNSGMSQPQLHISKEGDVYLRTMLVQGAHYILGPFGEDSDLRRWGLKLAERGGKNAKKRAVVAVARKLAVLLHKLWVSGEVYEPLRNNHKVVAAVA

SEQ ID NO: 512579 - protein, 339 aa, unidentified
MPYVGIDVAKNKHDVTALNVPGKTVLKPLTFSNNKAGFELLDLSIRQINQDCLIALEDTGHYAFNLLNFLHEQGYKVYTYNPLLIKEFAKSLSLRKTKTDKKDAHGIALKLLSDPNREQFQHDNRQVELKILARHIHRLKKKQSDWKVQYTRCLDIIFPELDKIVGKHSEYTYQLLTRYPNPQKRIEAGFDKLIEIKRLTASKIQDILSVAPRSIGTTSPAREFEIIKHYKRLIDKAETCVNDLMAEFNSVITTVTGIGNRLGAVILAEIRNIHAFDNPAQLQAFAGLDSSIYQSGQIDLAGRMIKRGSPHLRWALIQAAKACARFSPAFKAYLKTKLE

SEQ ID NO: 512580 - protein, 313 aa, unidentified
MQLFIGIDVSKDKFDVASSPSSFESTFANDPKGIRDLVRSLRLIKPQLIVLEPTGSYHVALRNALHAAGLPVRVVNARHTRCFIQADGELAKNDEIDASGLALYAERMRPIVREVPDKRQQQLRELMSRRLDLVKMMSAEKNRRECASPWILRKLNKHIRQLQAEIDAVEAKMTELLQADSQRWLHYQLLLTVPGVGKVCGFILLAMLPELGRISHKEIAALVGVAPFNFDSGRYEGKRRCWGGRAEVRRVLYMAAVSARRHNPIIKDFYERLTGQGKPPKLALVACMHKLLTILNAMLRNQTAGQPDIARAA

SEQ ID NO: 512581 - protein, 349 aa, unidentified
MLADQLDYVIGVDTHLDEHVFAVVTAPTGAVVARTAVSANGRGYREALGFAARYAPAARAWAIEGTGSYGAGLARFLASRGETVVELSRTPRSERRLRGKDDALDATRTARAALASDRLARPRSGERREALRLLLVARRSAVDVRREALGQLRGVIVTAPNQLREELRGLPVGKLLERCSRFRRSGSARADELATRLVLRSLARRIQAATKEADQLEHEIFAHVRGLSPALLDEPGVGPIVAAQLIVAWSHHGRVRSEACFARLAGVAPVPASSGQTTRHRLSRGGDRQLNRALHTIVLHRRQHDPATRDYIARRINEGKSRRDATRLLKRYLARHLYRLLENQEPQMT

SEQ ID NO: 512582 - protein, 412 aa, unidentified
MDNIVAYIGLDWADERHSVHLQPADGKIEHHELEQKPTVLHEWVAQLQQRFAGGKIAVALEQRKGAVIHALLMYDCFVLYPINPKALARYREAFTTSGAKHDPRDSELLLDLVVRHRDKLRAWVPDTVESRKLQALCEQRRKLVNQRVALTNRLTSLLKQYFPQALEWVGDLASVQACDFLVQWPTLAAVQTVRPSRVRQFYCDHNCRKRAVIDARLAAIASARPLTTDAAVIEPLSLSVQTYATQLRTLIAAIATFDARIAAVFAEHADHDLFGSFPGAGDVCAPRLAAAFGTDRSRWASAAELQAHSRIAPVTERSGKSLWVHHRLACPKFVKQTFHEFADQSIRFSRWARAYYDQQRARGNDHHAALRALAYKWIRILFRCWKERRPYDEDTYIDALRRRGSPLAKHFA

SEQ ID NO: 512583 - protein, 478 aa, unidentified
MDDRRLVGIDLGITSAHTVRVLSGEGATVCRRKAAPTLHGLAEVERAALAGAAPATRLEVVIEPTGPAWLPIAVFFCSRGHTVYRVSSAKAHDLRRFLHRHAKSNGIDADTLARLPLVDPAGLHPLELPDAERAALDRRVRACDRLTQQAATHKRRIKDLVRQLLPCSPLVGELGMADLAVLERYADPHALLAAGRARLARVIVKASGGHLGAARAEQWLQAANAALDLYGDHPAVAFQDLAAEVATEVRLLRATQAELAAHATQRESCYRWVDPAGLARSLPGLAEIGGPALVATMGPATRFATAAKFRSFTGLAPKASETGQTDRKGQPISKAGNRLLRTTLVRAADNARHIDPQLARIYYVQMVQRGKDHLGAVCVVAAHLAERAWTVMDRGMPYVVCDTDGVPVTPQQAKAIIAEHWTVPEEVRRRRRSRKGKAPQQVLQGHVTGAQGATRRPSPSPASLGRRAGRVKQARART

SEQ ID NO: 512584 - protein, 446 aa, unidentified
MRVLYPRCAGLDVHKDQVVACVRRVEGRQATHEVQRFATTTRGLLELSAWLESRACTHVAMEATGAYWKPVWHVLEEDFELVLANAAHIRNVPGRKSDVNDAMWIADLLAHGLIRASFVPPRPIQELRDLTRTRRQLVREIVQHTQRLQRVLEDANVKLGSVVSDVLGLSGRRIVRALIDGETDPEPLAELGHARLRCSRTELAEALQGSVREHHRFLLRQHLRTIEQLEHTVGEFEARIEALLAPFHADVARLMAIPGISTTAAVVLLAEIGADMTVFPSAGHLLSWAGLCPRLDESAGKHRSTRLRKGAPWLKPVLVQCAWRAARTKNTYLQSQFLRLKARRGPKKAAVAVAASILTAAYHMLRDGVDYQDLGPAHLSRRDSARVAAQLARRIRELGYEVDIRTAPSRTSRRSSLNSLSSCGTHPMRQSTSGRGVESVSAVVSS

SEQ ID NO: 512585 - protein, 447 aa, unidentified
MALFVGDDWAEDHHDVEIQDESGRVLARARLPEGVAGIARLHELIGSRLGEGGGPGEVAVGIETDRGPWVQALVAAGYQVYPINPRQAARLRERHSNSGAKSDQGDSHMLADAVRTDRHQLRRAAGDSALSEAVKLVARAHQTLVWERTRHVARLRAALRESFPAALGAFGDLDAPDALELLAAAPDPASAAGLGEDRIAAALGRARRRGVAGKAAAIAAALRAEQLGQPAPLVAAYAAVVRSQVAVIAALNDQVKEMEKEVEAHFGGHRDAEIYLSQPGFGVVTGARALGEFGDDPGRYADAKSRKNYAGTSPITRASGKRKTVHARFVRNDRLIDALRAQAFSALGTSAGARAYYDQLRARGADHEPALRQLGNRLVGILHGCLKTRTLYEEATAWGHHASRADKAAPGHRPGASGAPPGRQRQAGQRRGLNASPPAKGGLPKAS

SEQ ID NO: 512586 - protein, 360 aa, unidentified
MGEITRVGVDLAKRVIQVHAVDATGRVIVAKQLQRDGFTAWCAQLPPGCLVAMEACSGSHHWGRRLRAMGMEVKLLAPHFVSAYRLSGKTGKNDAADAAAICEAASRPSMRFVPIKSVEQQSMMALHRLREGYKEERTACINRIRGLLAEFGLVFAQRPEVLRAALAEVIEDASNELGAIARMALERAHLHWIELECHIAWCDERIARHVRSDEQAKAAAKLCGIGPVTASALVATVDDFKQFKNGRQFSAWMGLVPRQSSSGGKSVLGEITKRGDEYLRTLLIQGAKSAVFTAHRRSDRLSRWIVQLRERVGWQKAAVALANKHARILWSILVNGQSFDPEHVPTKHLMRPPAALPAAG

SEQ ID NO: 512587 - protein, 448 aa, unidentified
MAQRSQLKRMEIANPNAAGIDVGSASHFVSVPPDRDDEPVREFKSFTEDLEHLADWLVSCGIDTVAMESTGVYWITLFELLESRGLNVFLVNARHVKNVSGRKSDVLDCQWLQQLMSYGLLSGAFRPKDEICALRSVMRQRAMLLSYQSRHVQHMQKALTLMNVQLANVISDVVGETGQKILRAIIAGERDPLKLADLKNGRIEASKEEIAKSLQGNWREEHLFALTQAVELFDAYSKALQRCDVQLESMLKALSRSEAEPGPSKRRVGKAKNAPKFDARTYLFRICGVDLTAIDGIDVTTALKVVAEIGPDLSRFQNAKHFASWLGLSPGTKISGGKRLSGATRGNANRAAQALKLAAAALRPSQSALGAYYRRMCGRLDKGKAVTAVAHKLARLVYAMLTKGTAYVDQGQAYYEERYQQRVIYHLRRKAAAMGLELVPIQAQGQSA

SEQ ID NO: 512588 - protein, 345 aa, unidentified
MNHYAGIDVSLEWASVCVVDASGKIVAEGKVASEPEALISWLGSRGVSLARVGLEAGPLSQWLFAAMRQAGLAVELLETRHVRDAFKAMPVKTDRKDARGIAQLMRLGWFRPVHCKSLPAQEVRALLTARKLLQTKNHDVEMSLRGVLRGFGLKVGPTTPRTFPGRIRELVAGHTTLSTVVEALLAARNALFEQWQKLEKRLRSLARENGRVRRLMTAPGVGIIVALTYAAAIDDPGRFRSSKAVGAHFGLTPKRYQSGETDVTGRISKIGDGSVRTALYEAANVILTRPVKGSMLKSWGMRLAARAGMRKAKVALARKLAVVLHRMLADGTNFLAEKAAVAAAH

SEQ ID NO: 512589 - protein, 449 aa, unidentified
MSRRNQKSIKACKAAPLTITHPNAAGIDIGSASHYVAVPADRDDEPVREFQSFTEDLHAMANWLKACGVDTVAMESTGVYWIPVFEVLETLGFTVLLVNARHVKNVTGRKSDVLDCQWLQQLMSYGLLSGAFRPTNEICVLRSLWRQRATLLKSQGREVQHMQKALTQMNIQLANVISDVVGETGQKILRAIITGERDGQVLAALKNGRIRASEAEIAKSLQGNWRTEHLFSLKQALAMFDFIGTQLIECDQALEQQLQSLQAHDYEPELANSVKRVPVRNALSFDIHTQLIKMCGVDLTRIDGINVTTALAVLSEIGTDMSRFPTVGHFTSWLGLCPGTKITGGKVINGKTKRVTNRATQALKLAASALRTSQSSLGAYYRRMCARMDKPKAITAAAHKLARLIYAMLTKGEQYVDKGQDYYEERYHERAVNQLTKRAEKLGMKLIPA

SEQ ID NO: 512590 - protein, 405 aa, unidentified
MDVIIERACGLDVHKDNITACIMTSQGKEVQTFSTKTVFLLKLLDWIKENSCTHVAMESTSVYWKPIVNLLESEGIEFLVVNAQHMKALPGRKTDVKDAEWIAQLLRYGLLKASFIPDRNQRELRELVRYRRSIIEERARQHNRIQKVLEGANIKLGSVVSDIMGVSSKDMLRAIADGEDDPEKLANFARRTMKKKKEELELALQGYVNPHQRLMLKTILTHIDFLTEQIEMLDQEIAKRVSTYQEDIERLDSIPGIATRMAEQILAEIGTDVGNQFPTAAHLCSWAALVPGHNESAGKRKSSRSKKGNKYLRSALTEAAQSVRGSKNYLGALYRRTAGRKGKKKAAIVVAHAMLRIAYYLLTRKEMYVDLGEDYFDKQKQASIVRHSVRRLENLGYTVTITEAS

SEQ ID NO: 512591 - protein, 338 aa, unidentified
MSIVMGLDQHRGQITCEWVDTETGEVQRSRVAPADRAHVRKWLERFGGQELEVALEATTGWRFLVEELRQVGAVVHLAEPAETAGLKGAKKRAKNDRADARHLRELLMVGRLPESWIAPDHVLDLRARVRLRHELGEQRSEWQQRIQAVLYHHGCPQRRQLLVGDGREWLVAQPLPETAREQVRVALAMIDALDLQMRPIEKQLRAYARRQAGCKALMAHYGVGELTAVTILAELGDCTRFSSSRQAVRYAGMDITVYQSDQRRAPGHISRQGPPALRWALYEAAQIARRPGSPDRDYYLEAAERIGGNRACLSVARKLLKRCYHTLRELGEEALAPA

SEQ ID NO: 512592 - protein, 315 aa, unidentified
MHIQQSFMVGIDVSKAHLDVAIEGKRAVVRFDNDAAGCAALTTAVTGAELVVVEATGGYEMAIVRTLMAAGIAVAVVNPRQVRDFARASGRLAKTDQVDARVTLHFARAMRPAQIPHIDDGRIALAALVTRRRQLIDMAVAENNRLEHAPEAVAALIGETLAALKAQLARVDAAIALAIEAEPDMAARRNLLLTVPGIGEVSAAVLIAELPELGAIDDKKLAALVGVAPMAHDSGTWRGQRHIAGGRATVRCALYMATLSAIRCNPAIKTFHKRLRDAGKPPKVAIVAAMRKLIIMINTILKRQTPWNQPRQHGC

SEQ ID NO: 512593 - protein, 310 aa, unidentified
MTSIDYIGLDIHKKTISFCVKAQDGTILDQGTIVARRDTLLAWAKARPRPWIGAMEATLFTGWIYDLLKPLAQELKVAHPAMLKAIAASKKKNDKVDARTIADLLRCNLLPECYMAPSAIRDLRRVLRYRNLVVRQATRMKNRIAGLLMETGTPYNKERLHGRAYFSELLASLREVPRSVVELLQLSRGQLEFFATIQRRLLKGLCQNPDLSERVARLQTIPGVGEITALSWVLEVGEVDRLPSIAQAASYCGLTSAQHNSAGKEQRGPISKQRNKHLQTVLIEAAKLAPRRNAQLAVVHQREVERRRRS

SEQ ID NO: 512594 - protein, 379 aa, unidentified
MSNATTRTARSATTAICSDPFETAPGAVSAPRFPQTLGLDVSDKLTHFCLLGQDGDILDEGRMRTREPDILHRTAAFAPCRVVLEVGQHSPWLSRLLRTQGHEVIVANPHKFALIRASYQKSDRSDAELLARAGRFDPVLLSPVVHRPEEEAADLAFLHARRQLVAARTSLINHVRGALKASGVMLPRWDAHAFHSHAPGSIPAQLAPALLPLVECIAQLSASIREMEKHARTLIEDRYPQAKALQQVNGVGPITSLAFVLTLADPHRFNKSRLVGPYLGLTPRQRQSGERSPQLRITKAGDTFLRSLLVQSAHYILGPFGKDSDLRRWGLAHLERGGPNQKKRTVIAVARRLAVLLHHLLVSGEVYAPLFQQGGAAPA

SEQ ID NO: 512595 - protein, 449 aa, unidentified
MKILALDLGKFNTMCCFFDTKTRKHSFLNAPTERNYLNTLFKKHKIDIVVMEACGPSGWINDLANIHGLKTLVCSTNEDAWKWSNVKRKTDKDDALKLARMAAMNELKAVHMPSETHREFRSLVKYRKTLDHRINKMKCTIRAWFVNHGIEIDTGEKAWHSGRERINSFRKPLIECQPDELWKGELDLELTQFDALTVQLESVVKKLEALGKTDPRIQRIRTIPGVGPRTAEILVACIDDPHRFTTGRQVSAYFGLVPRQYQSGETDRNGRITKRGNPLARTILVECAWASLRYNEWAKGVYDRICGKQKTRKKKAAVALARKIAVLAWAMLRDEKDWAPTHMIQVTESFGKMKRELKQSLQSMKPKENSDQRKSRLRREAREAKAVADRPKKSVRTATAKRSRSKTTVVPNVAPPSNPTKRTTPKSTARTNLKPKPKPRRAGKLVSAG

SEQ ID NO: 512596 - protein, 400 aa, unidentified
MNAVGIDVSKGKSTVVVMRPFGEVVAEPFEVSHTDAELSELACFLGELPGETRIVMEYTGNYWQPIAKVLYDAGLFVCVVNALLIYKYGNNSIRKGKTDKLDAVKIANYCLDRWANLERYTPADQIRQILKTCRRQYDQYIKLKVNLKNNLISLLDGTFPGVNTLFKSASRDTDGHEKWVDFAENFWHRECVCMKSEKAFTNQYRKWCAKTGYRFSVEKAVAIYAHASSHVNTLPMSDAIKLLVTHAAVQLNTIIKTISTIQHQMLTLASQLPEYPIVMRMFGVGPVLGPQLMAEIGDVRRFDRKQSLVAFAGVDAPPCQSGTFDSKNRHISKRGSPRLRKTLFQVMSTLIQHAPADDPVFQFLDRKRQEGKHYYVYMTAAANKFLRIYYGTVTAYLEKL

SEQ ID NO: 512597 - protein, 364 aa, unidentified
MDRNETIPPTTWVGIDVSKDTLDACLLPAPGGKARERAFANDAAGHTALAEWADAHAAGAAVGFCLESTGAYGEALATALADAGRHVAVVNPARVKYAGLMRGQGNKTDRADAKLIAEYAARERPARWHPPRPEVRELQALSRRRDDLRRLAAGEKTRLATPGLSDAVRTSLARVVAFLAKEADRLQAQADAVVAADEHLSASRELLRTIPGVGPVAATAILAELPDPARFATAQQAAAYAGLAPREYRSGTSVKKRTRLSKAGNARLRKALYLPAMTAVRFNPLVAAFYNRLVAAGKPKMSALGACLRKLLMIAYGVLKSRTAFDPACASKNAASQHATWFGVAPLTPRAALTIGRWRPPRAG

SEQ ID NO: 512598 - protein, 342 aa, unidentified
MKSTAVGVDIAKNVFQLHYVDEETGEIVNKPVKRAVFLEHFANRARCLIGMEACGGAQHWARALTKMGHQVKLMPAEFVKAFNIRNKNDAADARAIWLAVQQPGKPVAVKTEAQQAVLALHRMRQQLVKFRTMQINSLRGLLTEYGEVMGKSRAALDKAIPAVLARIAERLPAMLIDTLREQWNGLAKLDGQIAEIERRLRQWMKEDKAVQAIAEIPGVGVLTATAAVATMGDAKTFRSGREFAACIGIVPRQTGSGGKVNLHGISKRGDTYLRTLLIHGARSVLTHANEPGPWVEQISRRRPPNVVTVALANKMARMIWAILAHERQYQKGYVSVKTSMNG

SEQ ID NO: 512599 - protein, 413 aa, unidentified
MGYKIAGIDVHKKVLMVVLIDATSPVEKPERRRFTTLPSDLRRLSSWLREQGVQEAVMESTAQYWRTVWLELEPHMLLHLAHAFSNRAPRGRKHDFKDAERLGRRLIADELILSFVPNGEQRIWRSMTRMKVQLTRDRVRLQSQIESLLEEMRIKLSSVVSDLLGVSGLRILRALAAGETEATRLAALGDNRLRCTEEQLLDALTGSSQPMHRAMLALQLERLHLIDTQIAELSNLIAQAMKPHQEAVIRLAEVPGLGVGSAQQIIAEVGAQAGTFSSAAELTSWVGTCPGKNESAEQNHTSRSAKGNKYLRRVLNQAAHAAVKKKGSHFQTVFRRLLPRLGYQSAIWAIAHRLCRVVWKILHEGARFIEQGSEPDAHTKKKRARLLVQALRRLGYDVAITAKHLANQNAMQV

SEQ ID NO: 512600 - protein, 462 aa, unidentified
MNRSSSRKRSRRVNALSLPVIRPDTAGIDIGATELYVAVGPDRDPEPIRTFTTFTHDLEALAAWLKACGVKSVAMESTGVYWIPLYQVLERHGFEVCLVNARHLKNVTGRKTDVSDCQWLQHLHAVGLLNASFRPPDAICAVRTILRYRETLVTQGATQIQHLQKALTQMNLHLHHVLSDLSGVSGMRIIEAILTGERDPHRLAALRDKQVKASEEKVVAALRGDWREEHLFVLRQAWELYVHYQSKLKECDAEVERLLARLDSQADPKDTPPPPPNAPRQQPRKNQVALPNTDLRQELFRLYGTDLTRVPGLGPSTVAKLHSELGTELREAFGHDGRFCSWLAICPDPRKTGGRVVRHQTRDVKHRVAAILRLAAQSLHHSDSALGQFYRRIRARLGGPAAVTATAHKLARIFFHLVVTKEAYDESIFAREEERHRARHLQRVQQQAKKLGFNLTPMECVS

SEQ ID NO: 512601 - protein, 343 aa, unidentified
MDHFAGLDVSVKETSVCIVDEAGKVVREVKVASEPEALLSVLKNPAYRFKRIGLEAGPLSQWLFSALAEAELPVVCVETRHMQAVLKAQINKTDRNDARGIAQMMRVGLYRPVHVKTLRSQKLRMLLTHRKLLQSKAIAIENDLRGTLRNFGLKVGMVGTVKFEARIKELVENLPDLAVLVEPLLVVRRVLREQFVILHRRLLAIVQDDAVCRRLMTTPGVGPVVALTYRATVDVPARFRKSKAVGAVFGLTCSKYQSGEIDRSGRISRCGDEMMRVMLYEAAQSMLHSKKWSWLKAWAMQIARRRGKKKAIVALARRLAVIMHRIWVDGTEFRWTREQAVAA

SEQ ID NO: 512602 - protein, 428 aa, unidentified
MNYSKTDKLNQITEKILIVGIDVSKNFHVARAQDFRGIEYGKAITFNNNFIGFSDLGTWIGELMLLHQKETLIIGLEPTGPYWINLARYLKSKNIQVVTVNPMHVKKIKELDDNSQTKTDFKDSKIIAQLVKDARFSEPNLLEGDYESLRNSKNLRQMMVKDLIRIKNQSHNWLDRYFPEYRVAYKDWEAKSFIKILKNYTFPAVLCQIGADEVYKSLPGKLRCGVGLRKIVKLVNAATDSIGTTEGLEIAKEEIKYLLKQYEAITADLEYLEAKIEEICSRLPEVHKLLEIKGIGLTTASGIISELGDIRNYDHANQLIKMAGLSLIENSSGKKKGRTTISKRGRSDLRKFLYQVIFSMLATNKAFKALYKYFTERRKNQLKGKQAIMALARKLLRIIYVIVTKNIAYDEEKMLADIIRPVEFLQTA

SEQ ID NO: 512603 - protein, 408 aa, unidentified
MEVVHERCAGLDVHQHTVVACARVAAGGKVGQEVQTFDTTTQGLLALCDWLTAHECTHAAMESTGVYWKPVWHVLESSFELVLANAMHIRNVPGRKTDVSDAMWIADLLAHGLIRASFVPPTPVQELRDLTRTRKQLVREVAQHTQRIQKTLEDANIKITGVISNVLGTSGRALLEALIAGETNPERLVDLCSPRLKATRSELVEALRGRVREHHRFLLKLHLGQIDALNAAVRDVEARVGETLTPFRERAELLTTMPGISETTAHVIVSEIGIDMSRFPTAAHLVSWAGFCPRSDESAGKRRSTKVRKGAPWLKTTLVQAAWAAVRKKDSYLRAQFLRIKSRRGPMKAIVAVAASMLTAAYHILRDGVPYRELTGSHFDARDRTKLTKRLIRRLSDLGVQVEIRNAA

SEQ ID NO: 512604 - protein, 386 aa, unidentified
MGTSAMSRIEQDTLPQPTLSLAFELGKNTWKLGFTIGVAQQPRERTIPAGDVARLQQEIARAKQRFGLPEDARIVSCYEAGRDGFWLHRYLVAHNVQNHVIDSASIEVNRRQRRAKTDRLDVRKLLTMLLRHMAGERKVWSVVRVPSIEEEDRRQLHREMTTAKQDRTRVINRIQGLLAGHGVQLALQGDVDAQLAQVHQWDGSPLPPALLSRLKRAWQQVGFLTTHIQTLEAQRRAVLRRREDAVIAQVRQLFTLRGIGVNSAWLYVMEFFAWRDFQTPKQVGALAGLTPTPSQSGESRRELGIAKAGNRHMRAMAIEIAWAWRRFQPDSALSQWYERRFGHGSARLRKIGIVALARKLLIALWRFLKTGVLPEGAVLKGETSGP

SEQ ID NO: 512605 - protein, 320 aa, unidentified
MQSPSAVLNIGADVAKDAIVVACSEGSFPVREVANQRIAVLAFLKGLPAGSRIGVESTGSYHELFAEAAHQLGFLVFLLNPNDTRHYAKAVGLRSKTDRVDAELIARMIAHEHTKLHTWVPSTAQQRELDRLIKRRATLISLREAVEMSLHELGGFADDLKALRTRFNQLIARIDLRVKALVEASPARKQNFTRLCTITGVGPVVGTALVNALERVPVKSADAFVAFTGLDPRPDDSGKHRGKRRLSKRGPGELRRLLYLAAMSAAKTKTWQPLYKHYRAKGLSSTATFVILARRIARTAWSIYTYKTEFEPGRLTTPLT

SEQ ID NO: 512606 - protein, 483 aa, unidentified
MRLRITNNPTPTVDVFSFSFEFAGALEIVNEYSGFAVTSARYIAFAELKQCTSHQITLSLWEVFMSSLTQEFSAFIGIDWADTKHDICLQPANSQHREFDQLPHQIPAIEQWAYSLQKRFGGTIAVVLELSKGPIVYALQKYDFFVLFPVNPSTLAKYREAFKPSRAKDDPTDAELALDLLLCHGDRFKPIKRQSVEMRTLTYLVEQRRQLVGDKTRFVNRLCDTLKQYFPQTLDWFEHRDTVLFCDFMTRWPTLTQVKRARKASLETFFKTHNVRFDTVIATRISGIRAATPLTLDVAVLTAHQLQAMAQVNQLRTTLQAIDQFDDAIAKLAPTLPDYALFNALPGAGPHLAPRLLVAFGEQRERFTSAAQFQQYSGVAPVTERSGKKCWVHWRWQCPTFLRQTMVEWAAQTINKSFWAGAYYRQQRDKGCSHQTAVRALAFKWIRILYRCWQNRTPYDESKYLNALKRRDSPLLKQVTTTS

SEQ ID NO: 512607 - protein, 414 aa, unidentified
MNYNKKMEEMKGVKVFAGVDVGKEKHFMSLIGEDGLVKNTGICISNSLEGFEKMVGMLKSTGTEKEVVVGMEPTGHYWKALGYYLKEKGYMIYLVNPYHVKLSKEMRDNSQRKTDKKDSELIAHLVREGKFLNSRLLDGNYEELRRLTTARERMVQEIVRCRIRLISILDEYLPEYERCFCKITAKTSLKLLNKYGIKGLREKSVALEVVKDIVLFSRHKIPKERALEILGKLENTIGLKEGLTGAEIELKIWLEELEGYLNKLSNIEKEIKKVLDSTEEAKYLLSIKGVGYITAAIVLGQTGSFRSFNNAKQLEKFAGLDLVERSSGKRVGGKRISKRGRKLLRHGLYRVAIVAISRCKEFKALYEYKVNILKKNKMIAVTDITVKMLRIMFAVVKNKTMYDGNLVLKAIAYS

SEQ ID NO: 512608 - protein, 388 aa, unidentified
MRSIGLDLGARHIAYCEIRNGEVIDRTSVKRLDQLKSRIGPDCPPARIAFDASREGWHVHDTLTSWGHDAKMIDTTRVRAMGVAHHKRKNDALDAEAAARAVDQGRIPEAHILSPARRALRAQLSVRGALVETRAQYVTTIRGLGRAAGVLLPTCTTENFVNKVRESSLDDATSTLIAPLLAVLVGVEEELTKVERTLSEMAMREPITKLLATAPGVGLIVASTFVSVIDEAKRFRNAQAVGAYLGLVPSELTTGGPEKRRLGSITKQGNTYARKMLVQAAWLILRSRDMDDPIRQWGDRIAKTRGKRIAAIAIARKLAGVLWAMWRDGTAYDPVGQAKASAKGTRREARSKNANAEALERSAKKLQRNRCIERRSSAGFASWASWGA

SEQ ID NO: 512609 - protein, 342 aa, unidentified
MVFLNPNSCMGLEPEPSKEGSWMMAQNDVVVAGIDIAKDKADGCIRAVSQKQTFPSTTEGRRQLISWLRKHKVTKVVMEASGGYEREWAKALRVKNIEVRIVDPKRVRHFAKSAGRLSKNDVIDADTIAWFAETFGEAPGQAHDAARETLQQMVNARRGLMEMRTMVSNKGEHDVPEAVKNGHARLLKAIAVEIAKLEAAIAAMVKATPHFAARAEIIESVPGLAGTTSAGLIAMMPELGEASNEAVSALLGVAPYDDDSGKRQGGRQIKGGRRKARNLFYMGCMGAATRHNPVIKAFYQRLIAKGKLAKVALVACMRKLIVILNIMIARGEKWDASRYAVS

SEQ ID NO: 512610 - protein, 342 aa, unidentified
MERVVTVGLDIAKNIFHAHGVAQDGKVVFSRKLRRAKLEAFFSTLEPCLIGIEACSTSHHWARVFTAMGHEVKLIPPSYVKPYVKSQKNDAADAEAICEAVTRPTMRFAEVKSISQQSVLSLHRVRAQLVSHRTRIGNTIRGHLAEFGIVAPVGREGLYRLIGIIEDNADTSITDLTRISLRHLADQYRLLQAQVLDLDRQIMKAHRANALSKRLATIPGIGSLAASALAASISDASAFKSGRSLAAFLGLVPRQSSSGGKERLGGISKRGDGYLRWLLVAGAMAVVRYAKRHGTRRPWLVQLLARRPAKTAIVALANKMARVAWALMISKEVYREPSLKAA

SEQ ID NO: 512611 - protein, 350 aa, unidentified
MTDSREPVIVGVDTHGQNHVAVLLDRLGRRLGKIEIPAERAGYQKLLSWCCAQGPLESAGVEGTGSYGAGLARFLSDKGVEVFEVRRPKRQYKGKSDSIDAEAAARSVLAKESTGLPKHKTGIVESIRILRLLRSSAVKARTQTGNQMRALVVSAPEDVRKLLRPLKSLDRIQRCARFRPDKGWRPQTVLKKALRALARRWLQLDAEARERERELSSLVQAAAPRLLSQPGIGPESAAKLLVLAGDNGDRLRSDAALAALCGASPLEASSGKRKRHRLNRGGDRQGNNALWTIAMNRLHHHPETRAYARRRRTEGLSDKEILRCLKRYLARRLYPLLLADLNNANSLLLT

SEQ ID NO: 512612 - protein, 348 aa, unidentified
MLHVGLDLSRKRLDYCLLGGDGERVERGAVAPDGDALAGLVRLVELRHGPRAVCAAIESMNGARFVHDVLERCGWEVAIADAQKVKGLAPLACKTDRIDAWVLAELSRRELVPAIWLPSFERRQERERARFRLYLVRHRSSLKQRVHSQLMAFGHSCAVSDLFGRQGRELLERLVFPEPWRASVLCAVAMIDDLERQIDGIESELKALGACHPYVPLLLTVPGISWVLGYTIAAEIGDISRFASPKKLCGYTGLCPRVYQSGGSDRRGPLAKHGPKYLRWALMVAATNAAKHPLYRERYQHTKQRLGKQRGPKVAQIQLARTLAEAIWHMLTRNQTFAPAGAPLPLAA

SEQ ID NO: 512613 - protein, 320 aa, unidentified
MKRLSVGVDVSKKTLDVAYWAQDENASVFAGKFANNHKGFQTIQQKIEERGETIGATVIHLVMEPSGGYEQPFAHFAHQAEWKVSLPNPLHPKRWAESQGKRGKTDPQDARNLAHFGFVNDPLTWKPLPPEVEQLNHLLDRLDNLKKMLSQDKNRAQSAEYHVNGDKAVSDNMKEVVAFLEQQIQNFQEIIKEHLKAHPHLKKQRKLLLTVSGVGDKNVLYILVMMHRWGVLTDGKGDNKGLVAYLGLDPKHHESGTSVRKRSGISRQGNKAMRSKLYMSALGGIKAKNSPLTTFYKRLVVEKGKPKKVALVAASRRILV

SEQ ID NO: 512614 - protein, 456 aa, unidentified
MSKLSKPNVGLAEARPFGGMSPVHADAAGVDLGAHEIMVCVQGGDSTQLVRSFGSYTVDLQAIGTWLEEHSVETVAMESTGVYWIPLFEELERRGFQCHLISSRSLRRVPGRKSDVVDCQWIQTLHSYGLLERSFRPEADLVALRTLLRHRAQLIQHRAPHILHMQKALLQMNIQLSQALSDVSGTTGQAMIRAIVAGERDPHKLAALRNYRCKKDEAEIAKALTGTWREEHLFVLQQSLALYDFYTKQLEECDAEIERRYSLIRPDWEQTDFNEPPPGKRNSHSKNAPKDVQVRKHLKRICGVDIIAVQGVSASLAQTIVIEVGTDMSKFPNEKHFCSWLGLAPKNEISGGKVLKNKTLKTNNRAGQAFRMAAGSVMRADCAFGAFYRRQKARLGPAQAAVATAHLIARIVYRMLKYKVEYEPLSLAQYEQNYREQQLKYLQKKAAKFGFQLTPT

SEQ ID NO: 512615 - protein, 396 aa, unidentified
MERISTLGIDLAKSSFVVCGLDKAGKQVLRREFSRHKFAEFIAKTEACDVFMEACGSAHFWGRRLREAGHSVNLIAAQKVVGFRKCNKNDRNDAHAIAIAGKCPGMEFVPVKSVEQQDVQSLVRIRARLIYRQTALVNEMRGLLAEYGITIGEGITPFRSKMSEMANGSIGDFPGITPTIFHSVISANEELLDITNRVERHEALIHELTKKDDRCRRIQEIPGVGPLSAATVIASVTNPDAYGNGRQFAASIGLTPKHVQTGGKDSKPVQLGISKRGDPVLRSLLVQGGMTVAKACKMRMDKAAKEKSLEKNAENQTSPSSSLGQHPCRERAKKKAKKKIITPGREEWMRRMISEKGMQKTAVAIANRNARIILSLLKSGDHYLPLGQQWPSGAVC

SEQ ID NO: 512616 - protein, 385 aa, unidentified
MRSVGLDLGARHIAWCEVVDGVVTRRGSVGRLSELEAILGPDTAPAQVAFEASREGWHVHDVLLGWGKKPWMLDTTRIRRIGVGHHGRKNDAIDAEAIAMALDAGRFPVAHVLSPERRALRAKLSVRSELVDTRARQVTVLRGLARAAGVLIGTSSTDGFVQKLADTPLDDATRALMAPLVATLTVVQEQLAAMDVEIGQIAKTDDIIKLLATAPGVALIVAATFVSVIDEAKRFRNAHAVSAYLGLVPGETTTGGKQRLGSITKHGNTHARKMLVQSAWQILRAGKPEDPLHRWASDLVKTRGKKIAAVALARKLAGVLWAMWRDGTFYDPGSHAQESTRGLRASAQSQALRAEAMKRVAKKIKRRESTPSRATRAKTSRALPV

SEQ ID NO: 512617 - protein, 376 aa, unidentified
MLTRQPNQMRWRMTGTPSAHVRQAGARCLCSGARGGPDADRRRFGYSSSSDHVRLCGSARWGFSAGGDSSRDPEAFREWLGQFGRKRCEFALEGTTGWRFVVEELERAGMRAHLAEPAETRARRGPKRRAKTDRADARLLRDLLLAENLPESWIPPAHLADLRSTVRLRKTLVAARDGWRRRIAAVLFHHGLPEGPNVMTFAGRLYAEKAELPLAGRQVIDVALRMIDTLDAEVDTINAQLSRLARHQFGCQVLQRQWGIGPVLSAVILAELGDTRRFSSSRQAVRFAGIDVTVAESDAHRTRGHLSRQGSPVLRWALYEAAGQAFRKASPDHEYYLEAKARLGAKRARVAVSRRILRRITHELANHGDAPFAEAA

SEQ ID NO: 512618 - protein, 338 aa, unidentified
MALYCGIDLHSRDCWLAMLDERLEVIWETKVGNDLETILQLLDPHREVLEGVAVESTFNWYWLVDGLMDVGHRVHLTNTWAVKQYEGLKYTDDRHDARWLAHLLALGILPEGYIYPKEERSARDLMRRRSFLVRKRTSFLLAMRGAFECRTGMRISSNDLRKWKTEDVEAHVEDPMAAFGITCLLEPMHALSAQIKKIEKEALARGRLRPEFLPLETVWGIGKILGLTIMYEVGEVARFHKVGNFTSYCRLVNTARLSAGKRKGSGNRKNGNPYLSWAFSEAAHHAVKHHKEAQKYFQRKRAKTNGIIAIRALAHKLARASYHVIRDGVDFDPEKTFG

SEQ ID NO: 512619 - protein, 363 aa, unidentified
MRYHGMDLHKKYSTISVRNEEGTEEKFVRAQADIKGYVASLGSEDAVVLEASGGALYWAEKIQSQGASCVVIDAYRFRIIRDSWQKTDKRDAANLSLALWLASRSGEMKLPEVWRPGPVVRELRRLFGLYELLNKQIRQLKNEIHGVLLDNGVRDRALGKRLADNPAEAEEHLKTVELSAASRVCVMTSLKLLKSVQEQKEALTHEIYQAGRPLEAEVKLLISIRGVTPLLALAFLSEVGDVTRFRSARQLHSYLGVVPTVRSSGGVTHSGAINRRSRGLTRSLFTQAVIHLVDSSPVLAHFYHDLVIRKGYGRARIALLRKTFSMMRRMLLSHETYRWLEPRLYQKKLNDYTKKMKKEENAA

SEQ ID NO: 512620 - protein, 365 aa, unidentified
MQKISTMRTSGKKILKGQLTIGLDLGDRSSSYCVLDEAGEIILEQQVPTTGEAVKQTFKRMPRSRIAMETGTHSPWMSRVLTELGHEVIVAHAQKVRLIVKSRRKDDRMDARTLARLARIDPELLTPVQHRSAQAQLHLTEVRARAGLVRARTALINAARGLVKSYGERLQKCGAFQVSREIGSGLSAGLREALQPLLQEVESLNEHIKEYDRRIEQMAREKYPETALLKQVKGVGDLIATAYVLTIEDPHRFRKSRDAGCFVGLQPGRRNSGESEPQMHISKEGDEYLRKLLVQGAHYILGPFGEDSDLRRWGQKLAARGGKNGKKRAVVAVARKLAVLLHRLWVSGEVYEPLRNSQKAMTVAA

SEQ ID NO: 512621 - protein, 391 aa, unidentified
MIYVGIDVAKDKHDCFITNSDGEVLFKAFTITNNLDGFNDLYQKIETVMKDITKVKVGLEATEHYSYNLLGYLIDKGLPTYVINPLHTNLYRKSLSLRQTKTDKVDARTIASMLMSDVNLKSYSDTSYHNEELKSLTRYRFDKVKERAKLKSSVSRLICILFPELEKLVPTLHMASVYALLSEFPGAKQVANAHLTRLTNLLSEASKGRYSKDTAITFRDAARTSIGSNMPAKSLELKHTIKLIKELDSEIDEIENEIKIIMDEINSPILSIPGINYRMGAMIIAEIGDFSRFDSPDKILAYAGFSPSTYQSGHLYGAYAHMEKRGSRYLRYALYNAAKYVCHWDPTFTAYLAKKRAEGKHYNVAISHAVKKLIRVIYHLEKTNQQYIKAS

SEQ ID NO: 512622 - protein, 340 aa, unidentified
MNHYAGIDVSLEASSVCVIDGSGKIVREAKVASEPEALIAWFGSLGLSLTRIGLEAGPLSQWLYAALRDAGLAVELLETRHVRNAFKIMPVKTDRKDAHGIAELMRLGWFRPVHCKSMEAQETRAMLTARKLVQKALHEVEMSLRGVLRGFGLKVGKVAPAQFEARIRELVEGHPNLETIATSMLAVRATLRRELNGFEKWLRALARSDTRARLLMSTPGVGTIVALTYAAAIDDPARFKSSKTVGAHFGLTPTKYQSGETDRDGRISKIGDGSVRAALYESAHIILTKPVKGCADLKSWAMRIAKRAGMKKAKVALARKLAVIMHRMLADGTTFTTQPA

SEQ ID NO: 512623 - protein, 311 aa, unidentified
MSDKTTVGIDVSKFALDVWIDTSERLIHLENSASGIAQLLNEFEGLHISGVIMEATSRYHSLAESMLISAGLPVAVINPRQIKNFARAMGKVAKSDPIDARIICEYGRRMKPEFRPVRDKELQDMALLLTRRRQLVQNRVMEITRLQEKSGAWIEKGIMEHIAWLNVQIDALDKEIKDQLNQNAALSPKRKMLEKVKGIGPVTQAAILSQLPELGHLNRRQISALVGVCPYDRDSGQLRGKRAIWGGRSGLRATLYMAMLSAVRYNPRIKDFYTSLVARGKPKKVAITACIRKFITILNAMFRDQKDWVYS

SEQ ID NO: 512624 - protein, 388 aa, unidentified
MYYVGIDIAKYKHDCFIFTSEGEIVLESFTFENTREGFYKLKLVLDALDYSQKIKIGLEAAGIYGKNLKLFLSSIGYDFDELNPLQVKRFTNALSNRKTKTDKIDASQIARFVSTGAPRTYVYSSYHTEALKQLTRARNSLIDERSKHQTVLTGILDVEFPEFKGFFNNKFTDTALYLLNKYKTVKRISKLSHNDCVLLHNKSRVISTSRFEELRESAKNTCGHHFDYNDSLISANLQIIKCLNNEIDKIEKEINSIMSTINSPVVSIPGISAISAASIIGEFGDFSRFDNAKQLCAFCGVEPSIYQSGTSYHEGKMVKHGSSNLRRTLFNVVPYIIMHNETFKTFYDKKSSEGKAYRVAQSHVVKKLLRVIFTLEMTGSTFAPSKLY

SEQ ID NO: 512625 - protein, 317 aa, unidentified
MDVAFKSFVGIDIAKRTLDVHVLPERRSLKQPNDAKGRGQLREKLPSPGECLIVVEATGGYERALVAELLDAGHQVAVVNPRQVRDFAKACGILAKTDRIDAAVLARFGQAVEPRTQAKIPEKQLELQDLVVRRRQLVELRTAEMNRTENVASQFVKKSLQESVDALNKQIRRFEKRIAALVQSDDEWKQKLEIVQSAPGVGPATSATLIAEVPELGQLSRRKISALVGLAPFNRDSGEFRGRRAIRGGRTAVRCTLYMATLNARRFNPVIKAFADRLASLGKKPKVIITACMRKLLVILNTMVKNRSHWNPAISAT

SEQ ID NO: 512626 - protein, 370 aa, unidentified
MPKVRSWVGLDVHAVRVVACVVDAESGEMTVRRLPGQACEVVAFCAGLPGPVRVAYEAGPTGFALARALSAAGIECVVAAPGKIERPAQDRVKTDQRDAERLVRLLMIGGLPAVRVPTPEEEALRDLVRAREDVREDLMRARHRLSKLLLRHDVRYRDTVSRWGERHRRWLAQVELREPAAELTMSDYIGAIDQLEIRRETIERAIDGLIPTSPWAQTIARLRCLRGVDTLTAVGLCAEIGDFARFEHPRQLMSYLGLVPSEHSSGETRRQGQLTKTGSRHARRLLIEAAWHYRRAPRLGTALERRQHGQPQAITAIAWKAQQRLHHVWRRLDTKRAKRKTLVAAAVARQLAGYIWAIATADPDHSTPTT

SEQ ID NO: 512627 - protein, 338 aa, unidentified
MAVKTIGLDIAKHVFQVHGADATGKAVLKKRLRREQVTEFFGSIPRCEVAMEATRGAHYWARVLATFGHEVKLIAPQFVKPYVRGQKNDMQDAAAICEAASRPEMRFVPQKSVEQQDMQMLHRIRSRLVGNRTQLGNQIRGLLAEYGIIIPLHLHQLRKELIELTSEPHPQLTPFAQELFGSLYAELCSIDERIAAIERRIQQVFHREEACQKIAEIEGVGPVIATAIVAAIADGKAFRNGRQLAAWLGLVPRQHSSGDKQRLLGISKRGDPYLRMLLIHGARSVVYRSVTKTDSRSRWVADKQMRLGTTKACVAVANKNARIIWALLTKDEPYRRAA

SEQ ID NO: 512628 - protein, 421 aa, unidentified
MSDDRCRLGSDDVVIGLDLASAEHQAVVVTAAGKRLTRFRMPHTRAGLEELLRRTTPAALGRAGGARVFAFEATGHLWEAVAYVLRVRGERYVVVNPLATFRVREARQLSREKTDLTDAEQIAELCRTGLVTRTQLEARPYLALRRAWGEYARLREERARLKVLVAHQLYGLFPEFLRVWADLLQPGALAVLRTGLTHAAMAALPLTEFVAQARAHGAGHRLWRDTLAQVHRAAAQTMACPDGLDVLAREVQRAVARIDMLTAHMTAVAAEIDSMLAELEEVPSLRPIPGLGWTSVAGLLAPVGAITKYHHGRQLIKLAGTNPSRRDSGQTVGHGQRMSHRGRAGLREVLYLATISCLQHNPRIRAHDDRLIQRPDRPLPKMQALGACMNKLLLYAFAVMHRREAFQLDHDWPRTTMARVA

SEQ ID NO: 512629 - protein, 439 aa, unidentified
MPRYVGLDIHKQFIEACFIDEDGKPLGRCRIAVSRESIQTFVPKCLQSCDRVVMEATTNTWEIAELIRPRVAKVAIANPLKVKAIAEAKTKTDKVDAEVLAQLLRCNFLPEVWIPDGATRLLREMGAHRAGLAADQTRIKNRIQSLLAQRLIPIPVRVLFNGCGRNWLSHLELDTQDRARIDGYLRVLDQIESEETNLRKALAQLSFDNGQIRLLMTLPGVGPAGAQALCAALGDWRRFKDGAHAASYLGLTPSTRQSAGHCYHGSITKAGNSLARWLLTQAAGQVSEHPGPLGVFFRRIRKRKNYNVAVVATARKLVTIAFLMLKNNEPYRYSLPAPTQRKLSAFRVEATGSRRPKSKLRLPMQRREPETRVQSIPSLDEVYLSENLPPITKAEALPRGEQRMLQQMGIDHLPQRLQTVQTRTYRSTKTAHAQKRKHL

SEQ ID NO: 512630 - protein, 353 aa, unidentified
MAHPQPPRVTIGVDTHKDLHVAAARDQLGRRLATTMAPATSAGYAQLLAWAHALGEVQAWGVEGTGSYGAGLARFLRCHRQRVLEVNRPDRATRRRRGKSDPVDADAAARTVQAGEATGVPKAQDGVVEMLRALRVARQTAVKARTQAINAIKALLVTAPSELREQLDGLATPKLVGAAAGLAPGTLTTPTAATMLALRGLAQRYQHLDAEISLLTSRLDQLTTQTAPALRELLGVGPDSAAALLIAAGDNPGRLRSEAAFAALCGASPVEASSGKTRRHRLNRGGDRQANAALHRVVIVRLRWHQPTRDYVARRTAEGKTKKEILRCLKRYVAREVFAVLPQPGEQPLVAAA

SEQ ID NO: 512631 - protein, 349 aa, unidentified
MTMVGGFDVHRQQITFDYVDDDGLVHWGQIRPATRKTLRCWLGEHCPDGDGEFALEGCTGWRYVVEELAAAGMVAHLGDPAETAARRGPKKRAKTDRADARLLRTLLVEGRFPESWIPPAHVVEMRTLGRLYCVLMDERRTWQQRIHAQLFHQGCPPIRALLSQRSRDALAAAELSAVGRQYVDTALRRIDELSAEIEPLRAQLASFARRQPGCRALQERHYGIGWLCAAIIWAEIGDARRFGSSDQLVRFAGLDVTVYSSDSKRAPGHLSRQGSPQLRWAAFEAAKCAARPGSPDYTYYHQVAARPHSGKNPTLAVERKLLRRCYHTLRELGDAALAPPVAEPQEVPA

SEQ ID NO: 512632 - protein, 343 aa, unidentified
MTIRLLGIDISKNTFQLHGADDTGKAVLKKRLLRDQLTAYVANLPKCKIVMESCGGANYWARVFIRSGHSVQLISPQFVKPFVKTNKNDANDAQAIVEAASRPSMHFVPIKQVEQQDIQSIHRVRSRMVKNRTALINEIRGLNLEYGITIAPGAAKVKRSLTAIIADNTNELTPLSRDWLQDLYDELVGIEARLKKWDKKIRQLCRQNETCCRILKIPGVGELTATAMVAAVPNANEFKNGRHMSAWLGLVPRQSSSGDKHVLLGISKRGDRYLRTLLIHGARSALSHYKNTDNDYGRWLMEKRARLSFNKAAVALANKNARIIWSLLNSGEEFNCDVQTAAT

SEQ ID NO: 512633 - protein, 413 aa, unidentified
MDVVVSRCAGIDIGKAEVVVCLRVPGSRGKRVSQVQTFSAVAGEINRLADWLADHQVSHVVMEATGQYWKPVWDVLAERGFELMLVNARHVKMVPGRKTDVADATWLAELLEHGLLRGSFVPPRVIRELRDLTRYRKRLVQAHTSEGQRIAKILEDAGIKLDSVVSHLLGVSGRAMLRALIAGQRDPQQLAALARGRLRTKIPALAAALEGRFAEHHAIMIALALDHFEYLERSVVRLDERIDELMASHSVARARLDTIPGVGKRAAEVIIAEIGADMSVFPTAGHLASWARMCPGNNITGGKRKSGTTGGGNRWLRETLVECAWAASRQRDSYLAAQFWRLARRIGKKKAALAVGHSILVIAWHVLHDNATYTELGADWFIRRIDNNTRRRDRLITELQGMGYRVSLDKAAS

SEQ ID NO: 512634 - protein, 595 aa, unidentified
MSKVQRRTLATACHRRHREPGDVLMTTATAAQCCTRIGVGFDTARYAHHVTFLHADLQAAGKPFYFSETAQGYQQLEQAFQQVAQRHPEAHFHIRIDAAGQYAANLEAFLRRLPYATTISVGEPARNRKYREAIYPKRKADPVDSLAMARFALHEHPPATAELPPAMQALREIASRLESQTRQSTRLTNQLHNLLARVFPELALLAKNLQAQWVVLLLEKYPTAEHVARAQLRSLTAIPHLTADKAQALQAAARASVASFRGPLAQQLVTNLVRSLRQSQAAEKELHDLLVQQYLALPQSNLINTITGIGDATAAILTAKILDINRFATPEKLDNYFGVFPEEDSSGTDKQGRPKAPGQLVMSRKGNDLVRKYLWLAAGTACQHNPAVRALYHRLAARGISGGVAIGHCMRKLLHLVFAVWKTGKPFNPDHYPWENPPARPGNAEKAAGHSQGTGPAEKVVTAATATVAAGAPPVKQPTQAPAPRTAPVDFAALRQRVTMEQVLHHIGILGELRGSGPQRRGRCPIHAQPGDRRRTFSVNLQKNVFQCFDPECNAHGNVLDFWAALRGLPLVQAARQLADTFDVCNAPDTEKRNP

SEQ ID NO: 512635 - protein, 411 aa, unidentified
MQYFIRKEGMPMLSIGIDVSKGKSTVCGMKPGGEIVYTPFEIQHTREGMSDLVSLLRSSGEEVRAVLESTGSYHCPVVTALLENGIFVSVVNSLRMKRFCSQSIRKVKTDRIDAMQIALYGLAYWQELQPAKLPEDTYRELQLLARQYYQMTSLLIKAKVDFNAICDQVLPGMQELMNDHAGRRKLSDFVLRYHHTTHILEMGETRFRKDYCKWAEKKGYRNCERMAALIFATAQNGIPVLPNAPSTQIVITEAIRVLHTVEASRDAILTQMQALAKTLPEYSLVREMPCIGDTLAPRLIAEIGDVRRFHSKRALIAYAGIDAPPYQSGKFCANNRHISKRGNRYLRKTGYEVMQSYVMHKPANDPIFTFIEKKRSEGKCGKLAMVAGLNKFLRVYYGKVTELYRSLPAIE

SEQ ID NO: 512636 - protein, 414 aa, unidentified
MDIVYRCCAGLDMHKKTVVACVRRVDAAGHVCQDVRTFGTMTCHLLALCDWLVEQGVEQVAMESTGVYWKPVFNILESHLAVLLVNAQHIKQVPGRKTDVKDCAWIAQLLQHGLLRASFVPPPPIRELRDLTRQRAQLVAEKSAAANRIQKVLEDANIKLACVASDVLGVSGRDMLEAIIAGEEDAEKLANKARRRMRQKIPQLQTALQGRVTAHHRFQLRILLDHVTHLEALIGRLGGRIEDIMVPFAEAAERLTTIPGVEQRTAEILIAEVGTDMNQFPTAEHLASWAGMCPGNNESAGKRKSGRTTKGSRWLRQALTQAAWAASHTKDTYLAAQFRRLAARRGKKRALVALGHTVVVIAYHLLKQGTTYHELGGDFLERLNPERLTRQLVKRLEKLGHRVKLEPMPDAACA

SEQ ID NO: 512637 - protein, 349 aa, unidentified
MPILADQVDVVIAVDAHTDSHTAALISPLGAVWGELTVPADGHALHRLTSWVERTVDAPRRHWVIDGTRSHGVGLLRPLRKAGERVAEAPRLKRGSRRGRGKSDALDAIAIGRAVLAAPTLAEPRADGIREALRLLLVTRRHYSDYRTATVNLLKSLILTTDEQVRDQLRRKTTTAQVRHLLTLTVPVDSPYHIRISVERMIDLARRIADLDKTLAQNKKELTALVKQSCAVLLEQVGVGPVTAAALLCAWSHHGRVRDEAAFASLAGVNPIPASSGRTVRHRLNRGGDRTLNAALHTIALVRRRVDPTTQNYVARRTTDGKSSREINRSLKRYLSRSLFRIMEATATL

SEQ ID NO: 512638 - protein, 450 aa, unidentified
MSNGNGVSRGDRNRNARLDRLRALVPVTNAIVGIDLADKKQMVVVCDHDSKVLARRTYRCRTWDLGTALDWAHERAAAKGFAGMTVSCEPTGHRWRVLAQLAADRSMPFVCVQPAVSSWSRRAEDLTHDKTDEKDAVLIARLTAQLRCYEPEPVDETWGRLRHLGARREQLITESSGQVQQMRGLLECVWPAALECAQQPFRSRTWIAALTVIVDRDGGQFDRTRRLGLARFEQAVLREISKRGGQKPCRRIARSVFAALADPAGVIAHRAGALERVQLLLEDWRTAHHRLADTEQRMIGVLDELGLTGLVTSITGISAVGAAAILAQTGDPRRFATARALVKHAGLAPREKLSGTFTGRTKLTGQGRPGLRLAAWRAVWGAQRANPVYGARYRHLTTREHNRLKPTQAQTVIAAAILRHLHAVISTGQAWDPSIATHGTRSTIRTTAAA

SEQ ID NO: 512639 - protein, 377 aa, unidentified
MSKNTLYVGLDTDKKHIDVALAEALPGGEVRYWGQVANEASAVARLVKRLQAGGRQLAMCYEAGPCGYGLYRLLNGKPAVRCRVVAPSMTPRRPGDRVKTNRRDSIALARLLRAGELTAVWVPDATHEAMRDLVRARGAGVADLVRCRQRIAGFLLRQDIRYAGKPWTKKHRVWLGQLVPALALPAHRLMLGEALQALDDTTARRDRLTDHIAELVPDWSLAWLVDALQALRGFALINAATLAVEIGDPRRFAKPSQLMAYLGLVPSEHSTGNSVRRGGLTKTGNGHTRKALIEAAWTYSRPPRGPLDGSRYAPAVAAIATKACHRLSLRYRRLTNTRGKRPVIAVAAIARELSGFVWAIAHAAGPAAATPERPARR

SEQ ID NO: 512640 - protein, 348 aa, unidentified
MALTIVETRAVTGGVDTHADVHVAAALDPIGGLLGVGEFPATPAGYAGLLGWLRGFGTVCLVGIEGTGSYGAGLARHMATAGVRVVEVDRSDRQDRRRQGKSDPLDAVSAARAAQSGRARGAPKGRDGQVEAIRALMVAKRTARSERTQTINQARALVLTGPDDLRTRFSRHTPAGLVAQLAALRPRPGDVVGYATRISLRELGRRAQFLDSQLERLDELIVPLVTARAPGLLALHGVGPDTAALLLIAAGDHPGRLRSEAAWAHLCAAAPIPASSGKVTRHRLNPGGDRQANHALWRIVITRMGSHPPTRAYVERRSAEGLSKTEIIRCLKRYAAREVYPHLRPGAG

SEQ ID NO: 512641 - protein, 439 aa, unidentified
MSCRLSTDPLGRSKVFSEARVDHERGRGSEMLFIGDDWAEAHHDIELEDDSGRLLVRRRLPEGLAGMTTLHELVAEHLDPNVEPDQVMVGIETERGPWVQALLAAGYLVYAVNPMQVARYRERHSTSGAKSDAGDAHLLAEMVRVDRAHHRPVAGDSDIAEHVKVAARAHQTMIWSRVRQVNALRSLLREYYPAALVAFGADLAGRDALAVLAAAPTPEQGRRLSQARIESLLGKGGRQRNLAATAAAMKTALAGDQLTARPGVVPAYAASASALIAVLTTMVAQTEVLAGQVEQGFGQHPDVEIYRSQPGLGVILGARVLAEFGDDPHRYADAKHRKNYSGMSPITKASGTKRVVLARYARNRRLGDALFLQAFAALNASPGAREFYDRQRARGATHYQALRTLANRLVGILHGCIRTQSCYDEHQAWHTEQEQPTAA

SEQ ID NO: 512642 - protein, 400 aa, unidentified
MRVIGMDIHRSFAQVAILEDGQIVRELRVDLVHGPLVNFAKTLSLDDEVVIEATGNSAAVERLMRPYVKRVAVANSRLVRAIAYARVKTDKIDATILARLHAAGFLPEVWVADEETLNRRRQIAERMGILEQLVRLKGRIQAILHSNLIPKYSGHLFGKTGRKWLDSLPLPDEERAMLGRLVIELERVSTQMAELDRVLAQQALDDPRARRLMTIPGISSIVASTVLASIGDVSRFPSAQKLSSYFGLTPKVRQSGDQPARHGRISKQGNGDARKMLVEAAWSAKTAPGPLRAFFVRIQNKRGAAAAAVATARKLAVMIWHMLSGDAEYHFARPAFTAMKLRKVALKAGAPREYGKAGPGHDYWIKEIRHQEMNYVERAERAYERMVAAWHEKPKKTSAR

SEQ ID NO: 512643 - protein, 468 aa, unidentified
MKNYYLGIDVSKGYSDFVLLNEKKQTVLESFQLDDTFEGHNKLFKILSEFFTQQPDTKIFAAVESTGGYENNWYHLLHKYQGQLNLSVARLNPYGVNYNSKADLKRIKTDAISAVSIAEYLISHPEKVSYQTEDPFASLRRQWTFIKMLTKQRVQLLNQLESLLYVANTEILYHCRNKVNLWTLKLLKQYPTAKHLAKARVSTISKIPYITETLAKELINKAKHSVASETDETIAEIITATVNQILSLRKTICLQVKKLQSSCNLPEVALLKSFSGIADYSAVGLIIEIGSVERFSSVKKLACFFGVHPVFSQSGDKISGYRMSKRGRKEPRQILLNVARFAIVHNPLIKEIYIDHLKKGMSKMAAIGAIMHKILRIVYGILKNNTPFNPEIDRANRLRNLSKKKDESLVVNKMLEPIDCKAPVSRRQLKKRKEQEKSQNLKPLNAEQIVSVFAGSDSRSFPFASTQT

SEQ ID NO: 512644 - protein, 429 aa, unidentified
MKIIYPRVCGIDVHKKFIVAVICISESVEPVYLKKRFSTFHNDLIRFRDWLIQNDCQNVCMESTGKYYIPVYNILESHISNIVVANPKWVRAVKGEKDDDKDAKWIADLFKLGIVKSSFIPQKDFRILRELTRYKYKLVNMRSSEKNRYQNALTSGNCKLDMVFTDVFGKSASNIIDLILSDNPYTDEDILSKVHKNCKASPDMILNSINGTDLTPVQKSRIELVNNHIKQLSSNIQRLDKLIDLMIEPYEDYISFLCQIPGVSRNSAITILSEIGVDMNQFTSTRRLTSWAGLTPSSNQSAGKKKSVRISRAGVYLKPCLVEVAHATVKDTNHPYYANKFNKISKRRGKKRAYIAIARKILVAAYHMLFTGEIWNPADLAEVETPVEQRIKYVKNNLKSDIKQLLDIGLTVEELTLMIQQNANNIATQ

SEQ ID NO: 512645 - protein, 352 aa, unidentified
MLIIGCDFHPRFQQIAYVDQESEEYGERRLSHPEEAALFYRCLAGKPVRIGLEATGNYRWFRCLLAELGHEMLLGDPSAIHATIPRRQQTDKRDARHILRLLVEDRFPAIWQPPVENEQTRQLLLHRCRLVQIRTRVKNQLDALAKNEGMLGPRVWRQKRRQQLEALPLRGWYAQRRKDLLALLDEFDQRIQPLDQAVSKAAAENADAQKLMTHPGVGPIVALAYVLAIGDWQRFPRGKQVASYLGLIPEEASSADKRRLGHISKQGNGLVRWLLVEAATTTQRYDTGWHRQYVRLSIQKHHGVAKVAIAHKLAVRLYWMLRSGQDYEQVKERGSHAGQSGFPTGRCERPKG

SEQ ID NO: 512646 - protein, 420 aa, unidentified
MSVQEAAVSLLQRVLFYVGIDWAAETHAVCVLDATGRIRAQFTIGHTAAGFADLLRRLARLSGDPAEVAVGIERPDGRLVDVLLEAGYPVVPVSPNAIKTWRDGEVLSGAKSDAGDAAVIAEYLRLRAHRLQPATPYTAETKALRTVVRTREDVVDMRVAAANQLSALLDAHWPGAKAIFADVESAIALAFLTRYPTYPSAQHLGEKRLRAFCVKHGYSGRRSAAELLTRLRAAPAGSTDEALTDAVRDAVLAQVAVLTALTAAEKNLSRSVIAHLGEHPDAAIFTSLPRSGQINAAQVLAEWGDSRAAYDSPDAVAALAGVTPVTKASGKYRAVHFRWACNKHLRKAITCFADNSRHASPWAADVYARAIARGHDHPHAVRVLARAWIRVIYRCWIDGVPYDPNRHGNAGKLRETATAA

SEQ ID NO: 512647 - protein, 454 aa, unidentified
MDVTWRLYESSGWVLDGSLVNRLPNPFAGIVAREWLAAWTSGWGVAEERFALLLEALPVPSYGNGTSVRRCGMLTLVIGLDPHKASNTIAVLDAEETLVARRRFENTADGLVAMLDAVSGWSERIWAVEGANGIGRSVAQRLVAAGEMVVDVPAKLATRVRVYSTGHGTKTDDIHAVAIARAALHSRRLRMVRPDDENVALKLLSDRRHELVGSRTQSVCRLHRLLRELVPGGMPRALTAERAEALVTGLEVSDPASLMRVELALDHIEDMKRFDRRIDDVTLKIHAAVKASGTTVTRIYGVVGAVSAGLILGEVGDISRFPTRNHFASDTGTAPVAVSSGDQNRHRLNRAGNRRLNHAIHIAAIAQIRYDNPGRAYFRRKLGEGKSRREALRCLKRRISDAVWRQLQLDRETDQHQDRSWPRWPSSRGDFPSYRSPDTPRQNGQPKKVKTMPA

SEQ ID NO: 512648 - protein, 453 aa, unidentified
MAQGSGLTRGDRNRNDRIAALRAVVRRDRAVLAVDLGEDKQVAALVDHEGRVLARKTVKAKAYQLGELLAWAAGKAAAAGFAGLTVACEPTGHRWKAVMGLADAAGHGFVCVQSLAVARAREGDDYTRDKTDHRDAYLIGKLVIRLECYLPERADEIWARLRHLGARRFALVADVISCMQQVSDLLACAWPAPLGVAARPLEATTWLAAMGVVADRCNGDPARLRKMGYDKFVAAVRRELPRWGAKSIYHKIVKGLWEALADAGGVIAQRRGALERVHLLMGDWRSLLARLADTEGRMTAVLDELGLTELVTSIGGLSAVGDAVILAETGDLTRFASARSVVKHAGLNPSEHTSATLAGKTRISHRGRPGLRTAAWRAVWGGMRHNRVLHARHAHLTGRPGNRLSDGQARAACAATLLRWLYAVVTTRQMWDPRIAAGTLPARRGGVTTAAAA

SEQ ID NO: 512649 - protein, 341 aa, unidentified
MGEVSTIGLDIAKSVFQVHGVDVAGSVVIRKRVSRAKLLEYFGGLPRCLVGIEACPSAHHWGRELQALGHRVRLIAPSYVKAYLKRSKNDANDAAAICEAVTRPSMRFVPIKTKEQQTVLMLHRTRQLLVRQRTMLSNALRGHLAELGIVSAKGRNGTAELLRIIADRRLSPAVCGILEVLARQYGAIGTEIASIDKNIMVLHRACEASRRLAEIPGIGPISATALVAEIGDWKAFGSGRSLAAWIGLVPKQYTTGGKDKLGRITKQGNRYLRWLLVVGAMAVIRYARNHGTEKRPWLGRLMERRPTKVAAVALANKIARMAWAIMVRDERYKEPKPLLAA

SEQ ID NO: 512650 - protein, 422 aa, unidentified
MSQSEFTAYVAIDWADRKHYWQLADADGQHGEHGHLLNTPEAIDSWVAGLLARFSDGPVAVCLEQSRGSLVYQLGKYAQLVLFPVHPAASFRQAFFPSGAKGDPSDAGLLLEMLLHHRHRLRRLEPDTAETRLLGMLIELRRRLVDERTRESNRLTAWLKMYFPQSLNWIDNIDSPLGCDFLDRWPTLQQLQRAHAETIERFFREHNSRSQARIDERMEAICKAVPAVQDTAILQAGAAATSSLVALLKALNGAIASVDPLIAQQVAQHPEACLFAELPGAGPVLLPRLIVAFGTRRERFQSASELAAYSGIAPVTKQSGKSKSVHFRFACPKFLRQTFHEFAAHSIARSQWARQFYQLLRDRGMGHHAAVRALAFKWIRVLFRCWQDRTPYDEARYLQALEQRRALRNSTPESTPAAERGD

SEQ ID NO: 512651 - protein, 350 aa, unidentified
MYFAGLDAHLKYVTVAVLDRLGTIVLETTVSTREPERLLAVLAPFRPLEVVVETCPFWPWLYDLLVPAGIKFHLAHAKRLRAIATAPQKNDRVDARLLARMLLSGLIPEAYPRPGDQRELLRLLRHRTTLVRYRTRLAGRIHSQLHQQRLLLPREQLLRQATRTWLRETAWPHLTTEQQAIVTTHLELIDHLTPLIQALERRIDTAAGANPTAALLATIPGIASYRSLLLAAELSPLSRFPRVEHLASYAGLAPVTRSSGGHTRHGSIPQGANRWVRGALVSAIPSHVRWAPTSPVTRAYAQLTARLGWRVARVAAARKLLRIVYIMLRRGEPWRGAGRLEADVRDEVHA

SEQ ID NO: 512652 - protein, 338 aa, unidentified
MTIVMGLDQHRAQITTEWLDTDTGELGRARVVPAHRESVRRFLSRFSGQELEVALEATTGWRFVVEELRAVGAEVHLAEPAETAARRGSKKRAKTDRADARHLRELLMVGRLPESWIPPDHLLDLRARVRLRHTLSQQRGEWQQRIQAVLYHHGFAQRRQLMSGEGRAWLAGLALSATAREQIEVAIAMVDALDLQLAPIDSELRAYARRQSGCRALMAHYGIGALTAVTILAELGDARRFSSSRHAVRYAGMDITVHQSDQRRAPGHLSRQGPPALRWALFEAAQVARRPTSPDRDYYEQAAERLGGNRACLSVARRLLKRSYHTLSELGEEALAPA

SEQ ID NO: 512653 - protein, 345 aa, unidentified
MCQIIRIGMDTSKYIFQLHGVDASEQAVLRKRLSRKAMMDFFAKLPPTVVVIEACGAAHHLARELSKLGHTVKLIAPQLVKPYVSRNKNDGRDAEGLCEAASRPRMRYVPVKTAEQQAALMLLGVRDQLVARRTQLSNTIRGHAAEFGLIAAKGLDKLAAFLTAIRHDEGVPALARELFAMLARQYEQVQGELKAIEAKLLAWHRADAMSRRLAQIPGIGPITAAALVMKAPDPHAFRSGRLFAAWLGLTPKDHSTAGKTRLGKITRAGDERLRQLLVVGATSVVKVAKAKKRGYRWLIELLKRKTPKLAAVALANKMARIAWKLMTTGESYNSAAFDAPTAVAA

SEQ ID NO: 512654 - protein, 415 aa, unidentified
MDVLYERCCGLDIHKKLVVACMITPGPKGTPRKEVRSFGTMTADLLVLSDWLEEQGATHVAMESTGVYWKPLFNLLENRFTLVLANAQHIKQVPGRKTDVKDCEWIADLLRHGLLRPSFVPDRPQRELRELTRFRTTLVRERAREVNRIQKTLEGANVKLGDVASDVLGTSGRAILDALVAGTTDTALLADLAHGRLRDKRASLERAVDARMGAHQRFLLAEQLAHYDALNQSVDRVSAEIAERVRPFEPIIQRMDAIPGIGRRVAEVLVAELGTDMSRFPSAAHLASWAGICPGNNESAGKRKSGRIRRGSPWLRTALVEAAHAAVRAKDTYLSAQFRRLAARRGAKKASVAVAHSILVIVWHLLQHDCQYVDLGTNYFDEHDRQQVARRLVKRLEGLGYRVALDSLPPSASAA

SEQ ID NO: 512655 - protein, 363 aa, unidentified
MFTERTSVGLDVHARSVAAAAIDGVTGELFQSRLTPSHEHIRSWVQDLPGPVAVTYEAGPTGFDLYRVLSAAGIRCEVAAPSKLQRPSGDRVKTDARDAVHLARLLRLDQITAVAIPSVDQEAARDLVRAREDCRGDLMRARHRVSKLLVRHGIVYGDGHAWTRRHDTWLRHDAIAQLSTRATRLAFDSDYENVLAVKARRDRLDVAIGEIAAASEFTPLVHRLGCLRGIGTLTGFALAVEIGDWGRFTGNTIGSFVGLVPSEHSSGSSRVQGSITKAGNTHVRRLLVEAAWHHRPGYVVGKTMRERWELAPAAARARGDEGNRRLHQRWVKFIKRRKKSTIANVAIARELAGWCWSLAILEE

SEQ ID NO: 512656 - protein, 412 aa, unidentified
MEVLHPRCAGLDVHKETVVACVRIVSGGEVSRAVRTFETTTVGLIELAEWLEASGCTHVAMEATGVYWKPVWQVLAGGGFELVLANASHVKNVPGRKTDVNDAMWIADLVACGLIKASFVPEQEIQELRGLLRTPKQLVREKASHVQRLQKTLEEANIKLESVLSDVMGRSGRAMLQALIAGETDPAKLAALAHPKVRAPQARLREALRGRVKRHHRFLLGLHLQQVDTLDAAITAIDREVDAGLASFRDAGKQLSTIAGVSELSAQVILSEIGTDMSRFATAAHLRSWAGLCPRNDESAGKRRSTRLRAGAPWLKATLVQCGWAAARTKATYLNAQFVRLRTRRGPKKAVCAVAASILTAAYHMLKDGTCYEDLGAAHFDRRRPDAQARRLVRRLAELGFSVELKSPVAVS

SEQ ID NO: 512657 - protein, 431 aa, unidentified
MNADGKLPSKEVLSPLEYEMSQRSKVCGVDVHKQFFVAALLSQSGGSTLKRFQSDKPGLLEFKEWLLNEHCELVALESTGIYWYSIYSTLEDHIEVIVANPYLIKNIPGRKTDIADAQWIAQLALNDLIKPSRIFPKKQREIRNLTRSREHLVNNRTMLKNRVHRVLESASIKLSSVLADIFGKSGLHIVQGLLAGTDLDTILASIPHEKVRAKEPELRNAIQRNLESSQILIINQCLSLIEQITRRIDELDVEIGAQMHDRENDLKIAMSMPGIGKVSAMTILAEIGNYEEFGTPEKLAAWSGLIPSIYQSADHLKTGPITKRGSPHLRRIMVEVAQAAVKTKNSRLRSFFLQLKLKKGYNKAIVAVARKILCILWAILRKRELYREENVPKKKVSIILKSSPSSRSIQEAIDILGRAGYMIQKLDSSGG

SEQ ID NO: 512658 - protein, 337 aa, unidentified
MDRIPVFVGMDYHQDSVQVCVEGADGSVLANRKCANDIAEIVDVAERCGEVAGAAIESCSGAADLAEELVTRAGWPVDLAHPGFVGRMKQNPDKTDFSDAHLLADLERVGYLPKVWLAPQEVRELRRLMSYRQQLVKERTAVKLRIRSLLRDQRVRPPFARAWTCPWTKWVLETQEVSEQSQWILAQHFRRLEVLKKDILEVEKRTDRQTANDPVVQALLKYKGIGPITAWMFRAHIGRFDRFRTAKQLSRYCGLSPRNASSGNRQADAGLIRAGDPVLRATLVEAAHRLMRLEDRWMQLARNMRARGKPVSLIAAAVANRWVRWLFHQMQPCKIAA

SEQ ID NO: 512659 - protein, 358 aa, unidentified
MNRKAGMSAGQVIGTVGGQQVVGLDIAKSVFQLHTVDMNSGEIVNQQLKRAKVLTYFSNRAPCVIGIEACGGAHHWARQLSALGHSVRLIHAKVVRPFVGGNKTDAADARAIWLAIQQPDTKFVGVKTLQQQATLVLHRQRELLMKMKAMQSNALRGLLYEFGATFARGKNALVGEIEATLEALSGDIPRYVADSLREQVQRIKDLVKDIKTVEARLAQRLRDDEDMQRVAQIPGVGLLTATAAIATMGQAGAFKSGREFCAWLGLVPRQSGTGGKVKLLEISKRGDTYLRTLLIHGARSVLTHAKEPGPWLEQLKARRPANVVIVAQAAKMARAIWAVTAKQEDYQRGHRSVRPQAA

SEQ ID NO: 512660 - protein, 469 aa, unidentified
MTPRREKNLRQPPSRERLQETHPQAAGIDIHTGQHWVAVPPESAPPPGPDHPPKVPAHVRCFGTCTADLIRLADWLEQCGVKTIAMESTGIYWIPLFELLEARGFEVFLVNPRQSRHVPGRPKTDVHDCQWLQRLHSYGLLTASFRPAAQVVVLRSYLRQRQMLIRYAGQHAQHMQKALEEMNVKLPEVVSDVTGATGMGIIRAILGGQRDPLELAKLRDERCKRTQAEIARALYGNWRDEHLFALKQAVALHEFYRQQLRECDLQLQAHLGTFADQRQGRPRPRRQRRCRERRPNDPAFDVGSALYRMAGVDLMLLEGIDANTALVLLSEIGPDVSRFPTVKNFTSWLGLCPQHRGSAGKIRSRRIRHGMSRAGRALRMAVQGSYNAQHVLGAFYRRIRARAGAPKAIVATARKLAERVYWMLKYGADYTCQKIDVYEAAYRERVIKGLARKAAELGYRLEAVSPAGT

SEQ ID NO: 512661 - protein, 375 aa, unidentified
MVHSSEAFVGFDTSKLRHAVAIADGGRTGEVRFLGEIENTAAATAKLVRKLAAKYERLTFCYEAGPTGYGLHRQIKSLGHECVVVAPSLIPKRPGDKVKTNRRDAVGLARLLRANELTAVWVPDGRHEAMRDLTRARETAMLDLRSKRQQVSALLLRQGRSYPESKKTWSKAHMNWLASQKLDYPEQRLVFEEMMLAVRQAQERLERLEQAIRAAVPDWSLAEVVTGLMAMRGLDLISAATFLAEIGDLSRFQTPQQLMAYLGLVPSEESTGDAIKRGPITKAGNRRARRMLVECAWSYQHPPRVGAVKQHKVDAAPPAVREIAWKAQCRLYRRYRALIRKGKLKTVAITAIARELAGFIWAISREIAPTATKTK

SEQ ID NO: 512662 - protein, 340 aa, unidentified
MNEKYVALDVHKASVAIGVRDGRGKYIMESIVETKAVTLLDFVKGLSGTIHLTLEEGTQSAWLYDLLKPHVAECVVCNPRQNKLLEAGNKGDRIDVQKLSELLYLGSLRPVYHGDHGTRALKELVHGYESLVRDRTRVKNRLKAIYRGRGISCEGEQVYHPQKREQWLAQLREPGVRQRADSLYTQLESLNAMVTEGQRQMLAESRRHKAAAILRSLSTLGPISAAMIIATCDTPHRFRTKRQFWTYCGLAVVTRSSSDHYFENGELRKRRQPALTPGLNQNYNRATSGTRQGPFKPFYEQLLAKGLKPDLAKLTLARKIAAIALAMWKKGERFNPKKLK

SEQ ID NO: 512663 - protein, 397 aa, unidentified
MIAVGIDISKGKSTVAILDDDGSIRAHPYEMNHSKAELDALIKYIKAVDDHPIILMEPTSHYHYPVLKAFLEAGLSPSLVNPYLLKKYGDADLRKAKTDKKDALRIARYALEKWYSLVPYSPMDQKYEDLRFLSSQYRQRISMVVKSKNQLIDLLDESMPGITRILALKSRNPEKCMLLQFIKRFHSFDYINSIGKTRFMNSYTTLAHKVGERNAAAKGLAIYELSKASITTRSNNEYMDIALDQCVDILSDSQRAADEIMLQMQNIAETIPEYKVLRSMNGVGDRLGPVILAEIGDIRRFHSGKALNAYAGNDAPPYQSGQFESRNRHISKRGNPALRKACFEVMQALKLTKPQDDPVYLFMMKKEQEGKPYNVAKMAAVNKFLRIYYARAMELYK

SEQ ID NO: 512664 - protein, 457 aa, unidentified
MSTRKKVKKKATSKANVQLPTLHPHAGGIDIGATAIQVAVPGDADPRPIRTFATFTDDLHALRDWLLKCGVKTVAMESTSVYWIPLFQILEAAGLEVCLVNARHCKNLPGRKTDISDCQWLQYLHSVGLLRASFRPPEHICAVRSLFRHRAALTRYAGSHVQHIQKALTQMNLQIHNVISDLTGVTGLAILEAILAGERDPQKLAALKDHRIKASRDTIARSLRGDWRTEHLFVIQQALDTWRHYQKLIAQCDEQLQQQMTQFDSKIDLAQHPLPANRRGNKKPQRNEPKFDTRSELYRLNGVDLTQVPSIQVSTALVLYTELGPDFATRFPTAKCFSSWLGACPDNRITGGRVLSVKTRHVNCRSARALRLAAQSLWHSKDYLGDCFRRWKARLGTPKAITAMAHKLARIIWHMVKFRTPYDPSVWDQAIAHSNQKKLKRLQQNAAALGLTLVSAS

SEQ ID NO: 512665 - protein, 456 aa, unidentified
MKEKELSMQIVHPNAAGIDIGSKTHWVAVDQIPGNVREFGVYTRDHQRLIDHLKTYQITSVAMESTGSYWQTLFHALQKAGFEVILVQGNQTKNVQGKKTDVLDCMWIQKLHSLGLLSSSFLLSDYFQTLRSYYGHREHLIEQTAMYINKMQKALRLMNIRLDVAIRDLAGKSGRAILDAILAGHRDPNYLASLAHFRVKKSPDEIAAALHGNWREDLLFELRSCLAFYDAYRKEILICDQKIQAIMLEFIPDAEALTLESNAGEKPIRKQVNRNSPSFNIRHLAFAHFKIDLFQIPGVSHSTALCILCNMGNDIKRFTSAKRFASWPRLVPNNKLSGGRIISSKTPKGKNAIALALRQAANSIGNQKEHPLTPFFKRIAYRKGRNAAITATARKLAVIIWNMITKTQPYRQPNFELLLEKRKYAQVKNIKSRLFRLNLTDDEMMELFQKTSFPST

SEQ ID NO: 512666 - protein, 316 aa, unidentified
MEASSIFVGIDVSKERLDVAIRPAGESESVSNDKASIEALVKRLREVQPSLIVLEATGGLERSVTRALTSAELPVVVVNPRQVRDFAKATGQLAKTDSIDALVLARFGEVVRPALRPLPDEVTLELRALIARRRQITEMIVAERNRLSGASRSVRKRIDAHIRWLEAELDRADKDLDQSIRQSPIWQENEDLLRSVPGIGPVISRSLIAELPELGELNRKQIAALVGIAPLNRDSGTLRGHRSIWGGRATVRAVLYMAALVASRRNAVIRTFYKRLRNAGKAPKVALVACMRKLLTILNSMLKHKTRWSEIISQTS

SEQ ID NO: 512667 - protein, 440 aa, unidentified
MRVMYERCCGLDIHKSSIAACALITEKGKPQEETRRFGTMTGDLRELAGWLQQKGIRHVAMESTGVYWKPVWNILEPAGFELLLANAQEVKVVPGRKTDQKDSQWIADLHKHGLLRKSFVPPRAIRDLRDLTRTRAILTQEHSSVCNRIQKVLEDANIKLGSVASDVFGVSGRAILRALMKEEKDPEVLAELSKGMLRNKIPQLRRALEGQVTAHHRSLLTGHWNRMEFLERQIADFETQIAQHMKPTPEEMAFRIQNAAEDAPLPLSPREEAIQLWMEIPGVGWTAACSMVAELGVNMDQFPSAAHVASWAGLCPGNNESAGKRLSGKTRKGNVWLRRTMCEVAWAASHTKDSYFAAQFRRITSRRGNKRALVALAHSILVTAYHMLKHKRHYMELGGDFFDVINRDKVRNRLVQRLTKLGFEVKLKPKDAVENTSATN

SEQ ID NO: 512668 - protein, 410 aa, unidentified
MEVLYPHCAGLDVHKDTVVACVRHMTDGTVEREVRTFKSVTAGLLALSEWLASEACTHVVMEATGVYWKPVWHILSDGDFALTLANAAHVKNVPGRKTDTNDAAWLADLLAHGLIRGSFVPDAATQEQRGLLRTRKQLVRERASHVQRLQRTLEDANIKLDSAVSDVTGMSGRAMIQALIAGETDPARLAELAHRRIKSSPETLREALRGRVTSHHRFLLALHLKQIDALDQAIAGIDAEVDAHVEPFRAAVAQLKTIPGIGDLGACVILAEIGTDMSRFPTQAHLISWAGLCPKNDESAGKRRSNRMRKGAPWLKTTLIQCAWAAARKKGSYLQAQFHRLRARRGAKKAIGAVAASMLTAAYHMLKDGTFYQDLGPDHFDRRAKGAVTKRLIAKLASLGYEVTLAPAAV

SEQ ID NO: 512669 - protein, 339 aa, unidentified
MIATKFFIGIDVSKPHFDVALMAVVNHAKQEIATARFDNTAAGIKLFEKWLKSQKTTFNEDSLIVMENTGIYHRLIWTFCSNRSLPIHIGNAAHIKWSFGIARGKNDKIDSIRLCNYAFKEADDLKATAALDPELMLLKDLISARTKLLKQRSGISVSVKELGNVTGKEHQKLIEKALKNAIEGIAKSIRNLEDEIKKIITGNQDFKQNYKLLLSIPGIGHVTAVYLIGCTGNFAGRPSGKELACYAGVAPFEHSSGISIKGKTRVHRMANKELKRLLHMCALSLIQHNQEFKTYYNRKKDEGKHSMSIINAVRNKIALRVAAVIKNQASYKNNYNIAA

SEQ ID NO: 512670 - protein, 324 aa, unidentified
MTSSASSPLFVGIDVSKARLDIATRPQNARWQTENREPGIASLVDKLQQLKPTLIVLEATGGYETAITAALAAAGLPVAVINPRQVRDFAKSVGRLAKTDKIDAVVLAHFADAVRPELRQLPDEQTQELQGLLVRRRQLIEMLVAEKNRLPMTHKALKAGVKEHIQYLEHQLEDLDAEIQDRLRQSPLWREQEDLLRSVPGVGKVLSVTLLAELPELGKLNRKQIAALVGGARYNCDSGQLRGKRAIWGGRATVRSALYMAALSAKRFNPVIRSFFEKLVAAGKPKKVALTACMRKLLTILNAMVHSGSRWQPQKAAPKSLATA

SEQ ID NO: 512671 - protein, 420 aa, unidentified
MASLVKIVYPTCCGIDVHKNFLVACIAKTNGSGQTTHKFGRFSTNTGDLRRLAAWLMEHGCYDVCMESTGKYWIPVFNILEAAGLRVCLTHPKYVKAIKGKKTDKKDAKWIAELFKCDLVRASFIPPLEIRQLRDLCRYHTKLTQMTSSEKNRGQNCLTTCNFKLDAVFSDVFGKSATKIIDKVMELGHSNFEVAPLLHSRCKATAEEVAAAIDGELTYAQAEKFKIIRQHMEQLEKHKTALENLILELAKPFEAEIALLLTVPGVGSPFTAIRILAEIGNDMSVFETAKKFCSWCGVAPQNNESAGKKKTTRVSRAGSYLKPLFVQIVLAVLKSKKHAEVKEKYNSIKKRRGHHKAVIAITRRLLTAIWHMLSKKECYNPALYQKSEAVPASRILTPEQGLALLKQKGYIILKPKSKVA

SEQ ID NO: 512672 - protein, 425 aa, unidentified
MNYKQNEKINQVKESTLVVGIDIGSTTQYARAFDWRGIELGKVFPFSNSREGFESFKAWMQHLQDKYKKLDAIVGIEPTGHYWFDLGAYLEDEGILLVMVNPYAVKQTKELDDNSQSKNDRKDPKVIAKLVTEGRYSAPYTPDGVYADLRIMVTNRKRLIREMTQIKNRFARWFAIYFPEYTDVFGDYEAQSSMLLLKKVCTPEAIVELGAEKINQIWRDAKLRAVGMKRATTLCETAKRSIGLKKGSSAARYEMKLLLEDYEYKKAQLDAIMEEIEKLCRKIPESEQMLAIKGIGVITVAGFLAEVGDVRRFESPRQIQKLAGLSLRENSSGKHKGQTSISKRGRSKLRAVLFNAAIPLIAKNPEFKSLHEYYTTRANNPLKKKQSVIAISCKLIRVFYAILANGVTYDAQKMLSDIHRQPQAA

SEQ ID NO: 512673 - protein, 456 aa, unidentified
MKKNKKPKNLSEFEQINFNAAGIDIGAGTHYVAVPRGRDPKGRDVRHFGSFTADLFALAEWLKECRIETIAMESTGVYWIALYELLESKGFDVQLINPMFIKNVPGRKTDVLDCQWIQQLHTYGLLRGSFRPAEQICVLRGYLRQRGMLVSYASQHIQHIQKALEQMNIKLSQVIRDVTGTTGLNIIRAILGGERNPEKLSQLRDPRCKNDDQTIAKALHGNWRKEHLFALQQAVELFDIYQKKIADCDIEIERQLAVFDNRSQGPLSVQSKKTTGGNQLSFDARSHLYRMTGVDLTRIDGLEALTVLKIIGEIGLDMNRWPTEKHFASWLGLSPGSKISGGKVLSAKTKKCASRAAHCLRLAAYSLHQSKSAIGAFFRRKKAQLGPAKAITATAHKLARILYNMLKNGTEYKDIGQDYYEQRYKNRLVHNLKRRAKDLGFELSIIKEQQAIIGTA

SEQ ID NO: 512674 - protein, 386 aa, unidentified
MGSESDCPPVLRVLSRRSGRTAALPYPPPKSGHYITEEPSAEKAKTTMYYCGIDLHSDNNVLGVIDSSGKRLSIKKNPNDLEAVKKALKPFAANLEGIVVESTYNWYWLVDGLQEAGYKVHLSNPAATEQYSGLKHGDDETDTWWLADLLRLKILKEGYVYPRAERAVRDLLRKRGQLVRMRTQNILSIQNLTCRNTGGRISGAQVKQLTAGEVKELYKDETERGLAVICSINVIKALEKQIETIEKKVKGKIKLSQPYQLLITISGIGEILSMVIMLEAGEMSRFPSVGNFSSYCRCVKSVRMSNNKKKGNGNRKNGNKYLAWAFMEAANFAIRYEPVIQKFYQRKSSKKGSVVARKAVAHKLARATYYVLRDQTPFDVERCFGC

SEQ ID NO: 512675 - protein, 327 aa, unidentified
MDPTTMTASLFAGVDVSKDRLDVCLRWSEPQSHEKEEAFVVAYDDNGIDALLSRLLKEPTVLVILEATGGFERTVVGALAAAGLPVVVLNPRQVRDFARATGTLAKTDRIDASILARFAEAVRPTPKPLPDGEIRALQAIVARRRQLLGMIAAENNRLSQAPKPVAKRIKAHIRWLEKELSRTEGDLEAAIESSPALGENEALLRSVPGVGPVLARTLLAGVPELGTLTHKRVAALVGVAPLNRDSGTLRGHRSVWGGRAEVRAALYMGALVAARRNPVVKEFYERLLAAGKPKKVALVACMRKLLSILNAVLKHRTPWRSPHYLSP

SEQ ID NO: 512676 - protein, 324 aa, unidentified
MTEAFLGIDIAKLTFDVCLLIGQQRQHKHFDNTPQGFTKLGRFLRSHGIEQVHACMEATGSYGDALARYLYNHGHRVSIVNPFRIKAYGDSLMSRTKTDKADARIIALFCQHQRPEPWAPPAPELAELQALVRHYNALLSDRQQQVNRLEDATAPELVNSSIKTIIVVLDAEIKRINKQISDHIDRHPTLRQQRELLESIPGIGALTAAKLLAEVPDFTRYSSSRKIVAYAGLSPAPRHSGTSVHTRGRISKRGNARLRHALYMPAMVALKCNPVMQSLNERLTAHGKKKMEIVVAAMRKLLTLAYGVLKSGMPFNPTFALAKN

SEQ ID NO: 512677 - protein, 341 aa, unidentified
MTEATTIGLDLAKNVFQAHGADAAGAPVFRKKLRRDQVLAFFAAQPPCVVAMEACPGAHHWGREIGRLGHAVKLIAPAYVKPFVKRQKNDAADAEAICEAAQRPTMRFVAVKSEAKQAAAAIFRARDVLVGQRTQLINALRGHLAEYGLIAPQGPAHIERLIAQIEDPDSGIPPAARACLAVLVGTLRHLQEQTAALDAEIAARAKADETARRLMSVPGIGPLIATAIEALAPPTGTFRSGRDFAAWVGLTPVQRSTGGKERLGRTSRMGERTLRRLLIIAASAVVRWAKRKGVPSDSWLGRMLARKPPMLVIVAVANKNARIAWALLTKGGVYRAPAVTA

SEQ ID NO: 512678 - protein, 440 aa, unidentified
MATRAFVGVDVSQADAHVCFLLADGSEPEPRWSIPNTQPGAEALSQTLAQLAQQHTITELRIGMEATGLLWWHLAQHLRSTSVLSSFAPQVYALNPHLITTFRANYGALPKTDRADAFLIAERIRFGRQLPAPFQLDARYAPLQRLTRFRLHLVQNLAREKNYCLSFLFLTFSGFGQVSPFGDPFGATSSAVLEEFTTEELAQQPLEALTAYLQAKGHGRFADPTAVATTLQRAARDSYRLDQVLQEPLRVVLATTFASIRGLQAQLKTLDTTIARELAGLPQTLDTVPGLGPVWTAGLIGELGDISRFDDEAAIAQYAGLTWETYQSAEYQAEDTALTKRGNPYLRYYLVEAANSVRQHCPEYGQYYAAKAAQTPRHAHKRALVLTARKLVRLIDALLRSGTRYQTPAERQGRASDTTTAPHAARPRPPRRYKRAATVA

SEQ ID NO: 512679 - protein, 346 aa, unidentified
MTTLERARRVTGGVDTHLDVHVAAVLDDIGGLLGVEPFAASRAGYGQLLQWMNSFGIPARVGVEGTGAYGAGLARYLQAAGVEVIEVDRPNRQARRHHGKSDPADAVEAARAAHNGRVQAVAKSRNGKVEAIRTLVVAKRSARQARIKALNQIRHLSFTGPDELRARLAGLATARLAEQTAALRPRPGAEVVAYATRVALRTLGRRILALDEELAALNELLAELVAAAAPQLLAVHGVGVDTAAALLVAAGDNPERLRSEAAWAHLCGVAPLQASSGKVTRYRLDRGGDRQANQALWRIVMVRMSTDDRTRAYVERRTKEGRSKREIIRILKRYVAREVYRLLSRP

SEQ ID NO: 512680 - protein, 482 aa, unidentified
MVVPNEQPKKPTKPKKPAKPKKPAKPRKSRERSLPVPVPASAAGLSVINPDAAGIDVHSNMHMVCVPADRDANPVRQFGANTADLQEIVAWLKKCRIKTVALESTGVYWIPLFELLESEGFEVNLVEPGQLSRCGARPKTDVLDAQWIQRLHSYGLLRASFRPPDSVLALRAYWRQRQMQVRYAAYHVQHMQKAMEQMNVKLPEVVSDITGLTGMLIIGAILEGERDPIKLAQLRHERCQHSEQQIALALQGTWRPEHLFELRQAYELYQFHHRQITECDQQVEAELANFPNRAGEKTRAVKPRKRGRKSNDVGFEATGPLFQALGVDLTLIEGIDVGTALVILAEIGVDVSRFPTEKHFASWLRLCPPQDESNKTKKRRGHRKGTNRVTIALRMCARSLGRTMTPLGLFYRRIRSRIGGLGAVKATAHKLACLVYRMLKYGQEYVTQSMEEYEAKVNANMLKALKRKAAALGFQLSPLPTQ

SEQ ID NO: 512681 - protein, 311 aa, unidentified
MTKVTIGIDISKDHLDAFRLEDRAAQRFENSVSGFRALLKWLGQTPVARIVYEPTGPYHRAFEVALSGKVPLVKVNPLQARRFAEATGTRAKTDAVDARMLARMGATLKQEPDAPISRHLLVLKDLQTARAALVKERTRLRNQGHVQTTPILKRQIKARLTLVERQLTEIDAEIASQIASDEALERKRHILRSIPGLGPVAAPLILTLLPEIGTLTREQAASLAGLAPHARESGQWKGRSFIGGGRKPLRDALYMPALVAMRFNPDLKRKYQSLRAAGKPAKVALVALMRKLLETANALVKADRLWTPKPA

SEQ ID NO: 512682 - protein, 400 aa, unidentified
MRVVFGIDVSKASSEVAILVNGEKVHGYTMSNDAIGFARLLGDLRTVHKPEIIFEATGVYSRRLQAFLDEHGYAYTRLNPLEAKKQLDSLRVRKTDQIDAEKLAQSQFVLNRKPTYVQEEVYQELRDLSRFYQNLTEDIVRAKNRLHKVLQVTFPEIETVLSKPTGEQYWNLVTAFPCKDFVLDLSKDELLESIRQSTSKRISDKRVAYLAEKLIALANQSYCAVKKTSPMLEEVRYYTKELLRLSGQRQAVLDEMVELAQPLPEYDILLSIPGIAETTATSIIGELGDIRRFQSANQINAFIGIDLRHYESGNFLAKEHITKRGNPYARKILFKCIHNIASASHTNPCHIADFYEKRKRQSQTTSTKPHTIASIHRLIRTMYYLITHNKLYDYRSTQNQ

SEQ ID NO: 512683 - protein, 316 aa, unidentified
MKSGIYVGIDVSQSALDVLVRPTGEYYKVGNDPEGLAEIVRKLLEVKPELVVMEATGGYERELSIALVLAGLPVAVVNPRQVRDFAKSMNRFGKTDRVDAGVIAMFGEKLNPEARGVPEKEIRELDALVTRRQQLIEMRTAEKNRAGVAPASQKLRIREHIRYLDEQIGTIEEELEEAIQKSRIWQARDELLTSVPAVGPVTSSMLIARVPELGRLKSKEIAALIGVAPFAVDSGKYKGQRKIWGGRADVRTVLYMATISAIRCNPVIRAHYQQLKTRGKMPKVAIVACMRKLLIILNALVRKNQTWSPTLAAQAA

SEQ ID NO: 512684 - protein, 412 aa, unidentified
MEVLHPHCAGLDIHKDTVVACVRHMVGGTVKREVRTFKTTTKDLMALSEWLSAERCTDVAMEATGIYWKPVWHILADGDFKLMLANAAHVKNVPGRKTDVNDATWLADLMAHGLIRGSFVPDEPTQEMRNFLRTRKQFVRERTSHVQRIQKTLEDANIKLDSVITDIMGLSGRRMIEALIAGETDPFALAALAHRRIKASQAELEAALRGRVSDHHRFMLRLLLQHIDAIDAAIGQIDQEVDAHVEPFRTAIQILSSIPGISDLSAEVIVSEIGIDMNRFPTEGHLISWAGLCPRNDESAGKRRSTRMRKGAPWLKTTLIQCAWAAARTKGSYLQAQFQRVRSRRGAKKAIGAVAASVLTAAYHMLKNGTLYEDLGSDHFDRRAKGKQILRLVSRIQNLGFAVQITPIGAAT

SEQ ID NO: 512685 - protein, 359 aa, unidentified
MVKYRKKTKIRKLDSITCDDKAYVGLDVHKRSIHGAVRINGKQISTFVMPAKKDAVIKTLEPLAAGLEKIVYEAGPTGYSLARSLQEIGWPIEVIAPGKIPKEANQGSKSDRLDCKKLAEFAEKNLLKAVAIPTEQEEADRQLTRLRDHLKKKDKRTKQQIKSFLLQHGLKEPNGLSNWSQCGIDELAELELNSELRFVLDIFLEELKDLKNHLKITHNRIKQIAKAERFEKKIALLKTHPGVGPQTSIKFLTEVYQPGRFTEYTQVARYTGLAPRVRQSGEKRREGPLIKAGQAPLRCMLIQAAWAWVRYDPHAAMVYRRLLKNTGKTQKAITGIARRLAVDLWCMLMRNEVFRTAAV

SEQ ID NO: 512686 - protein, 428 aa, unidentified
MDELNRNRLEEFRQLRQEIRHSEEYLIVGMDIAKDRHHAFFGSATGRTLLRRLVFDNNYEGFRKLLDQTEALRVRHGLKKVVYGMEPTANYHKPLGEYLIHLGRCVVLVSGVTAKKNRESLDGRWDKNDPKDSANVADLISQGKCLYYEYPAAPLRGLRGLLSFKRRLKKQEHGYRVRIRNHLIAQYYPEMDREYERLGAEGLATMRWCFPPSEMTGLDVEHYIDRVTSGRIRGEKRERLERVWEQAGETIGCDGVPGVQHEARWMVEGLKQVRKMIRETEDEIEELCEGFPEYGYLLTIPGYGPDVSSKVLGAIGEADRFQNGRQVLKLAGYDLSADRSGKDSEKAIPQISKRGKADLRYALYQAALIASTRNREFMRYYTSKLRGREKEKGIHRKVLVKLSAKMLLIAWTLMKKKEAFDSTYLNRA

SEQ ID NO: 512687 - protein, 347 aa, unidentified
MGYFAGLDVSLEETAICIVDDAGCIVREARAASEPEVLVAFFGACGMTMDRVGLEACSLTAWLHTGLTEAGIPAICIEARQAKAAMGAMPNKTDRNDARGIAQIMRTGWYRAVHVKSASCRSWRALLTARRMVLNKRRDVENGIRALLREVGLKVGTPRRKDFPSRVRALATDDPVLASLAESLLAVVEVMSREVERLTKRVLDEVRIEPTCRRLMTVPGVGPLTALAFRATIDQPDRFRKSRDVGAHLGLTPRRYQSGETDVQGRISRCGDELARTALYEAAHSLLIRSTKWSALRAWGMTVAKRRGMARARVAVARKLAVILHRMWSDGSEFRWGKQAAAHASIA

SEQ ID NO: 512688 - protein, 331 aa, unidentified
MSVYAGLDIGAYAVDLVTRQADKASKARRYKQTPEGHNALIAQLKKAKPTLIVMEATGIYYFDLAVALVEAGLPVAVINPKSFRHFAELKLQTSKTDAIDSDLLAEYGQRMAPGPWTPPDQHHQALRSLGRQINRLVGCRAQARNRLHALKATRSTPSLLIEDEQEGITMLERRIDRLRQAALELLAEAPELQRRYQHLLAAKGIGEATALSLLAELCVLPTSLKSGQISRHAGLDVRQHQSGASVNRPARISKAGNVYLRSALYMPALSAVRYDPNVKAFYEALVARGKKKIQALVAVMRKYLTGLWACLKTDTPFDSTRLFQTAGLQKA

SEQ ID NO: 512689 - protein, 461 aa, unidentified
MAKKAKKVKTAKGAELRIVNPDAAGIDIADGIMQVCVPADRSKDNNRTFGAYTSDLHAISAWLRECGIKTVAMESTGVYWIPLFCRLQEDGLDVVLTNARDVKNITERKTDESDAEWLMLLHQYGLLKASFQPHNDAKRMRTLTRHRDTLSREASSIVLRMQKAMQQMNIKLTLVLSDITGKSGIRIIEAILAGERDPKRLAELADIQCKTPKEEITKALEGNWEEDLMFVLRQNYDTFKHYCIQLGECDAELEKLMENYRAEVAKVEGTSYSPAKKRRDYKKTRHTVGFDVERKAYEMWGVNVFEIPGISHLTALELMSELGHDFTRKFPSSKQFCCWCNISPNTKISGGKRISSHVPHRRNNVGLIFRSIASSLANAKNQLGNFYRRIRSRTGGKAAVIATAHKVAEIFFAMVANQTTYNPERVGIDEKVLLEKRITRYKRELERITGTHIEIGNACVP

SEQ ID NO: 512690 - protein, 414 aa, unidentified
MFAVGVDVSNGRSMIAVLGARRKVVMKPFEVPHTADGFASLVEKLRGLNGEARIVMEHTGRYYESFAMSMYRAGFFVSAVNPLVIKDYREGVDVRKVKTDRADALKIAQFALDKWEILPQYTPMDTIRYSLKTLHRQFQLASKTRTALNNNLIALLEQSYPGANRYFDSPVRPDGSQKWVDFVDTFWHADCIAGVSRSAFVERYRKWCKRHGYNFSERKAVELHVDARQKFPLVPKSDTCKLLVKEAVSQLRTVSRTIETYRAEMNRLAAQLPEYETVMAMTGVGKSMGPQLIAEIGDLRRFAHQKSLVGFAGTDPIKDDSGDKVSDSKPSSKRGSPYLRKTLFVIMTILLQLQPQDDPVYQFLDKKRSEGKKYYVYMTAGMTKFLRIYYGRVRDCLKAKGLWEQPMLESGSSD

SEQ ID NO: 512691 - protein, 406 aa, unidentified
MEDSVLAGIEVFVGVDVAKGDHYACAVASAGTEVLARGVPNDEASISRLIDDAAAHGTVALVIDTTSSAASLLLEAAARREVPVAYVTGLAMRRAADLYAGAAKTDPKDAAVLADYARRNADRLSWTQPSDELLARLRILNGRDADFAADATRAANRLRDALLAVSPALERALGDQVATSAGARDALARWGTPTALRSAGKARLRARIAKRSPRTAVRLTDAIWAALDAQSLTVTAEAAWGDTITELAAGLDRICDRRGQLADDIEAAFMDHPLGKVLASLCGFGPRTGARTLAEIGDPHRFADGSRLAAYAGLAPVDWQSGRSATARKPRGGNHRLKNAMFTAAFVAAQHDPDARAYYQRKRAEGKRHNAAVVCVARRRCNIILAMLKTQTPYQPPHPDNQPQAA

SEQ ID NO: 512692 - protein, 343 aa, unidentified
MQIHSVGIDLGKTTFHLVALGSAGKVLVRKKFSRKQLLAYTANMPASLIGMEACAGAHFLGRALRTQGHDVRLIAAKFVKPFVKSNKNDFIDAEAIAEAVERKNMRFVPIKTDDQLDLQGIHRVRDRLISRRTAVINQIRAFLLERGLVFAQRPANLKAAMADILENAEAALTPQMRSLVDMLWDEWKLVEQQIEKLNLELERISAADAGCTRIRQIPGIGPIVATAIVAAIGNGAAFRKGRDFSAWLGIVPRQYSTGGKTKLLGISKRGNVYLRKVLIHGARAAVLRIKRDRAPIGAWLDALDARAPKNVVVVAMANKLARIAWAVLSSGQDYRPTANAIAA

SEQ ID NO: 512693 - protein, 307 aa, unidentified
MTVCIGIDVSKHALEWSVGAEGRIQHTRNEPRPIAQLVRRLAALDAERIVVESTGGYERKLVLRLAEAGLPVVVVNPRRVRRFGEGMGILAKTDAIDARLLALFGEKVEPPIRLILQGTERLLADLVARRRQLIAMVVAEKNRRDTAAEPVRRTIDALLRTLDQHIRDLDRKIEKALLADSERAELSELLQTVPGVGPGVARTLLIDLPELGHLGRREIASLVGVAPFAKDSGTIRGSRRIRGGRASVRTALYLAAMTASRFNPVLRDLYERLRQAGKPPKLAFVAVARKLLTILNAIAREKTAWQA

SEQ ID NO: 512694 - protein, 404 aa, unidentified
MYSFGIDWSEEHHNLCVMNAQKHPLSQVQFPHSLEGFQQVEALRQQLGFTPAECWVAIETAHNLLVEFLLEQGYVVYVIPPHVTYAQRQRYHASQAHTDDSDAALLARLLWTDRERYQPLQADTHLTQQLRAQMRFVEQLRRAIHRQHNQLRAVLLRTYPQAVGLFSTLTTQISLQFLQVYPTAQAAAALTLDEFRAFCQQQHYSHPQRIAQRYAHLIAPAPTAQPATVVAYQEQIPIWAELLLLQVQRHTAAQRRLTALFTQHPDADIFASLPGAGALLAPALLAKFGDQRARFPTAAVVQACAGTCPVTEQSGKKTYIHFRRSCDKEFRRIAQHFAKASLPQSGWAHAYFQETLTRGHTTSHAYRCLANRWLAVIWKLWHTRQLYDEGYHLRQRAQRQRPRP

SEQ ID NO: 512695 - protein, 349 aa, unidentified
MYVGIDAHKKYCTCVIMDEKGNKIQETTIDTTNEALEKFSRQLPQHAKVVVEASTSGVYVYDHFHTQGFEVIMAHPQKVKAIAHAKIKTDRISAEILAHLLRTDLIPEAYVPPHDIRELRDLVRHRVALARMQASIKNKIHALLTKEGIRQGFTDLFGRDGRAFLKKVQLNTRTRMAVDNYLTVIDIIGQKIREVQKLIDTAAEQEKPLEIQALTTRFKGIGVYTALLIVAEIGDIRRFPHYKKLCSWVGLIPSTSSSGGHTYHGKITKQGNTLVRWSMIQAAWRVIRHDPELKEHYNRLKKRIGSQKAIVATARKLTKNIYFVLQEVSTPSQHQNYDTGHITPISHGP

SEQ ID NO: 512696 - protein, 391 aa, unidentified
MIYVGIDVAKDKHDCFITNSDGEVLFKPFTITNNLDGFNELYQKIESVTEDATKVKVGLEATGHYSYNLLGYLIDKGLAAYVINPLHTNLYRKSLSLRQTKTDKVDARTIASMLMSDVNLKSYSDISYHNEELKSLTRYRFDKVKERAKLKTSVSRLVCILFPELEKLVPTLHITSVYALLSEFPGAKHIATAHLTRLTNLLSEASKGRYGKDTAITFRDAARASIGSNMPAKSLELKHTIKLIQELDSEIDEIENEIKLIMDEINSPILSIPGINYRMGAMIIAEIGDFNRFDSPDKILAYAGFSPSTYQSGQLDGAYAHMEKRGSRYLRYALYNAAKYVCHWDPTFTAYLAKKRAEGKHYNVAISHAVKKLVRVIYHLEKTKQQYIKAA

SEQ ID NO: 512697 - protein, 354 aa, unidentified
MRSSAKYVGLDVHQATTVVSVRERSGRVLARSVLATEDEALTDFLGSLGGKVCVALEEGTQAQWLHDLLEPVVDRVVVCDRRGKARRGNKGDQVDADELSEALRTGALRAVYHGSPHQATLSELARAYRSVVADATRVMQRLKSLFRARGIKAPGARVYHPANRSLWLDKLPPGGARFRAEVLYAQLDALRELRPKVKATLVAEARRDPAWPSLTSIPFMGPVRVAQILAVARTPWRFRTKRGLWAYSGLAIVTSTSAEYVMREGQPVRRTRAPITRGLNRNHNAVLKEIFKGAALAATVRPGPLQDLYHGMTERGMRPELARVTLARKLAALTLRLWKTGEQFDPTKLTTQAR

SEQ ID NO: 512698 - protein, 343 aa, unidentified
MEQISTIGLDIAKNVFQVHGIDENGKVAVRRQLKRRRVLAFFAKLPSCLVGIEACATSHYWAREIEKLGHEVRMMPPRYVKPYVKRNKNDAADAEAICEAVTRPTMRFVPIKTPEQQSVLMLHRTRQLFVRQRTTLINAIRAHMAEYGIVAGVGRNGVEVLLDLIAKGEDERIPPTARECLMALAVQLQLVKRQILEADRRVLAWHRTSKVSKRLEAIPGVGPLVASALVASIPDPSVFRSGRDMSAWIGLVPKQNSTGGKEKLGSISKAGNRYLRKLLVVGALSVIKRAKILGYTRHPWLVRLMERRSTKIAAIALANKIARMAWAMMVRDEEYRTPLPQAA

SEQ ID NO: 512699 - protein, 414 aa, unidentified
MKAQPESRTIHRYVALDLHKEYVMAGAMNAAQEWVLRPRKVEMMRFREWAAANLRQGDAVILETTGNVWDIYDIVAPLVTRTVVAHAGAVRQIAEARVKTDSEDIKRLLRLLIADIVPEVWVPPAPVRELRSLISYRNRLVKTATMIRNRLQSLLHRHNLKLGENGLTDAEWWESQPLSALEKLQVRQELALLSRVEQSKAELETELAKMSMSAKWGKSAVRLLQLPGLGLITAMTVLAAIGDIRRFASPKQLVGYAGLGAGIHQSGKEHQDKGITKSGRKELRWALVEAAWRAVRSSEVWKQRFDQLAKRRGEHKAITAIARKLLVTIWYVLTREETDRYASEEDLAYKMLVLSWELNEEARLGLTYKQFAKYALMKLGIETDITRFVRKNVPRRVAPRDEVLARMKELGLSL

SEQ ID NO: 512700 - protein, 273 aa, unidentified
MDHFVGLDVSVKETSVCIVDEVGKIVREVKVASEPEALLAVLKKPAYRFKRIGLEAGPLSQWLFGALAEAELPVVCVETRHMQVVLKAQINKTDRNDARGIAQMIRAGLYRPVHVKTLRSQKLRMLLTHRKLLQSKAIAIENDLRGTLRNFGLKVGIAGTVKFEARIRELVENLPDLAALVEPLLIVRRVLHEQISVLHRRLLAIVRDDAVCRRLMTIPGVGPVVALTYRATIDVPARFKNSKAVGAVFGLTPSKYQSGEINRTGAISKCGTR

SEQ ID NO: 512701 - protein, 379 aa, unidentified
MDRAITDTPAETILHGALELSKNSWLLALQFPDRVQPSLYPIGGGDTVGLMAKLTAARDRWAKMSGKAPSIMLCYEAGYDAFWLARFLKARGIECLVVDAASMQVNRRARRAKTDRIDVGMLLRALIAWGQGDRHVWSVVRVPNVDEEDLRRSHRERDRLVRERTAHINRIKGLLFGQGIRGINVKSKYKTLQIDKLVTGDGRPLPPRLTSEITREIARLALIQEQIATLERERDQAPTPCKASEKKRLQLVSLNGIGPAIAAVMTREVYYRQFENRRQVAGFLGLATSPHDSGDVERSQGISRAGRGHVRGTMIQAAWLWLKHQPKSAITRWFVQRTAGQSGRIRRIMIIAVARKLAIALWRFLEQGLVPQGAMLANR

SEQ ID NO: 512702 - protein, 346 aa, unidentified
MNATTMAVDLAKSVFQLAIANAQWRIIDRQRLNRASFARFLAQTPPTHVVMEACGMAHYWGRRAQHHGHRVTLLPPAYVRPYVRRNKTDRADADAILEAVRSGQVPSVPVKRIEQQALVALHRIREQWMTTRTARINTLRGILREHGVLLPAGPRAALHTLPAILEDAELPLPMHLRTVLASVLAEVRAIEVRIADLARELATLAAADPVVIRLRTIPGIGLLTATALVGTVGHIHAFRRARQFASWLGLTPREHSSGHRRRLGGISKRGDVYLRCLFTHGARAVLVAAQRRRASTHPLTRLHQWAVTVRDRRGHNKATIAVANKLGRIVWAVWQRDVPFAVPDAA

SEQ ID NO: 512703 - protein, 406 aa, unidentified
MRVVHERCAGLDVHKSSVVACALLPEGKQLRTFGTLTWQLEQLAEWLRSLSVGVVAMESSGVYWKPVFNILEVAGVELLVVNARHIKAVPGRKTDVKDAEWIADLLRHGLLKPSFIPSRKERELRELTRYRRTLIEERAHEVQRLQKVLEGANIKLEDVISNVVGLNGRRFLSALIAGDYDPQAVASTANYGLQRKRELLAQALHGTLGTHQRFLLDQLLSHIDFLEQRVTALDEEVKQRSRPFEAAIARLDEIPGVGTRAAEEILAEIGTDMSRFPSHRHLASWAKVCPGNNESAGKRRSGYAGMGNRWLRSILVESAWCATRKKDSYFKVQYHRLAARRGKKRALLAVAHSLLTVIYHLLNNGVVYQDLGPNYFDQRDRSLITRQAVRRLERLGYRVSLTEGAA

SEQ ID NO: 512704 - protein, 404 aa, unidentified
MWYAGIDWANDHHDALVIDDQGRQVGSLRVDHTPQGMTRLNTFLEQIVGAESKDQMACIIETTHGLLIAHLLEAGWPVYPVNPRTVDRRRSASGAKTDTIDAYLLAKTGRADLADLHRLTPDSEKIAELKLLTRDQDALIRMQTRLVNQLTACLKAYYPVALELFTKLPQKSTLRFLQTYPTPQAAMAVSAEQIQQVLRQAKHSNPTAVAATIFERLHQPHLQADAVITRSKSRLMLALVSQLLPLIEQIAQYEKEIKTLFLTHEDHEIFASLPRAGKRLAPRRLSEIGDDRTRYQDESLLQALGGTSPVLFQSGMYSKAHRRLGCIKPLRNALHQFAWQSTQSEPWARQYYQRKRAEGKSHTVAVRALANVWVRIIFAMWLHHQCYETATFEQAQQQHARRAA

SEQ ID NO: 512705 - protein, 337 aa, unidentified
MTGISMLAIDLAKGSFQVCAIGPNGSVVYNRALSRSRLIALLADQPACVVAMEACATSHYWGRLAQTHGHEVRMVPAVYVKPFVKRQKNDRADAEAIAEAALRPSMRFVAVKSVETQGRAVAFRTHQCLVRQRTQLINAFRGHLAEFGLVAPKGPASLKVPEEALENEANDLPAIVREMGTIYIDQIARITEVIARLAEELEAASKTDTDLRRLCTIPGIGPVAAGAVAAFAPDLDTFESGRNFAAWLGLVPRKRSTGGKSRLGSVSKMGQTDIRRLLIVGAMSVIRWVVRKGGSSNRWLANLVARKPKMVAAVALANKMARMIWALSVKKEDYRMA

SEQ ID NO: 512706 - protein, 365 aa, unidentified
MINEYYTTIGMDVSDRKIQVCVMSKMNGAPKIILETVIPTTKEGLIKFLAKQDKSSPVTFETGMHCRWMKEVVEGLGFKVYVANPCHLRMITESKTKNDVNDARTLARITLADPVLLHPVKLRDAEHQKMLNLHEMRNLLIKQRTGIIVQMRAIAKSMGFRIPKTSTGHFHKLDTKSWPEELRDISWPMIKNLEQLSVTIKTYEKQIRELAATPIFKAQVERLMEIHYVGLHVATGFVAVTGGNMDRFEKARDVGPWLGTTPKQDQSGDVDKQCPITKAGSPFMRRLLVESAQMILRDGSINTDLKLKGLRICARGAKIAKRKAITAVARSLAVLMVAMLKKPDAPYISLSERNEKELLSMRAAM

SEQ ID NO: 512707 - protein, 349 aa, unidentified
MRNEHHGATVYGIDIGKNCFHVVGVDAAGKPIQRVKFRRDTLLTFFANATPALIGMEACPGAQWLARKLQALGHTVRIIPAQFVKPYLKSNKNDTLDAEAIAEAVQRPTMAFVAIKTPEQMDLLALHRVRSRLVSQLTGVTNQIRGFLLERGITVRQGLAPLRQALPRILSSSSDALSLRIVRLIADLAEDWRHLDERIAAVSAEIEALAAQDDHCQRLMSVPGVGPIISSAVVAAIGTGAGFKQGRDFGAWLGLVPKQESTGDRTFLGKISKRGNKYLRTLFVQAAHIVLVRRPHGARLGLWPWIEAAGRRLHRNMLVIALANKLARIAWAVLARGHAYQPRSASHAM

SEQ ID NO: 512708 - protein, 449 aa, unidentified
MSDIPTSTTQPEFGALIGIDWGDKKHAWALQVGDSTKIEKGDIEHTPEAIQQWAAGLRQRFPTGRLAVALEQSRGPLVFALSKYEHLTLFPIHPTSAAEYRKIFRPSGAKSDGPDAVLHLDMLARHRDKLRPLNPDTPETRALQLLTEDRRQLVNERTRYSNRLTANLKSYYPQVLQWFDDLYAPVTLDFLDQWPTLEELQKAKPGVWSEFFQEHNCRDAKTQQRLAAIPMAVTATTDFAVVTAGRASVCAAVRLLRNLNQAIQEYDRQIDQLAKGHPDFAIFQSLPGAGKVMVPRLIAAFGTQRDRYQRAADIQQYSGIAPVTEASGQQLWVHWRWGCPKFLRQTFHEWAAQSIAQCDWAAAYYRVQREDKNKSHHAAVRSLAYKWIRIAFRCWKDRQLYDDSKYELALKTRAKATPEPKQPSAFPLPLRWISCAGFQKLAEKNEENT

SEQ ID NO: 512709 - protein, 338 aa, unidentified
MALELLAIDLGKRSFHLYGIDTNGEILSRKVSRTKLAEVVNNLAPKAIAMEACASAHYWARCWLAAGREVRLINPRLVKPFVKGSKNDAVDAEAIFEAAMRPTMRFVPVKSRDQQDLQSLHRARDRLICQRTALINHTRGLLAEYGVVLPQGPWRFTAQAPAAVAGAELSDLARSIFGELMDQLDELDRRVKKLDATMVALCRTNETCRRLAKLPGVGPVIATAIVAAVNDGRQFRSGREMAAWIGLVPRQYTTGGKPRLGGIGRRANHYLRRQLIHGARAVVSRLPQHDARHDARRSTWLKALVARRGFNRTIVALANKTARIAWALLNRKEDYAIA

SEQ ID NO: 512710 - protein, 364 aa, unidentified
MQQFLGCDAHKHYSVFVAVDERGRASQPVRIEHNMAAYRRYLDTLPAGTEIAIETTGNWYWIVDLMEQAGHRPHLANASEAKKRMGKTHKTDALDAKGLAILLRCGTLPESWIPPGALRDQRELLRTRMALRDLRTSLKHRIHSAIDRYGRQATGISDIFGVKGRAYIDGILPDFPPQTANMVALELESIDQLSVKLLSLEQHIDRTLASSPEIQLLQTLPGVGKILAPVLWLEIGDVDRFPRAENLASYAGLVPRVISSGGHTRHGGVCRNVNRYLKWAFVEAANCSTHLRVYREGHIGLLYQRLAPSKGHGRAIIAVARHLAEASYWMLRKREPYRPPRIHNPSSKFGQTRDTSDQVAQVSG

SEQ ID NO: 512711 - protein, 407 aa, unidentified
MTKKSSKKAKSQRSRERALLQKVHLNAAGIDVGADTHWVAVAEDRDNHPVRNFGVFTSDLVALCQWLKACQIQTIAMESTGVYWIPLFQMLERNGFEVFLVNARHVKNVPGRKTDVKDCQWLQQLHTFGMLRGSFRPQAQICQVRSYLRLRDTLSKDCNSLVQRMQKALTEMNVQLHRVISDITGVTGLRILREILAGERDGVKLAQLKHPQIKSSSQQIAKALDGDYCPEHLFALQTAVELYDGYQLKIMQCDQRIQESLGAFEAKVEVAAPDLSRLRSAEKRQEALRRHHLEQITGADLTKLPGLDLLAVQRILSEVGLDMSRWPSEKHFCAWLNVAPNHRISGGKILASKPRKNTNRAAAALRLAAQSAMQSKTALGAFIRRIKLRLGAPTAINAGAHKLARLL

SEQ ID NO: 512712 - protein, 372 aa, unidentified
MKQNIVHIGLDVDDTQYHGAAFNKETGEVIEFKSRPTLKGLLQQLDRMERHFKGHKIKLCYEASYVGYCLQRDLISNGIHCDIVSPSSIPSPRGKAVKTDRIDAGYLAQFYANDLLTIVQPPDEEQEQDRDLLRSRQKVMQQRNQLRKHLQAVLRRNGLHYKAQTQYKSHWTKHHYFWLVRTIDGLSGSLKVNLELLLRQLKAFNEILTEYGQQIDVLASSPRYQSAVQSLTCYKGIKNVFALTMITEIGDIKRFSHPRKLVSWIGMDIREYSSGGKYNRFGITKHGNRYIRTAFVEANQRGYRTAKIGQDLKSRRKHIAPELVNIADRCLRRLNKKGNRLLMAGKHPNKVKVACAREMVGFVWESLNKAAA

SEQ ID NO: 512713 - protein, 316 aa, unidentified
MKNEIYVGVDVSKGALDVVIRPTGEYYAVANDEEGIDHIRRHLLEIRPKLVVMEATGGYERGLSIALAVAGLAVAVVNPRRVRNFAKALDTHAKTDRVDAGVIAHFAENLKPEARGVPEEEAREMDALTTRRQQLVDMRTAEKNRLGVALRSQKAGIQEHIRYLDQQIGGIEEELEAVIAKNPVWQVRDDLLRSVPAVGPRTSGMLIARVPELGQLTSKKIAALIGVAPHPRDSGIYKGQRRIWGGRADVRTAMYMATISAVRCNPVIKAHYQQLRARGKLPKVALVACMRKLLIILNAMVKANLHWQVFPEPQQT

SEQ ID NO: 512714 - protein, 358 aa, unidentified
MQPEAGREANEVRYVGVDIGKWRCRAAVMNPEGVLIDEFAFNNDAEGIRDLASRLTTEDRVVMESTGSVWTNLYDALDERKVPVVLANPLKTRAIASARIKTDKVDARILAHLLRGDLVAECYVPPRDLREIRALVRHRASLVRARTTVKNRVHAIVDQHGLRCEYSDLFGKRSLEWLRSLDLGALDRLMLDNHLGQVESLNGQIRRVDEEIRRRASLDEDVRLLLSLTGVDIYTALLIRSEVGCIDRFPDYKRLVSWAGLAPSLHQSGTVEYSGGITRQGSRMLRWAMVESARTAVRHDERMRVFYERVKRRRGDGKAVVAVACKMLKIIWFMLKRREPYQSRNEGRYGVKLKSLDR

SEQ ID NO: 512715 - protein, 404 aa, unidentified
MYNAVGIDVSKGKSTVTVLQPGGTVIRKPFDVSHTSQNLNELAAYLDSLDGDTRIVMECTGRYHEPILKALSEAGLFVSVVNPHLIKNFGSNSLRKVKSDPADARKIARYTLDNWAELRQYSGMDNTRTQLKTLNSQFSFFMKQKVAVKANLIALLDNTYPGVNKLFDSPAREDGSEKWVDYAYSFWHVDCVRGIGLKAFTERYQAFCKRHHYIFQADKPEKLFNASKELAAVFPKEKTYKLLIQQSIQQLNLASGHVERLRREMNELASTLPEYSTVMGIYGVGRTYGPQLIAEIGDVSRFTHREALTAFAGVDPGVDESGQHKSKSNRASKVGSARLRKTLFQIMTTLLQNAPEDDPVYRFLDKKRSQGKPYYVYMTAGANKFLRIYYGKVKECLRNLEQES

SEQ ID NO: 512716 - protein, 345 aa, unidentified
MKNTIVSVDLAKEVIQVCTYTNKKVRSNSEMTHHEFLIWLFKAKPTFIVFEACGTSNYWEQKAIEAGHKAELISAKLVATVRQNQKTDKNDALAIIQAAQLPEINFIKGKNIEQQQLQSVLRLRELAIKQKTALSNQIKGLLLEFNVRIVNKDGGIIAGIKAYIEDAKNELTFEFRAVLNTASKQYELLVEAIATYDMSLERTVGQHDDCKKLLKLEGVGTVNAVNLYIALGCAELGTFSKGKDASACIGLTPLQYSSGGKVKLGSIGKYVKNSTLRSQLIVGAMSAVSHAVRRKAVTKKDVWIKALVERKGKKCAAVALANKTVRTAFAMLTQGTEYKAEYNLA

SEQ ID NO: 512717 - protein, 341 aa, unidentified
MEEYVGLDVSMEETSVCVMDAAGEIVWEGKAATEPGELMRVLHHRAPAAVKVGLETGPLSTWLWHALREAHVPVVCLDARHAQAALSMRINKTDKNDAAGLAQLVRMGWYREVKVKQLATHVEGALLASRALLVRQRCELENQIRGLLKNFGLRVKATKGRAFGQSVEALAQKQPVLREMVLALLAAWSSLRLQIAVLSRRVEQQAMGEPVCRRLMTMAGVGQLTALAFRAAIDDPSRFRHSADVGAYLGLTPRRYASGEINRMGRISRCGDALTRSYLYEAANVMLTRSRGSNPLKAWGLKLAKRAGWKKARVALARKMAVVLHCMWRDGTDFGAPKANA

SEQ ID NO: 512718 - protein, 379 aa, unidentified
MRKDIRYVGLDVDSEKIVVAVAEPAGEVRSLGAIPYREESVRQLVKKLGPARRLRVCYEAGPHGYGLYWQLSGLGVHCDVVAPTLVPVRSGDRVKTNRRDAEKLARCYRSGDLTAVWVPDAEHEALRDLVRAREVAKKDQLRARHRLGKFLLRRGLRAAAGMKSWTAKHLLWVKTLRFEHAAQEATYLDYLHEVEHAAERVARLERAIDQAIEALPAEMRAVIAGLQALRGIKKVSAATIVAEVGPLSRFSRPKQLMGYSGMVSSEDSTGSSVRRGAITKTGNAHLRRIVGEAAWAYQYRPAMSPELKKRQEGLSEEVKEIAWKAQHRLCTRYRRLMAKGKLRQKVATAIGRELLGFIWAIGTQVEREQRSAKLTRRAA

SEQ ID NO: 512719 - protein, 339 aa, unidentified
MKVSTLGIDLAKNVFQLHGVGCNGQTVLKKKLTRDKFLPFLMQLEPCLIGMEACASSHHFARVLRQYGHEVKLIPPQYVKPYVKTNKTDAADAEAICEAVARPNMRFVQIKTAEQQAILVLHTERNILIRERTACANSMRAILAEFGIIMPRTLSQLYKKIPEILEEYDNELSPFVRCSVARQLEHLQGVEDQITLIEQELSRWAKTQPACQRVMKVPGVGLMTATYLVASVGNGQQFHSAKQFAAWLGLVPREFSSGGKQRLGRISKRGDRYFRYLLIHGARAVAAVIERHKDNMPWLYRLLNKKAYNVAVVAQANKTARILWSMLVHHTEYRTLSAV

SEQ ID NO: 512720 - protein, 315 aa, unidentified
MDTKETETFIGIDVSKETLDVAVDGEPDVPQYANDVAGIAALTAWSTEKGATLVVVEASGGWELDLVTALAVAGLPAAVVNPTRVRNFAKALGQYAKTDKIDARVLARFAAVVQPPVRALKSGDQARLAAVISRRQQLVDMLTQEKNRRVTTRKEMRDQLERHISWLETELADLNDQLEKLVAHCADWQAKKDVMISVKGVGPVTATTLLADLPELGTLNRQQIAALVGLAPLNKDSGRKRGQRHIFGGRKAVRSKLYMAALSAVKHNPVICAFYERLVAKGKLQKVALTACMRKLLVILNAMIRDMAPWQPRSI

SEQ ID NO: 512721 - protein, 535 aa, unidentified
MGAVSNSRTTEYSQTADKPKLVRRFAFSTPEVLQKTSGFFYFTKKERSKCTSPTRHPSTAWRPSCSDRPVEISGAAAGSVGRINSTKRTAIAGSVSTTEKRKAAPWKSARYWMPDSPAVQPLFMKPFMRHLPTHDIRRFKDGFHISMKIFVGIDIAKLNHFAAAISSDGEILLEPFKFTNDADGFQLLVSKLESFDKNSIIIGLESTAHYGDNLVRYLVAEFYQVCVLNPIKTCQMRKNNVRKTKTDKVDTFVIAKTLMMQDDLRFITFFDLDMMDLKALGRFRQKTIKQRTRLKIQLTTYVDQVFPEIQYFFKSGLHQNAVYALLKEAPSPKEIASMHMTHLANLLKVNSHGHFTKEQAKELRVLAQKSVGANDSAISIQITQTIQQIELLDSQLEKIEAEMTDIMKFNDSVIMTIPGIGYINGGMILGEIGDIHRFSNPNKLLAFAGLDPSVYQSGNFQAKTTRMSKRGSRVLRYALVNAAWNVVRNNATFKAYYDAKRAEGRSHYNALGHCAGKLVRVIWKMLTDEVEFNLE

SEQ ID NO: 512722 - protein, 410 aa, unidentified
MEVFLECCAGLDVHQASVVCCVLIGAPGRKPQKLLRSFGTTTRELEALRAWLAEHGVTHAGMESTGVYWKPVYAVLEGHVDLIVGNAHHIKNVPGRKTDVKDAEWIAQLVRHGLVAKSFVPPPAIRDLREMVRYRRTLIETRTAMRNRVLKLLEGANIKLSGVASDVFGVSGMAMLEALAAGTSNASEMAGLARGRMRRKHAALEAALEGRMREHQCFLLAMQLRTLGTIDQDLEALDTRIEAQLEPYQVQHRLLTQIPGVDWATAASIIAEIGTDMDVFASARRLAAWAGVAPGNYESAGKPKGAGTRRGNVFLKSALFAAASAAVRTKGSYYRDKYNRLRARRGPVRAIMAVAHRLLIAAFHMLSTGEAFRDLGEGYLDQVARKRSTTKLVQRLSNLGYDVMLVPKAA

SEQ ID NO: 512723 - protein, 346 aa, unidentified
MNITTIGIDLAKSVFQLHGIDSYGKVLIKKQIKRAQMAEYFVNLKPCLIGMEACGSAHHWARKLEGFGHTVKLMPPQYVKPYVKTNKNDAADAEAICEAVTRPNMHFVPIKSTEQQAILSLHRIRQGYVKARTAQANQIRGLLAEFGLEIPQGIGYIAKRVPDILEDASNELPGILRIEIQSLLEHLNELDTRADNCEKKIVAWHKQSETSKKLEAIPGIGPLTATALVASIGEAKNFKNGRQVAAWLGLVPRQHSSGGKQNLLGISKRGDIYLRTLLIHGARSVIYRSGQKENPTDRQSWLNQLTQRRNKNVAAVALANKNARIVWALLNHDRDYQDNHKMLVAA

SEQ ID NO: 512724 - protein, 341 aa, unidentified
MKLTTIGIDSAKNVFQIHGADERGKAVLKKQLKRDQVVPFFANLVPCKIGMEACGSAHYWARKLQALGHSVQLIAPQYVKPFVKRNKNDAADAEAICEAVTRPNMPAVPIKNASQQAILSVHRARQGFVKARTAQANQIRGLLAEFGIIIPQGISHIAKRVPEIIEDGENELPGSFRLLIQRLVDHLKVLDQQVGELEREIQAWHRENEASKKLAKIPGIGPMTASALVASVGNARSFRNGRQLAAWLGIVPKQHSTGGKATLLGISKRGDTYLRTLLIHGARAVIRVAERKPQPDAWLGKLLTRRNKNVAAVALANKNARTIWALLAHDRAYESDYRMAA

SEQ ID NO: 512725 - protein, 311 aa, unidentified
MVTLGLDPHPGSHTVVALDVNGSVLTSLTVLNTSAGLSELQLFAAQFELRRWAIEGAGNHFIADFVKELLARGEAVYPICPNLTSQYRSRRGRKKNDVVDASNVARALLANPQLPVLQSADSQRELQELSRAQRRLSEQLKSNRGALKELTEDSPVRDILKQVITTLIVQLKELQRQLRCAVSRIMPRLLDLPGVGAIMAGTLLAEVGDPQRFPSADHFASYCGAAPVERGSGQNSRMQINPGGNRRLNWALHVIAIVRLRVDGGRSKQFLERLTSKGKTQRAALRLLKTYIAREMFRIMRQSDASSRCES

SEQ ID NO: 512726 - protein, 427 aa, unidentified
MKNNLTSTLFVGIDVSSKTNVVCALDFEGNKLLKLSADNNLPGADLIAKGIISCANDHKLLHVVVALESTSFYSLHITNFLSSHEELLFFSIMVYCLNPKSIANYRKSFVDIDKTDPLDAFIIADFARVGRIQSKPWRGSQHLALQRLSRHRLHLIEAMTREKAYMVSNIYLKFSELAVLDKSERPFSNTFGVTSAAVLMEYMSLEEITYASIEELVEFISLKGKNRFSDPLATAKVLKKAAQDSYRLDKVLYEPLSTSIASSFNVIDAYSKEIKVIDKAIVKAIKGLNTNEYQSLVSIPGIGPVLASGILAEIGSIAIFSSQDALAKYAGLTWRQKQSGDFKSEITRMTKTGNKYLRYYLIEAANSVRNHVPEYAAFYQKKYSEVTTHNHKRALALTSRKLVRLIFGLLTKNQLYSNNIVGIHKTE

SEQ ID NO: 512727 - protein, 430 aa, unidentified
MKSNTQNAKIEAITEKTLVLGIDVGSEMHYARAFDYRGIEYSKKPFKFSNTEAGFVTFKEWILDLKERHEKDKVVPGMEPTGHYWFNLGKFLQDNEMKPVLVNPHHVKKSKELDDNNPTKNDRKDPKVIAGLVREGRYMIPYLPDGVYADLRTASNIRFQLQAELTRIQNRISRWFNIYFPEYKTVYGKPDAKSGMLILKAAPLPEDILTLGIDGVNQIWRDEKLRAVGKARAKTLIEAAEHSVGSKEGAVSARMEIRMLLEDYESRNTRLQEVMVLIEELIRKIPMAEKLLEIKGVGIRTVSGFLAEVGDISRFNNPKELQKLAGLALVENSSGKHKGETTISRRGRKRLRYLLFEVAMSLVAKNPEFRELHNYYTTRRLNPLKKMQSLMAIAAKLIRVFYAMLTKGVDYDPKKMVSDIKRPAVYLQAA

SEQ ID NO: 512728 - protein, 348 aa, unidentified
MVHFVGLDVSVKETSVCVVDDAGKVILEQKVQTEPADIIAVLTSLGVSFGRIGIEAGPLSQWLVNGLMAADLPVICVETRHMKALLTAQQINKSDRNDARGIAQMMRVGLFKPVHVKTLVAQEQRMLLTSRKLLQRKLLDVESDLRGTLRNFGLKVGVVSGGRYEARVRELVAGFPRLAAIVEPMLSVRRVMRQQFAVLQKMLLDTVRGDPVCRRLMTAPGVGAVVALTYRATVDQPQRFLHSRAVGAHVGLTPKRYQSGETDYEGGVSKCGDALLRTMLYEAAHVLLTRGAKWSWLKAWGVRVAQRRGMRRAIVAVARRLAVVLHRMWVDGSEFRWSKDSTAVSAVA

SEQ ID NO: 512729 - protein, 419 aa, unidentified
MAFKILRKNCCGLDIHKTWIFACIGITDSNGRTEYKQARFSSFSNGLRDLADWLAKYSCSDVCMESTGKYWIPVFNILEKTCWVTLAHPKYTKPQKGNKTDRKDAKWICDLYMCGMVKPSFIPPPDIRQLRDLMRYRVKLTNMLTGEKNRAQNCLTVSNLKLDDVFSDVFGKSSRSIIQYILEHPGEQFDVTPFIHRRCKHPVEEIQAAVDGVVSREQAAKLKECLLHIDQLNAHRERIEAEILRLAEPYPYQLELIRTVPGFAAAPLTAVALISEIGVDMSVFPSAKHLASWAGCCPRNDQSNKKVKSTRISRAGCYLKPLLVQIANAVIKSDRHPECRERYRRIKARRGHKKAIIAVCRMLLTAIWNVLSKLEPYSAKGYLADKLTEHSVVISKAEGLALLRKRGYIFKDELDVESG

SEQ ID NO: 512730 - protein, 350 aa, unidentified
MEQISRIGMDTSKHLFQLHGVDAAEKPVLRRTLRRRDMITFFERLAPTRVAIEACGASHHWARLLRGFGHEVQLIAPQLVKPYVKRGKNDAADAEALCEAMSRPTMRFVPVKTAEQQAALMLVKLRDRLIRNRTQLVNAIRGYAAEFGIAGAKGIAHVTTLLARLQADVTLPALARELFAMQAGEYAQVQAKIAVVEAKLLAWHRADPCSQRLAGVPGIGPIGATMLTMKTPAPQAFRSGRQFAAWIGLTPKDHSTAGKARPGVITRAGDEGLRSVLVVGATALIRRVREGRCRDGDRFAAWVGKLLERKPPKLVAVALANKLARVAWKLMITGEAYAVKPVSTGAASAL

SEQ ID NO: 512731 - protein, 383 aa, unidentified
MTKPYDLSKPLVALDHDSTLVCVIEMSGSSWLVAATVPGVDRLQKLPVNPTRLLEQVERWRKEATRAGRTITRTVVAYESGRDGFWLARLLQGHGIEAHVIHASSVAVSREQRRAKTDRLDTEMLMRALLGWLRREPGHCRMVAIPTVAAEDARRPGRERDGLVAERTRLTNTIKAELALWGIQGFKPGLRKAAGHLEALRTLEGEPLPPNTLARLHRLLKRRSLLSEQITAIERSAAQAVERDPTGSNALILLLAQIKGVGLETAQMLVHEVLSRNLRDRRAVARYAGLTGTPDESGSKRREKGISKAGNPRVRRGLIQLAWRFLLFQPDAALVRWYRERTAGGTGAIRKTMIVALARKLLIALWSYASARVMPEGVVLKEA

SEQ ID NO: 512732 - protein, 345 aa, unidentified
MDEAYDGRQVVGMDLHRRRSVLVRMSMDGRKLETVRIENSPAALRRVLARCGQRPLVVLEATYGWYWAADVLAAAGAEVRLAHPLGVKAFSCRRVKNDERDAADLADLARMGRLPEAWIAPAGVRALREVIRYRHKLVGQRTSCKDQVHAVLARLGVEVTHSDIFGRGGGLWLDQLVLPAPYAAKVASLRALIGVLDGEIARLGQQAADQLAAGKGYQAVRELDGIGPVPAAVICAEIGDVTRFGKPGQLCSWAGLTPRHYESDVKVIRGHCSKQGSRLLRWALCEAIQHQPEGTRPRRAKEAIIARRGNQARNIAKTAAARVLLTQVFYALRDGYVRSAGRPAA

SEQ ID NO: 512733 - protein, 340 aa, unidentified
MQVTTIGVDLAKNVFQVHGITASEEVVFNKPLRRTQFLPFFAKLDPCLIGMESCSSAHHWARELTALGHEVRLIPPMYVKPYVKRGKSDAIDAEAICEAVTRPTMRFVATKTVEQQSLLSLHRARDLLVRQRTQLINNLRGLVAEFGIFIPKGLARVIGFAEDITLGEVLDLPDIANEVIRNLSEQLMALHKQVRWYEERLKQVAKEDARVRLLRTIPGVGAVTASAIIASIGDVHQFKNGREFAAWLGLTPANKSSGGKEKLGRITKMGDQYLRSLLVVGMTSLVRQTRSHPERASKWLTSLLERKPARVATVAMANKTARIVWAVLTRNEPYSPRTVA

SEQ ID NO: 512734 - protein, 365 aa, unidentified
MEFITSPERIKPLEYDLFVGLDVDKKSISVHLASLNGFRKRFSMPYEPDRLVAYLAKHHPDWRIVCVYEAGPTGFGLYDTLSQAGYPCLVVSPQLIPREPGNRVKTNRLDSETLATRLQGGELKGIRVPSPPYRKLRELSHFYIQNMYSIIRLKCQIKSLLLLNGVPFPSTAGGYTRAAMRQLEAGAADPVDRFILQRQLEALRWRLHLRRAIIREVERYCAGQPDLWESLELLKSLPGIGRVIRFMLLARLGDWRQLRNVNEAGHFLGLCPAEHSTGDRQRKGRITRSGDRCLRRLLTEACWTAITRDPELRAIYDRLRRNRQDNRGAKQAIVAVARKLTVRLSRVLMDRRPYEIREVQEMPAR

SEQ ID NO: 512735 - protein, 384 aa, unidentified
MNNDSIIFIGLDTHKSFIQVATLQEQRGAKPEHLGRIKSNKSALIKLAQQLQSKYPKATLHFIYEAGPCGYWTYRLLTSLGHCCYVIAPSLIPKKSGDRVKTDKRDAAKLAQLFKAEELTPIYVPEAEDEAIRDLSRARETAMKDLKDAKFQLKGFLLRNNIQATVNDNWSKKHLRWLTDLILPHHSQQIVLQEMIITISERMQRLQRMDNELLHQVKNWRYYPVVKAIQAMRGVRLLVALGTIAELGDLRRFDHPRKLMAYLGLVPTESSSGGKTRRGSLTKCGNSRARRLLIEGAHTYKHKANISVELQRRQEGLPKEIVDIAWHAQQRLCRRYQRLLQKGKHRNIVVAAIAREMIAYIWAIAREVVVSEADPKARIARLPA

SEQ ID NO: 512736 - protein, 337 aa, unidentified
MDHYVGIDLHSNNSYTAIIDNDNKKVFKKKTKNDLRLVLHALKPYRDQVKGIVVESTYNWYWLVDGLIEEGYTIHLANPSAIKQYEGLKHSDDLTDAFHLANLLRLGILRTGYIYPKEERPIRDLLRKRTQLVHQRTLQIQSFQNLVSRNLGKSMKGTAVKKLREDDVEHLFHDKHLVVAGKVSIATILFLAEKIKQLEKTLHKVAKLKDEYRLLMTVPGIQKILALTIMYETGPIERFAKVGNYASYCRCVGSKRLSNEKVKGKGNRKNGNKHLSWAYVEAAHHALRYEYVKRYYQRKMVKTNTVVARKTIAHKLARACYYIIRDQTRFDPARVFV

SEQ ID NO: 512737 - protein, 316 aa, unidentified
MSEPVYVGIDVAKSSFEVAVTGELQTLSLSNDEAGHSELCQVLVPLAPRLVLLEATGGYEQDLALALAAAGLRVSVVNPRQARDFARCVGKLAKTDRIDAQALRAFAAMLDAQGHEPRALADEQQRELTALVVRRRQLVGMLVAERQRLAVAHPRAKRSILQIMDAIAAQLHDVDGELKVHIRAHHADLARLLTSVKGVGPTTASTLLAQLPELGKLNRKQITSLVGLAPINRDSGTLRGQRHIFGGRADVRRVLYVAALVGTRFNPVLKAFYARLLAAGKPKKVALVACMHKLLVILNAIARTKSPWNSEIAMVV

SEQ ID NO: 512738 - protein, 356 aa, unidentified
MSHEVKYIGMDVHKEAIVIAVLNGSGKLVMETILETKASSILEFLHGLRGELHVTWEEGTWAAWLYDVLQPQVQEVVVCNPRRNALLKEGSKSDKVDARKLADLLRTGMLRPVYHGENGLRTLRELARSYQTISKDLTRVMNRLKALYRGWGIACAGTQVYAPRYREEWLGKIPQTGVRRRAELLYQQLDGLQALRREVRGEFLAESRKHKAAKLLRQIPCIGPIRAGLLIALMQTPHRFRSKRQLWTYSGLGIETHDSAQFRFVRGQLQRSKKPQQLRGLNRNHNHAMKEIFKSTATRASCGTGPFHDFYAALLDKGMKPEMARLTLARKIAAITLTLWKRGERFDAEQLKTQAA

SEQ ID NO: 512739 - protein, 391 aa, unidentified
MINIGIDVGKFKHCASGMDDKTGEILIKPFFFNNDQKGFDLFYSKTKQYLHRKHAVGMEDTGHYMVNLTDFLLDKKFTVKFINPRSTCLRRKELGMSAKNDRKDSILIAEMLSEKKFWRSVTRTTQETDKLREITRLYHQLQEQQNEDMNRLQRALDIVFPEVNKLSWTRYSKAYMQFLASYPTAASIASEDIRNLRNALKTDGRGRQCKLTAEDIKEAAKYSVGEDNIAVALEVQSIIAIITTRKQQIENLENKIEEFSLKLNSPIISIPGISHITGMTIIAEIGDIHDFSDAAHLISYAGMEPLVHQSGKYDAAHMPISKHGSRYLRKALYQAVFTVCKYCPTFNAYYTKKRNQGKTYRCAQGHCVRKLLRVIYKLLANNIVFDENLVK

SEQ ID NO: 512740 - protein, 358 aa, unidentified
MVLGIDPHKKSHTAVALEAATGELLGELTVGTDRRGCERLLAWARSFGPERRFALEDCRHLTGRLERFLIERGEASVRVPPKLMAQTRRSARTRGKSDAIDAAAVARAALREPHLPEAHLPGPERELRLLTDHRADLVAERTRVQSRLRWHLHDLALPLEVPAKALGRACWLLRLEAELSGLDGVQARLARELTGRCRALSAEIDALGREITQVTAVLAPELMTLPGCGALTAASIIGETAGALRFASEARFAMHAGVAPVPVSSGRTDSYRLNRRGNRQLNCALHRIAITQLRMHEPARTFMARKRAEGKTKREALRSLKRHLARSVWRTLCAAEIRREAMLASTDTSTPPALALAS

SEQ ID NO: 512741 - protein, 367 aa, unidentified
MKKISTAGVKQSKNCSEQKLTIGLDLGDRSNWYRVLDEAGDVLLEQRLSTTPKAMKEVFGKMPRSRIALETGMHSPWVSRGLSELGHEVIVAHARNVRLIGESRRKDDRFDARTLARLARIDPQLLAPVQHRSAQAQAHLMVIRARAGLVRARTSLINTARGLTKSYGERLRGCSPRNLNAEKARQLSPELQAALGPLLGAIESLSQRIYEYNQQIGKIAKESYPQVARLEQVKGVGTLIALTYMLTLEDPQRFRKSRDVGCYVGLQPGRRNSGQSEPQLHISKVGDPYLRTLLVQVAHHILGPFGADSDLRRWGLKLAERGGKNGKKRAVIATARKLAVLLHRLWVSGEVYEPLRNSRAVGLPAAA

SEQ ID NO: 512742 - protein, 366 aa, unidentified
MDAPTHGCAPLNRTVFGREELGLLFGGMDTHKDTLAVALIDPSGRRQDAITVANTVAGHGQLVAWLADHGPVQRLGIEGAGSYGRAVALALLAADIHVVEVPPALTMRERRRCRTLGKSDPTDAVAIARITAREDDLPPVAPAGLAEDLKLLVDDRDQLVSERTRVANRVHADLPIIHPGYQSRCRDLRSATALATARQIVAPDQTVRAELIRTRLDRLTELDTEIRVLERRLRALVTDSGTTLTEIHGVGVLLAARILGEVGDIRRFSSKAKFATSNGSAPVPASSGRTQRHRLNRRGNRRLNRALYIIAITQARADHPGRDYLQRKQREGKSRREALRCLKRRISDAVYRCLVTDATTPATSTT

SEQ ID NO: 512743 - protein, 482 aa, unidentified
MLKRTPPAAAADANPPASSGPRIRSAGNRHRARVVQQHHPVKEGTVQDSSQDSSQDSSSSVFGRLTHFIGFDWAKDVHQATAVDGRGAIVLDMGFEDSAQGWALLREKLGKLTGFAGFDRLGVCIETSRGPAVERLLEMGLAVYPVNPKAAERYRDRKRPSGVKSDPLDAWCFGDALRTDGHGWRQLRSIDPLTLELRLLCRDEIALIERRTALVNQLQATLQEYFPIMLRAFEDWTLPSSWRVLLAFPTPAHLAIAGKRKLEKTLRALQLHNPKTMQERLELFAQSPSFANPNAAVIAAKSFLATNLAAQLLTLQGQLGKYRKRIEEKFNEHPDHDVFGSLPGAGKKLAPRLLGEIGQDRELYDTPDALCCYAGTAPVTKKSGTMRIVSFRRACNKTLRATLHLWANLSRDQCAWAAVYYARKKEQGMSHANALRCLAQRWLKILWQMWQDHAHYDEARHAQNQLKHGSWVLQLLPEPATD

SEQ ID NO: 512744 - protein, 373 aa, unidentified
MNYNTVYVGMDVHKESFSLCCYTNEKEQAEYPQKVDAHYSKVLNYLEAMRFHYGDDVMFICGYEAGCLGFTLYHQLTSYNMKCIILAPTTMSKPTGKKKVKTDKRDAALIARCLAHHDYSPVHIPTEQDEQVKEYIRMRQDHKLALKKIKQQILAFCLRHNYRYDTTKSHWTQAHLTWLRSLEPEGLYQEILTEYLATYDQLTDKLERLDKRIEELASKEDYQENVSHLSCLLGVKIQTALSTLVEVGDFKRFASAQQFASYLGLTPGEDSSGEDQNRLGITKAGNSHIRTLLVEAAQSYTRGKPGYKSKALKARQKGNPADIIAYADKANERLRRRYYQLVLGQNKKANVAKTAVARELACFIWGMMTDNIH

SEQ ID NO: 512745 - protein, 362 aa, unidentified
MNRNTGMSAGQIIGTMNGLQVMGLDIAKHVFQLHTVDMGTGEIANVQIKRAKVLEYFVNKPNSLIAIEACGGAHHWARELTALGHSVRLLHAKIVRPFVSGNKTDATDARAIWLAVQQPGVKFVGIKTAAQQATLTLHRQRELLMKMRTMQTNALRGLLYEFGATFAQGRKALFKDIERALEELSTQLPQMVRDSLREQVGRIKEMGDAMLEIEKRLALQLKADPHMQRIAQIPGVGLLTATAAIATMGEASAFKSGREFCAWLGLVPSQTGTGGKVRLGGISKRGDTYVRTLLIHGARSVLSHAKEPSPWLQQIKQRRPANVVIVAQAAKMARTIWAVTAKEQSYQRGFQSVRPSAAMHAA

SEQ ID NO: 512746 - protein, 252 aa, unidentified
MSQPNPLCVGIDVSKTTLDIAANSDVVQFTVSNDSDGFDAITDELKKHPVTLVLMEATGGLETAVACSLQAEGFDVVVVNPRQARDFARAMGYLAKTDRIDARVLAQMSEVINRHPKRERFIRAMPDVERQILAAMVVRRRQLTAMLVAERNRLDPVHPQSRKSINIIIKALEDELARIDEDMNSHIMNHFKDLAGRLSSIKGVGTMTVAALLAEVPELGSLSRRAISALVGVAPINRDSGTMRGRRTIFGG

SEQ ID NO: 512747 - protein, 341 aa, unidentified
MNVTTIGIDLAKTVFSIHGTNQHGKVVVRKRLNRPKLLAFFAQLPPCLIGMEACSGAHYWARELTKLGHDARIIAPRFVAPYRKSNKNDDNDAEAICEAVSRPNMRFVPIKTEDQQAVLCLHRIRRGLTKERTAQINQIRGLLAEFGPIIPQGRYHARHRIPEILEDAENGLPMLARRLLNNINQRILQLDEEILAYDREIEAMARRDEQAKRLMAIPGIGPQTATAILASAPDPRQFKSGRHFAAWLGLVPRQYSTGGKPRLGRITKRGDKYLRTLLIHGTRAVIAKLADKNDRLSGWAKELVERRGYKRAAVALAAKNARIIWALLMNQTEFKTQPVEG

SEQ ID NO: 512748 - protein, 440 aa, unidentified
MKEKKSMAFPIIYPNAAGIDISSKEHYVAVNPGSSEEPIKAFGSYTEDLKAIALWLKGCKVDTVAMEATGIYWVSLFLILEEAGFDVVLVTAKHVKNVRGKKTDVSDAEWIRQLHSCGLLSASFQPDDFTRKLRTYMRHRKNLIEMAATHIRMMHKALEQMNIKLQHVIADITGKSGQEIIQAIILGERNPLKLVAFCDGRIRANKKESIIKSLEGVWKEEHIFELEQSFMLYHVYHEKIRECDQQIEKHLREKSGLNKKNEERIKVRSNKNNLNFDAKEILQSITGTDLSEIFGITETNAVELISEVGLNMEKWPTVKHFTSWLNLAPNNKISGGKLLSSRIPKKKNHAGQIFKMAAFAVQRSDNWLAKFFQRIKSKRGTQKAVVATARKIAVIFYKLLREKIKFNPVPIEMYMDGFKQYQIKKLKRHALTLGYQLVDV

SEQ ID NO: 512749 - protein, 402 aa, unidentified
MTYDYVIGMDVGKYFHHACVLDIDGTQVLSKRINQNEQSLRALFSAFSAYDHKVLVVVDQPNNIGRLTVAVAQDIGIDVRYLPGLAMRQLSRIHAGNAKTDIRDAYIIAHVAKNLPESLRSVDRVEEAFLQLKVLNGIDEDLARSYTRLINQIRSALVGCYPQFEQALRGQIIHRKWVLHLLARYGGPTKIKRLGKAKAAAFARRYKARNPEPVLDAIFAAISEQTVTIAGAHYAEMGVAMSAKDALLKLEHRQQIEKEVIELINDIPHTQFLLSMPGIGPKTAAQILMTAGDMSDFPSAGHLASYAGLSPRTNQSGTSIMSNSLNRAGNKKLKNALWQSSFASIRSHERSRQFYERKRREGKRHNAAVVALARRRLNVLYAMMRNHEHYHDPAPSQEDLAA

SEQ ID NO: 512750 - protein, 528 aa, unidentified
MPYQVRTSRREHRKSKSNSRKRQTVQKPNGVIAPRVKKVGGERFAIVCVDPAKHRSEWMMADYFGNLLIEQQTVEHRAAFFKLAVARIREAQEEHDIQDTIVVVERTGNYHLPPKRAFAKAGFETRVVHPFATKQYRMPADPGIKTDGNDLNAQHRAAVAGFGLCEFELESPYRELQLRARHRRNLVEKGAAMACQIREHLHLSMPGYASMFDRLFERPTALAIAARCDSPAKVIELGQARLSQHLRKNKIRHQVRTLEKVLAWAAQVADDNVQDGPMHHAIWTDLHELYQHFQRQITALERELAGDLVQTPYVRLMAIPGINVVSAAELAGEMGPITRYANANAITGRSGLYPSRHQSDQTDHDSGPIIRQANRRLRCVLMRIADNLSCHCNYYRGQAGVDEARGIDKRSSRVKIAKRFSRLLLACVAGDEPMRHPCFQQPDSILEKLRHFHHEHETPLDRLLADLETAVGQLPCNTRSREAEIVAQVLGEHAHRRAGVTTIGALLPAVLARLGIQTTNEKENWDRS

SEQ ID NO: 512751 - protein, 413 aa, unidentified
MEIVVERMCGLDVHKDTVVACVRTPGERPGRRREVVRTFGTFVSQLAELADWLVSEAVTQVVMEATGVYWKPVWYALEDQVELVLVNATQVSKISGRKTDVKDAQWLAQLGECGLLRGSFVPPQPVRDLRDLTRYRKRLVQDRARESQRVQKVLEDGGIKLASVASDVLGRSGRDMLSALIAGERDPNTLADLAQRRMRSKIPRLRLALDPAHFRPHHGRMLAGHLAHVDYLNAAIADIDKQVDQVIAPFAAAREQLMTIPGVGKLAATIILAEIGPDMSVFPTAAHLSSWAGMCPGNKRSAGKNRSGRTPQGDPWLSAILTECGWAVSRAKNNYLSAQFWQIARRRGQERAAVAVGHSILVIAWHLLSQPGSTYQDLGGDYFQRRIDPARRQQRLIKQLQALGLEVQIKQAA

SEQ ID NO: 512752 - protein, 417 aa, unidentified
MKKHNNCPKKSEPTSKRAKSRGPVQRDPKEVLAELVGKLREKLDPRVVAASAGEEDSRGKVRPNLDRLTVGVDLRDQWSHYCILGLEGERLAEGQLRTTPRDITEFFEALNAARVVVEVGTHSAWVREVICSYGHEVLVANPGLMEGSKRRKRKNDRIEANKLARLGRVDPQSLHPMQHRSREVRQDLVVLRARDALVAARTELINATRGLVKSMGSRLPKCSSPSFAQKVEETVPVELRDALMPVVRMAAALSDCIQGYDEKIEKLGREKYEHTALLRQVKGVGPITSLAYVLTLEDPDRFVKSRDVGPYLGLVPKQEDSGESQPQLGISKAGDTMMRRLLVGSAHYILGPFGPDTDLRRYGLRLCERGGKNAKKRAAVAVARKLAVLLHCLWVSGEVYEPLRQGMSATMTPAAAA

SEQ ID NO: 512753 - protein, 416 aa, unidentified
MICAAIERCAGIDVGKTFLAVCLMTGPLEGEPRVERRRFGTVTAELEKLRNWLQQEGITHVVMESTGSYWKPVFNVLETAVQVYLANPQEVKNRKGHKTDDKDGWWLAHLLRHAMIHPSFIPPRAVRQLRDLTRRRRRMIGNATAEKNRIQKVLEDANVKLGNVLSDVFGVSGQLMLEALLKGKAKPQEIAEFAQRRARQKIPQIIESLNDHRMSAHHRRMIRYSLEHMRFLEEQIGKLDEDIVAEIREAGLVQQWQLVQTVPGMQEASAANVLAETGGDMKQFPSSKHLSSWAGVCPGNNRSADKNRSSRTTGGNPWLRSTLTECAWAAASKKGCFLKDRFWRITTKSGGKKAPAVIAVGHTVLTLIYQVLTSGKPYQEHNQPPLDEPKRQRLIHHHVRRLGKLGVPVHSFSRRS

SEQ ID NO: 512754 - protein, 308 aa, unidentified
MEQYVGLDVSVEETSVCVIDGAGKTIRELKVPSEPDALLAALTEDACAIQRVGLEAGPLSQWLYGALAEAALPVICVETRHMKAALSAQIQKSDRNDARGIAQMMRVGLYRAVHVKTLASQKRRMLLTSRRLLQAKALDIENDLRGTLRNFGLKAGPVRTVKFEARIREPVAPHPDLAVIAEALRIARSVLREQIAVLNRQLLAVVREDEPCRRLMTVPGVGPVVAFAFRATVDVPARFKNSKAVGAAFGLTPRRYQSGEIDRMGRISKCGDAMMRILLFEAAQALLTRTRKWSWLKAWGMKLPATGV

SEQ ID NO: 512755 - protein, 420 aa, unidentified
MQVLYERCAAVDVGKDVIAVAVRLPGDGPDGRQIIKRTFRTFYGVLAEAARWLTSLGVTHVAMEATGIYSMPACHALIEHGSFEKVLACNAGHVKNVPGRKTDFSDAEWLVHLLECGLLAGSFIPPAEVKAARDVLRYRAKLARQRVSEIARLGNVLQDAGIKIDSVASSMATKSGRAMIEALIDGERRGPVLAELVKGKMRAKIPDLAMAPEGPVGHHALMCRLHLDHTGHLEAMIARLDVQIEAMMTPFRAARDLLITAPGIGPLSAAAVISEIGADVTEFFPDDAHLASWTGLCPGNHESAGRRRSGKRRKGNQHLQSILVECAWAAVRHDGYLKSLYHRHVMKWGGYRSSTAKNKAIVVVAHALIVIIWHILATGKPYHELGADYFTRRLDLDRETRRLIARLEALGHQVTLQPAA

SEQ ID NO: 512756 - protein, 338 aa, unidentified
MAIVTVGIDLAKNVFAVHGVDVAGKVVLQRPCVPRAKLLELVASLPPCLVGMEACSGAHHWARLFAALGHSVRLMAPKFVVPYRLSGKKGKNDAADAAAICEAVSRPSMRFVPPKSLQQQSELMVHRARQGFVAQRTATINRIRGLLSEFGIVMPQKAATVRREALLHLEDLPGWGNTVIGDLLSEVHRLDERVAQFDRHIEQIARDNAAARQLMQLPGVGATTATALVAMIGRGQEFRCGRQLAAWIGLVPGQYSSGGKQRLGRITKAGDPYLRMLLILGARSVLQTAKDKTDPVSRWAVQLAARVGYWKAVVAIAAKNARMCWAVLSRGESFRLPA

SEQ ID NO: 512757 - protein, 425 aa, unidentified
MNQDNQSFAAFIGLDKSDQKINVTLQRCSTARSERSIIQGSAEALHPWVAALCARFPHQPVAICVERPAAGLIHALMGYDFVVLFPINPVTLARYREAFTPSRAKDDPTDADLLCELVAQHREQLKVWQPDDICTRKLGHLTQARRSSVNMRTRLSNQLKALLKGYFPQALELCGEDLTTPLACAFLQKWSSLQQLKKARPETIRRFYYAQNARRGDVIEKRLTLIAQAIALTNDPALIESSIVTLQALTLGLRAVHTAIARFDREIARTFTQHPDASLFAALPGSGTVYSARLLAAFGSRRERFESAEALLNFSGIAPVLKRSGQTTIVHRRYARPIFLHQSFIEYANESIRHSLWARAFYQMHKAAQQSHWVIIRALAYKWIRILFRCWQQRTPYDELRYLKSLQKSRSPLLQYLAQPNAQTV

SEQ ID NO: 512758 - protein, 330 aa, unidentified
MALKIVYKICCGIDVHKNFVVACIAKTDKQGVTTYERHHFSTYTKGLKQLLKWLLDRNCKDVCMESTGKYWIPVYNVLEHDCSIVLAHPKYVKAIRGKKTDKKDAKWIADLFKHDLVAGSFMPPADIRQLRDLMRYRFKLTCFKSSEKNRYQNCLTVSNIQLGNVVSDTFGKSSQKIIAKILENPDDTSFDIGSLIHGSMKDKLPELELAIDGYITPEQAAKLKIIKEHFDNLESRKAELEELILALANPYQQEISIILTAPGFKNTFTAIGIISEIGTNMEAFPSAKHLCSWAGLTPTNNESAGKKKSVRVSKAGCYIKPLLVYCIVDI

SEQ ID NO: 512759 - protein, 324 aa, unidentified
MFYLGIDVAKAKIDCCLILENSASKKKTKTFSNMPKGFEQLQTWLNHHAASSTQTIILMEATSIYHERLAKSLFGAGYQVCVTNPARARYFAQSMSKLNKTDKVDSEVLARFAMTADLHFWQPLPAHIQLLNALLDRRAVLCEDLQREKNRLEKAESTFTIEPVLQSIHKSIKQLNKHIQDIDQQIDDHIDQNPDLKNDKELLSSIPAIADRTSLLMLSFLRSYTFERASQAAAFVGLVPIQRQSGSSIHGKSRLSKAGSSKIRAGLYMAAIVATRHNPHIKEMNERLLANGKTKMMAIGAAMRKLVHLCYGVLKHQRPYQVDY

SEQ ID NO: 512760 - protein, 453 aa, unidentified
MARKRKKETQTNHAVLPVMRPDAAGIDIGATEIFVAVAADRAAENVRSFPTFTQDLYLLADWLKQCGIKTVAMESTGVYWIPLFQILEDRGFEVCLVNARHVKNVPGRRTDVSDCQWLQFLHSVGLLRASYRPEQEVCAMRSLLRHRESLVQMAATHVHHMQKALDQMNLQLHHVISDITGQTGLAIVDAILAGERNPVVLAKLRNDRIKASEEVIAKSLVGDYRPEHIFTLQQSLAAYRSYQKFIDDCDREIRRMLEEFKPPRQPDACASDTQKRQTKTSYSEGGLGTELKRVFGVDLTKIPGIRVGIAQTLFGEIGPDFTKFRSASAFASWMGLCPDNDISGGKVLWVGTRKVKCRAATALRMAAQSLHHSKSALGDFYRRMRAKLGAPKAITAAAHKLARIIFHLITTGHQFDESKFAADQLRYQKKQEGKLRAKAKAMGFTLIPLGQPK

SEQ ID NO: 512761 - protein, 339 aa, unidentified
MAILYVGIDLAKNVFAIHGVDEHGKAVLVRPSVPRARLHQFVAALPPCTIGMEACSGAHHWARLFVQHGHTVRLMAPKFVAPYRMSGKRGKTDAADATAICEAVQRPNMRFVPVKSEDEQARLCVHRVRQGLVEQRTATINRIRGLLSEFGIVLPQKAATVRRDAAAQLEDLPGWANTAVGDSLSELHRLDERIAEYDRHVVLMAREDERSRALMQLSGIGSTTASALVSTIGNARDFKNGRQLAAWLGLVPGQYSSGGKTRLGGITKAGDGYLRTLLVLGAKAVLAAAKNKDDRLSRWAMALEVRRGYWKAVVAIAAKNARMAWAVLAKGENFKPLEA

SEQ ID NO: 512762 - protein, 348 aa, unidentified
MRFYTTQHKFYCGIDLHARTMYLCVLDQEGKILLHRDIKSKPDVFLRTIEPYREDIVVAVECIFTWYWLADLCSQENIPFVLGHALYMKAIHGGKAKNDKIDAHKIAVLLRGGMMPMAYVYPSDMRSTRDLLRRRTHLARKRAELIAHIQNTNHQYNFADMGRVSRKCDRIKAGVTDRFSDPSVQKSIELDIALIEHYDKLLNHLEHELSLIAKVHDADSYFRLRSIPGIGRILGLTILYEIHDINRFPTVQDFVSYCRLVKSAKQSAGKIIGSSGKKIGNAHLKWAFSEAAVLFLRRHPEAVKYRAKLERKHGKAKSLTILAHKLARAVYNILKRREVFHPEVFFAK

SEQ ID NO: 512763 - protein, 464 aa, unidentified
MKTKKQIREKKKRRIRKHLEQINLFAAGIDIGSKSHYVSVPVELDDHPVREFPCFTGDLQRMVDWLVEIGITTVAMESTGVYWIPVFEMLEERGLEVLLVNARHVKNVPGRKSDVQDCQWLQQLHTYGLLRGAFRPDEEVVALRTYTRQRDMLIQCAADHIRHMQKALRLMNLLLENVVSDIKGLTGMKIIRAILAGERDPIKLAQFRDGHCKKSEKVIASSLVGHYRDEHLFSLRQAVELYDTYQAQIESCDHVIEAQLERMGSGNDRSEIPPTKKRKTKSCPDFDVRGDLYRVIGVDLTQIDGLNEASVLKIVSETGTDVSAWPTEKHFASWLGLSPGNKITGGKILSSKTKPSANRAAEAFRMAAFGLFNSKSALGAYCRRQRARLGAPKAITATAHKLARLFYSMIKHGSEYVDLGQDYYEKAYRDRVTKNLEKRAAAMGFNLVPKEKNEELLNLALSTV

SEQ ID NO: 512764 - protein, 355 aa, unidentified
MVGSISEAKSSVSGVTDPYCRTEHCGKIHPYRCDKEVGVLGIDVSKDNLITSRRGKYENNLKGYEKILDMKPCTIVLEPTGVYSIKPSQYFKEKGIRVLQVSPNVLSREKDFRGKKTDFYDAEKLENMVDKAKEYEYNVLRELVTLYLFLKDMEVKQKNRLKRALFLVSDNDKINKERLERLASGDFAQEVLYQLEYTPIVLEEVKILAKALFETQEKLKEVKEMIESQVPEDHVLLTIPGVGKLAAGIIIGVVGDIRRFPKPESFVAYCGLDPVVERSGKAVVSKGISRRGNKYLHSLFYFLAQMNCSKNPTLLRFYEYHKDKLHGRKLYTALARKLAKVVWSVWYNNKPYEPK

SEQ ID NO: 512765 - protein, 338 aa, unidentified
MKLYGGIDLHSNNSVIALLDDNDRAVYRKRLPNDLGHVLGQLEPYRDDIQGLVVESTYNWYWLVDGLMDTGYRVHLANTAAVVQYEGLKYGDDDSDARWLAQMLRLGVLPEGYVYPKEERPVRDLLRKRSHLVHQRTSNLQSVQNLLARNRGVSVSANRVKGLAFEEVQRLLGNEDLSLAVNSSLSVMHCLDEQIERIEKTAKQRIKLKPQFSLLLSVSGIGQILGLTIMLETGDIGRFDKVGNYASYCRCVGSERISNGKRKGRGNTKNGNKYLAWAFVEAANFAVRYNPRIKRYYQRKRAKCDGVVAIKTIAHKLARACYYILRDQVPFDQERAFA

SEQ ID NO: 512766 - protein, 362 aa, unidentified
MNQEETSRRLYTTQHPFYCGIDLHARMMSVCILDQSGEILVHRTMKTDPETFLKAIAPYRQGMVVAVECLCTWDWLADLCADAGIPFVLGHALSMKAIHGGKAKHDQIDSHQIAALRRGGMLPQASVSPATMRATRDVLRRRRPLAHKRAALLAHVQNTHSPYHLPAMGTKIASKANREGVAERCADAAVQKSIAVDLALITSDDALRRDGELPIVTTAKHHDAHTLSLLHTVPGIGTMLRLVLLDAIHDVHRVPRVQDVVSSCRLVQCARVSAGTRYGTSGATLGKAHRTWAFSAAAVLFLRDHPAAQKYLARVEKKHDTGHALTSLAQTLARAVSDLLKRPGACETETFFQRYTIREGSG

SEQ ID NO: 512767 - protein, 340 aa, unidentified
MEGVAVVGVDLAKSVFQVHGVDARGEVVLRRKLSRSKLLAFFAGLPRCLVGMETCASANYWARELMVLGHEVRLMPPQYVKPYVKRSKNDASDAEAICEAVTRPTMRFVGVKSREQQSVLVLHRTRLILTRQRTQIGNAIRAHLAEFGIVAPVGRLGFDRLIAVVADESDQRVPTSARACLSMLVDQHRLVLAHLLETDRAIRVHSRASELGRRLQEIPGVGPLVASALVATVPDPHVFKTGRGLSAWLGLVPRQNSSGGKERLGGITKAGDTYLRKMLFVGAMAVIRHAERYGTRKPWLIKLLSRRHPRIAAIALANKIGRIAWALMTSGERYREPVVA

SEQ ID NO: 512768 - protein, 348 aa, unidentified
MTEAYDGRQVVGMDLHRRRSVLVRMTEDGRKLETVRITNSPAELRKVIARAGENARVVVEATYGWYWAADVLGEAGAEVHLAHPLGVKAYTYRRVKNDERDAADLADLLRMGRLPEAWIAPPEIRELREITRYRHKLVKARTSYKDQVHGVLAKLGVPVSHSGIFGVHGQAWLDGLPLPQPYAGKVASLRQLAGELGAEIALLDKVPGDLLDGHQGYAAIQQLPGIGPVLAAVIVAEIGDIRRFPGPGQLGSWAGLTPRHYESDTKVIRGHVTKQGSRMLRWAVTEAIQRQPAGSRPREVKDAIIARRGKEAKNIAKIAAARELLTLVFYGMRDGRVRRLAAPRRPAA

SEQ ID NO: 512769 - protein, 369 aa, unidentified
MKSITYIGMDVHTTNYTLCCYSVEDDRFFAEIEVKPDYQEVLKYINRVKSQRGKEAEILCGYEAGCLGYSLYHQLMYHGVECVILAPSTMPVTPGKKIKTDRMDARRISKCLAYHTYSAVYVPTAEDDAVKEYIRMRDDGNNTLKRIKQQTIALCTRHGKQYDGKSYWTKRHLYWLEGLDFGNGVLNEVLKEYLVLYYQAQEKVETYDKRIEELSRSETYREPVEKLGCFIGIKNHTALAFCCEVGDFRRFPSAQQFASYLGLVPGENSSGEKQQHTGITKAGNSHLRRLLIEAAQQYGRGAVGKKSAALKARQAGCPTQIVAYADKANERLRRKFYRIALRSKRNIAKTAVARELACFIWGMMTEHYT

SEQ ID NO: 512770 - protein, 492 aa, unidentified
MSQRQRSPGKVESSPVEAPKSNKPPKPASRPPRAQAATLPILNPHAAGIDVHSDMHMVCVPGDSVSLQADSASAGLPAHVRKFGANSCDLAAIAAWLTACAVTTVAMESTGVYWIPLFELLEARGFEVYLVEPGQLSRCGARPKTDVLDVQWIQRLHTYGLLRPSFRPPDSIMALRGYHRQRQMQIRYAASHVQHMQKALEQMNVKLTEVLADLTSLTGRRIIEAILAGERDPRELAALRNVQCHNDQETIAKALEGTWRPEHLFALRQAHELYQFHHQQIAQCDAMMAAELAKLPNRAGDKPFAPKPRKGGRKQNTLTFEACGPLFKALGVDLTEIEVIDVATALVILAELGVDVSRFPTEKHFASWLGVCPRQYESNKSKKKRGPRKGKNRIAIALRMAAQGLGKTKSPLAMFYRRIKSRIGGRGAITATAHKLACLVYRMLKYGTEYVKQSMEEYERKVKQQMERSLRRKAAALGYELVAKPAPEPELA

SEQ ID NO: 512771 - protein, 491 aa, unidentified
MGRRRQGGRGNSGAVKPENEYGRGSVEHLRVVRRRCACLELHPSGGYPQCLAARAAREPRARFPVFAFIQDPTPVPEGEAIGMQVMHPRCAALDLGRSVLVAAVRVQEGREVRRECRTYQTTSRRLLELASWLVSQGVTHVVMEATGSYWKSVWHILEGQFQLKLANPAQIRNLPGRKSDVNDATWMADLLAHGLVRASFVPPAEIGALRELTRTRKQFVREIGRHTQRIQKILDIANLKLTGTITDVLGASGRAIVKALIAGETDPERLASLVNHRLTATRDQLIEVLQGRLTVQQRHLLQLHLKLVETLETSIAQLDQQIEQAVHPFRETVERLKEVPGLSDVNVPALLGEIGVDMSQFRTHRQLLSWARLCPRLDESAGKIHSTRTQKGAVWIKTLLVQAAWCATRSKNSYLRAQFLRLRARRGANKAILAVAASILTAVYYIIREGVPYKDLGLGYFDHIDRSRVTRRLVARLHHLGYRVQLSEAAA

SEQ ID NO: 512772 - protein, 315 aa, unidentified
MAMPVSVLTPIVGVDVAKNELVIFQAELDLLETIPNNKTAIKQWLKALPGAVEVAIESTNIYHLEFADLAHEAGCTIYMVDGYELSHYRKGVKIRAKTDALDAKLLARYLKNEHEELHPWIPPSPLYRRLLSLFRRRSALVQARVGLVQSWSNEPLLKTAFAAQVASMQKLEVLVEKMINDHLKEAGLLAQLKRCMKVEGIGFLTGARLIAAFQRGDFRNADAFIAFLGMDLRVSKSGQKDGRRSLTKRGDPEARRLLHNAAMSASRTSTWKGFYQEQRDRGFSTTQALVILARKLARIVFALLKGQSEYQPKAG

SEQ ID NO: 512773 - protein, 351 aa, unidentified
MFYAGLDLHRKYFTLCVLTSDGQVVCDHRRLPADLEPLTSLLRELGGPVTVTVEATLQWAWLHDRLTTAGFTVQVAHPQQVKLISHARCKTDPIDARKLAELTRVNLLPAIWVPSPEVRSWRQLIRGRAALVRWRTRAKNRIHGCLAAENLQVATTDLFGRAGREWLEHAPVSPTARREITVQLAVIAALEAQILGYDTDVKRIAKHPDAQRLQTIPGIGLFGAALLLAEIGTIWRFSTAHELAAYAGLVPSTRSSGDKTSHGGVSGASNHWLKWILIEAVQTLKRVPGPVRFHYERLLRAKGKPKATVAAARKLCTYIYWMWTQGLSYASWLEAETKRMGCPKQTLASSA

SEQ ID NO: 512774 - protein, 335 aa, unidentified
MLADEVDAVIGGDTHRDSHALEMAAPNGGTIGTLAIGNDETGYADAIAWITQNSPGPRVIVGLEGTRSYGVGLTRALQAAGFLVLEVEQPRRADRRRGKSDPIDAHLAALQVLRMPADRKALPRSDGDREALRILLIARREMTTVKTQQINRLRALLLTGDDADRELCRGPMSDAHLQLIARRRGRLDDTKEQQIRRGEARRLALAIRQATSELAANKKQLAELVASFAAGLLDKFGVGPVSAAQAIVSFSHPGRCRNEAAFAALAGVSPLQASSGRTVRHRLNRGGDRQLNRALHDIVKTRWRDCPRTHAYIAARRAEGKRPRNPALPQALRRP

SEQ ID NO: 512775 - protein, 471 aa, unidentified
MGKGSGNGTTRGDRRRNARRERLRALLPRDGAVIGIDLAEDKQALAVIDHDVRVLARKTVRVKAFRLGEALDWAVGQARAKGFAQVTVACEPTGPRWLQVQRLCAERGLPLVCIQPLMSHIAREQQDYTTHKTDESDCVLIARLAVELHCYVPEELDEAWAHLRHLGRRRQQLITMATASGQRILDFLSVAWPTVTETCVDPLKSVTWLAALQVVTARCGADPGRLAAMGTEAFTAAAGGAVAGWGGKKAWGPISRRVFAALTDTEGVVVCSRRGLLRRIADELGDLQRTRAQLRAVEADMVAVLGELGLSKLADIPALSAVGAAAILAETGDPRRYDSSSSLVKHAGMSPSDNASGTFLGDAHISRRGRPGLRLTVWRAVWPMLRFNPVMAAKYAAMTQAADDAAAAADTGSRQASAAAAAARARRAKARVACAASLLRWIYCLVVHGTSWDPDAASGPARRPAVPAEAA

SEQ ID NO: 512776 - protein, 362 aa, unidentified
MNKYIGLDIDSNKTVCCIVQAGEKDKYRTISSTIPAMKAFITGQRADGSKVHLVFEISGQAGFIYDSLIDCADGITVANPSKMTWIYRTAKKNDRFDARKMAVLLSIGEIPSVYMPSRVVRQWRQMILHRKKIVQQVTQAKNRIRALLKSEGFGRPYDKGSWWKKSNRFWMGRLVRDGGDIGSFDLWRMQLGDLIEELCTLENQLRTVTEYLDKYLSQKAEADLLMSIPGVGPRTVEAVLAYTDNLKRFDNYKQYCGYFGLTPKLDESGSSRRLGHISKHGPSVVRWLLCESGWKVIRKSKGVRAFYERVKGGQDGRKKIAIVAVCRKMLCIMRAMLRDNETFNEELVGKFCGRNKQVKDAA

SEQ ID NO: 512777 - protein, 343 aa, unidentified
MAIVAGFDVHRAQITFDAVDTETGELSRGRIDSNRPAVRAWTEHFPGQEIEVALEACTGWLFVCEELAAAGAVPHLAEPAETSARRGSKRRAKTDRADARHLRELLSQGRLPESWLPPAHVCEWRTRTRLRRTLVEQRTEWLQRIRATLFQHGVPAGEVPQRLLGRQGRAFLARVGLPEGAQERITVALRLIEAIEAEIQPLERELRRLARGQAGCQALMRQYGIGELTAPTILCELGDVQRLSSSRKAVRAVGLDVGVHRSDHRSRVGKLTKQGSPHARWALYEAAQSAARPGSPDHDAYLALKARGLSHTRTSLTIARKLARRCFHSLRELGPAALEPLVD

SEQ ID NO: 512778 - protein, 343 aa, unidentified
MKNITVLGIDLAKDVFQLHAVNEHGKKIFNKKVSRSALPELIAKLPVCKIVMEACGSSNYWSRKFKSYGHEVSQISPQHVKPFVQGNKNDKNDARAIVIASQQDDMPRVPIKTVEQQEIQMLHRYRESLVHDRTALGNRMRGYLREVGLFLVVGLSQVRKQVPLFLEDAENELTTEMREILSSCHKKLLDLDQEIECYTQKIERFCKKNPVCERLMQLSGVGPMIASIVYATMGSPSNFKNGRHFAAFLGLVPKEHSSGGKHCLMSISKRGDRYIRSLLIHGGRAVVKHAGKKTDYLSCWVQRVHKERGYNKAAVAVANKNARHMWAIMAYADKYVDHLKLSA

SEQ ID NO: 512779 - protein, 367 aa, unidentified
MMGWMAPLRHLSAKLLSDRISSEWEPSMGEVTTIGLDLAKHVFQVHGVDAEGATVLRKQLRRAQVLAFFSRLPPCLVGLEACATAHYWARELRALGHEVRLMPAQYVKAYVKRNKHDAADAEAICEAVVRPTMRFVPVKTADQQAAVLLHRGRERLVRQRTGLVNALRGHLAEFGVIAPQGLRNVGKLIAIVRDERDARLPDLARQVLQVLAAQIEQLEAAVAAIEKQLMAWHKSNPVSQRLASVPGIGPIIATAIAATVVEPSGFRSGREFAAWLGLVPRQNSTGGKHRLGGISKRGNQYLRRLLINGASANLLRSKATNADPWVIGLRRRRPPLVVAVALANKTARIAWAVMLREKEYQPRAVAA

SEQ ID NO: 512780 - protein, 411 aa, unidentified
MHNRQNYLYVGVDLHKEHHTAVIINCWQEKLGEIQFDNKPSAFSKFLLEVETYVCDGITVVFGLEDVGGYGRALAKYLVDHERIVKEVNPALSFLERKSQVMIQKNDSWDAECVARILVNKFNQLPDAKPNDLFWSIQQLVSRRNALVKAQSALKNQLHIQLNHHYPSYKKFFSELDGKTALAFWQQYPSPSCLEGANIKQLTAFLLDVSNNTCSVKKASEILKLVKEDGHTMKEYQETRDFLVRSIVRDIEFKKTEMKYIERELKQLVKLLDYQLETMPGIELVTASALIAEIGDVRRFPNANKLARFAGIAPVYFGSGGKGKTHKSKQGNRALHALFYNLAVQQVQVAKGSKLPRNPVFHAYYQKKLKEGKTKGQALVCIMRRLVNIVYGMMKYKTAYELPVVEEKEIV

SEQ ID NO: 512781 - protein, 457 aa, unidentified
MTGKEKGRRGKSSGSFSTINEHAAGLDVGSTFHVVAVRPDLDERPVRTFRSFSGDLHHMADWLMTLGIKTIAMESTGVYWIPVFEILEARGFDVVLVNARDVKNVPGRKTDVNDAQWLQQLHEYGLLRGSFRPRAGVAQLRTYLRHRERMVEYAASHVQHMQKALMQMNVQLHHVVSDITGVTGLRIIRAIVAGVGTPAQLATFRDIRCGVSEETIREALEGNYRAEHVFALKQALELWDFHQAKIAECDIEIEKVMKSLCHSCERPAKSIPPMRHAKNRNEPKFDVRSGLYTFLGADLSQIHGFGPYTVLRLIAECGDDMRKWPTVKHFTSWLTLAPGNKISGGRLLSSKTRRSSNRAAVLFRIAAVNIGRTQTALGAFYRRLSARVGKAKAVTATARKLAVLFYRALRFGLEYVDQGAHYYEERYKRRAVENLKRRAHDLGFTLLEKSELAQGVS

SEQ ID NO: 512782 - protein, 431 aa, unidentified
MNYNPNEKIAQITAQTLIIGVDIAKFKHVARAQDYRGIEFGSPCYFENTKQGFQYFLEWIYQLKQEQGMETVMVGMEPTGHYWLNLAHILKENEMKFVAVNPLHVKKSKELDDNSPTKNDVKDARVIAQLVKDGRYAEPTIPQGVYAELRVAKKIRDLLTVDLQTVQGQVHNWIDRYFPEFLTVFKSWEGKAALQFLRLEALPHELIDFSDQNLLAHLRKVVTRSVGLNKIQELKRAARESIGLRQGSSMAKLELITLLDKYDLIQMKFEELDTKIDNLIEKVPGVQQMLTIKGVGRDTVAGFFAEVGDLQEYSHPRQIIKLAGLSLKENTSGKHKGQTRITKRGRKKLRALLFRVCMIMVAKNSAFKALHAYYTQRPDNPLKKMQSLIALCNKLIRIFYAIGKKQFEFSEEKMLKDIPHMRAKIEVETAA

SEQ ID NO: 512783 - protein, 368 aa, unidentified
MQNTIVHNEGATSLEGAVGKVKLSGSIIKLGLDIHAKQYVVVAQYDQLLPKAARRFWPGEFVPWVEWLLRQGHTVHVVYEACGFGFGLYRELRAAGAQCYVIAPRKLDEQRTGVKTDPRDATTLCQRLSRYLEGNTRELAVIRVPSEAEEQARHVTRQREQLVHHRQKLEAQGRSLLISHTLPAPAHWWKKQTWTRLGKHLPGWITTRLEVARPALLSLQEQIESLTSQLEAAAPANIPAGLGKLTSVMLTREICNWHRFNNRRAISSYTGLCPGERSSGSKRVPGSVTKRGNPRLRAALVECAWRMVRFQPQYPPVKKRLAVLAKGAKATGAQRKKAIVAVARHLAVDLWRVHTGRLTAQQLGLNIK

SEQ ID NO: 512784 - protein, 323 aa, unidentified
MRTDPIASDRLVVGIDISKLSYEICYSVDGQLRSKTVQADQMDALVSELAAAAPALIVMEATGRYHQPLARALLERGLLVSAVNPRWVHSFAKSIGQLAKTDRTDARVLAHFGRAVPPRTLTRLTEQQCLLDELMMRRRQLVHMLAQERNRSEQATRDAATRSIARVIRTLESELREIDTDFDALIDSEPDLKRVTEILRSVSGVGDVTARVLVTEVPELGTLNRRQIASLLGLAPKVDQSGRRDGVRRIMGGRRDPRKALYMAALSASRYNPLIRRERERLQARSKPFKVWMVACMRKLAVLLNTLVAEDRLFDPTRHLASS

SEQ ID NO: 512785 - protein, 338 aa, unidentified
MTTIKYFVGIDIASRTFTTSVGGIPWKVVLKPQTFENTENGYLVFLEWLASYQVPAKQSVVCMEATGVYSEGLAYFLFAKGYQVAVQSPLEVKRTFKPNGPKTDAVDSLQIAEYACRHMDKLSFWHPRNEILEQIKALLATREQFVSQNVAHKNALQAIQRKMVRTPVAEQAHSQMMEQFKKQIDAIDHEIRRLIESDPTFKEMLLLLLSIPGVGLLLSAHMILLTQLSLQHKELASYLGIAPHEHSSGSSVFKHATSRHFGPAAVRKLLYLASCSVRTHQPQFQSYFARKTKEGKPAKVALNNIANKLIKIICALLLTKKAFIKNYHSVQPLALTGS

SEQ ID NO: 512786 - protein, 418 aa, unidentified
MTMKSDSTLIEILHPICCGLDVHKDKVSACLITVGDNGAPQHEIREYSTFTEELVKMKKWLIANNCSIIAMESTGVYWHPVYNTVEDAIDVILVNARHIKNVPGRKTDICDSKWLAGLLRHGLVRGSFIPVEDVREWRDLSRLRKTYTESMADYKRRVHKLFISSNVKIDSVVSDLFGLTGTNLIKLLCSNDEITLERVEACTKGRLKQKVSELYSSLHGYFRDHHRFQLVTMMESINVFKKQIDQINARLDSLTSKHKDLLDRLDEIPGIDKKSAQSILGEVGITLDEFKTMAAFISWAGLCPGNNESAGKRKSGRNAVRNHPFKTILVQVAWAAIKKKDSYYKAKYYRLKARRGARKAIVAIAHRIGKAIYNIIKNGDTYKDLGESYLNNFNKQSVLKSLAKRADQLGMKLVPCEN

SEQ ID NO: 512787 - protein, 320 aa, unidentified
MMAQNDLIVVGIDVAKDKVDACVRSLSSGQTFSSTAEGRRQLIRWLRRHKVGKAVMEASGGYERDWAKALREAGIAVRIVDPKRVRSFARSAGRLAKNDAIDAEMIAWFAETFGEAGYQAHDAERERLVQIVRARQGLIDLQTELQNRGEHLLPDVVQRVHARLLKKVAAELATLEAAITVTIKATPRFVELAEIIESVPGLAKTTSAGLIAAMPELGQIGNKPAAALLGAAPYDDDSGKRRGERHIKGGRRKVRNLFYMACLGAATRHNPVLKAFYNRLIAKGKEKKVALVACMRKLIVILNTMIARREKWDANRYAVS

SEQ ID NO: 512788 - protein, 315 aa, unidentified
MHIQQSFMVGIDVSKAHLDVAVEGKRAVVRFDNNAPGCAALTAAVAGAELVVVEATGGYEMAIVRTLMAAGIAVAVVNPRQVRDFARASGRLAKTDQVDARVTLHFARAMRPAQIPHIDDGRIALAALVTRRRQLIDMAVAEKNRLEHAPEAVAALIGETLAALRAQLARVDAAIALAIEAEPDMAARRNLLLTVPGIGEVSAAVLIAELPELGAIDDKKLAALVGVAPIAHDSGTWRGQRHIAGGRATVRCALYMATLSAIRCNPAIKTFHKRLRDAGKPPKVAIVAAMRKLIIMINTILKRRTPWNQPQQHGC

SEQ ID NO: 512789 - protein, 346 aa, unidentified
MHYIGMDCHITTLDFAVVNEAGRLVKANSVATSVNGFMEFVKTVPPPRTIYMEEGTLAAWALETCVRFREKLVITDAKKNHWIGSSGQKDDSIDALKLAQLARGGYIKEIHHPVGQRRRFRELMMAYHDTVRSTTRIKNKIKARFRQNGIQCTGTTVYSETHREEWKGKLPQEATLLLILDGLWRQLEQSEQTEEELLAAAKAQAKQYPEIKLFKDIPGIGFIHAATISAILETPYRFADKRKVWMYAGLGIMTRSSGGKTYSEKLSTDYNRLLKYTLKQAAEAAIHAKNNPFRRKYLDMTLLHGIAPHRAKLTIARDMLATMWAMWRKGEKYSPGIREKPACKQD

SEQ ID NO: 512790 - protein, 410 aa, unidentified
MEVLHARCAGLDVHRDTVVACARIVEDKTVHHYVEQFGTTTVELRRLREWLSGHGCTHIVMEATGVYWKPVWNVLYGGCELLLANAAHVKNVPGRKTDVNDATWLADLLAHGLVRASFVPDKPLQELRSLLRTRKQLVREKAQHVQRIEKTLQDANIKLTSCISDIMGQSGRAMLQALIEGETEPERLLTLASSRLKAPRSEILEALRGHVTPHHRFLLRLHLEQIVHLEAAIASLDEEVGHGLDPFRTQVAVLKTIPGVSDLMAQVIVTEIGTDMSRFPTVGHLLSWSGLCPRNDESAGKRRSTRLRKGAPWLKTQLVQAAWCATRAKNTYLRAQFLRLKARRGPRKAIMAVAASILCAAFHMLRSNVAYQDLGPDYFDRLEHGKLLRRLVHKIEHLGYAVTLTVPPAA

SEQ ID NO: 512791 - protein, 369 aa, unidentified
MWVWTFTRTAIDIALADAARETEVRHLGTVAGGTDAVTKALRKWISRGYRLHIVYEAGPCGFVLQRHFSALGWHCDVVAPSSIPRPPGERVKTDRRDAMKLARLSRVGELTPVRVPDSADEAMRDLVRGREDAVREQRNARHRLKALLLRNGVAYSGRSAWSAAHLRWLATVRLPHAAQQIVFQEYLHAITEAGARITRHEQALRDALPTWTLSPVVTALRALRGVQLIAAITLVAEIQDFWRFASPRQLMAYLGLIPREDSSGPRRRQGAITKAGNAPARRMLVEVAHLYRYPARVSPVIARRQAQLPKAVTDIAWTAQTRLCSRFRRLAARRVPHNKIVVAIARELCGFVWAIAREVTPEPNSSNSH

SEQ ID NO: 512792 - protein, 430 aa, unidentified
MKSNTQNAKIEAITEKTLVLGIDVGSETHYARAFDYRGIEYSKKPFKFSNTEAGFVTFKEWILDLKERHEKDKVVPGMEPTGHYWFNLGKFLQDNEMKPVLVNPHHVKKSKELDDNNPTKNDRKDPKVIAGLVREGRYMIPYLPEGVYADLRTASNIRFQLQAELTRIQNRISRWFNIYFPEYKTVYGKPDAKSGMLILKAAPLPEDILTLGIDGVNQIWRDAKLRAVGKARAKTLIEAAEHSVGSKEGAVSARMEIRMLLEDYESRNTRLQEVMILIEELVRKIPMAEKLLEIKGVGIRTVSGFLAEVGDISRFNNPKELQKLAGLALVENSSGKHKGETTISRRGRKRLRYLLFEVAMSLVSKNQEFRELHNYYTTRRLNPLKKMQSLMAIAAKLIRVFYAMLTKGVDYDPKKMVSDIKRPAVYLPAA

SEQ ID NO: 512793 - protein, 396 aa, unidentified
MRNVICVGCDLHDKNMLLMIGVNGKASVKKTWANDRQTRQAMIADLKKRAAEIGEARIVLAYEASGLGWVLHDELTAAGIACHVLAPTGIERSLKHVRRKTDERDAQRLLDLLRGHEFAGTPLPSVWIPDAQTRDDREVVRAREKASRKVTTAKSQIRCLLKRHDLHEEFDGWTNAGRTYLKQLVEHRLGFGASGALSSLLRELDVAHDEIARLDAALEELAKQPRHAEVLKRVRHKGVGLLTSLVFLTEIGPMNRFKNRRQIGSYLGLTPRSNESGQRGDRKGHITRQGPARIRRVLCQAVWTRLRCEEKEREAHEALTRGNPKRKRLATVARMRHWGVRLWHDFGEAQAVASGAVTPPPPASASPAVTPTPRKAARPPRTARQKMKEFFQPQPA

SEQ ID NO: 512794 - protein, 438 aa, unidentified
MRRKKNKATKKVHFESLPLIHPNAAGIDVGSKEHLVAVPPDRDPQPVRTFQAFTPELHELAAWLKRCGIETVALESTGIYWLSLYEVLEQYGFEIRVVNARHVKNVPGRSKSDVLDCQWIRKLHSFGLLNGSFRPEAQVRKLRTYMRLKDNLVVEGTQAIHHMQKALFEMNVQLSNVISDITGESGLRIIEAILAGERDPEQLAAFCSTRIKAPRQTVAKSLHGNWDEALLFCLKTALDTYRFSQNKIQDCDQCIERQLATFEIKTPLPDSKQTLQTQLHQVCGVDLTKIPGIKEQTAQIIISEVGLDMSRWNTEKQFSSFLGLCPNNLITGGKIIRRSTRKVYNRAADALRLCAQSLTHSKSALGAKYRRLRARLGAPKAIVAMAHHLARLVYRMLRYGQNYVEKGIHQYELKFRLQRIKWLKKEARSLNMQLVAAQ

SEQ ID NO: 512795 - protein, 493 aa, unidentified
MQTPPNSRSTKRHVRNARKLKSQSAKAKSEAPALLSDELQPVHRRAAGIDVGSAENYVAIPAEGLAAGESAVRVFGVFSEEQDALVEWLRGHQISTVAMEATGIYWLSLYDKLEAAGTEVYLVDPHGVKAVPGRKSDWIDCQWLQKLHTYGLLQRAFRPDPPVRRLRILTRQRAELVLCGVAHQQHMHKALIAMNLHLHLVVSDLHGETGMRIIEAIVAGQREARELVKLRDGRCHKSTLEEMEAGLKGTYDEEQLFVLEQALKAWKFYQEQMAQCDVRIEKVLAQLPTAKPAQAPVPPKPVATVPAPKQALRKRTQHGPNAATIDFRAALTRICGVDLIKVCGLNLMSVLMLIGEIGTDMSQWRSAGAFCSWLGLCPGAKISGGKVLSRRTRKVNNRASTILRLAAWAAGKTDTWLGRFYRRISARRGAPKAITATARKLACIIYHMMKYGEEFVWLDPIQCEGRAREFRLRRLRKEAEMLGFKLQELQQVA

SEQ ID NO: 512796 - protein, 351 aa, unidentified
MLIIGCNFHTRYQQIAMAEDSTGELLVERRLDHESGEAQVFYRSLPKPVRVGIEATGPIHWFERLLAELGHDLWIGDAARIRASEVRKQKTDERDAALILDLLLAKRFPRIWVPTPAERDLRQLLWHRHKLVSLRTMLGNQLHFLAMSQGLCRKKKLFTKRGRRELVALPLGPWARRRREELLKLLDQLEPPIAELDRAVLEEAKRREDAVLLMSHPGIGPVTALAFVLAIGPVARFQRSKKIASYLGLNPSEESSGGRRRLGAISKQGNTMVRWLLIETVHHAVSQDPELRQDYQRLKFRRGHAVAKVAIARKLAVRMYWMLRSGADYAQLVRKQGSPGGTLMNANSSLA

SEQ ID NO: 512797 - protein, 363 aa, unidentified
MKIMVGIDLHSNNALCGLMDESGQRLVHKKLPCDLTAILQLLDPYKDRIATIAVESTFNWYWLVDGLQDHGYHVVLANPAGMQPYSGMKYTDDVSDAYFLAELLRLNLLPTGHIHDRKTRPVRDLLRRRLLLVRQRTMLILSFKSLNERTLGQRVSLARVKAMKVEEAQARFTAPADQLLSGTEITLMGHLTAAITKLEQHLLGVAGKWPTYQRLQELPGIGKILGLTIALETGDAQRFADAGNFASYSRCVKSLRTSNGKKKGENNRKCGNKYLAWAFVEAAHFACRYDDQCRRFYDRKKQQTNPVIATKSLACKLAKAAWHVMKADVPYDATRVFGPARKNDFGEIGREPAKGSGPPSQQN

SEQ ID NO: 512798 - protein, 406 aa, unidentified
MEFVYERCCGIDIHKKIIVACLRNGKKAEIREFDTVTTSIKELAHWLLENECEMVAMESTGVYWKPIYNILELMEIPAIVVNAQHMKNVPGRKTDVKDAEWIAQLLQCGLLRASYIPDKEQRELKDVVKYRKSLTEERSREINRLEKMLEGANIKLSSFVSSLTGVSSKKLIKQAMTDEGVTEENIVSLLHATMRGKVNEILLAMNGVLTVVQRQLVKAILDHIEDMTKRIEQLDDIVGGQMKKYEDEIKQLDKMPGVGPTSAEIILAQIGVNMSRFPTERHISSWAGMSPGNNESAKKRKSGKTTKGNKILKSTLIQCAQAAIKNKTSFFYAQYQRLVVRRGANRAKVAVAHSMLIAIYHMLKNKVPFKDLGSDYYSQFNVKSKTDYHLRKLKELGVEIPVSAFV

SEQ ID NO: 512799 - protein, 360 aa, unidentified
MSSMTQSGMDVERAVIGGVDCHDQTHRFAALDALGRRLGDAEFPATAAGYVRAEQWLRCWGTVRMVGVESTGSYGAGLTRHLQAVGLTVVEVNQPHPHARSRRGKSDAEMAARKVLSGEVTTVPKDTTGVVESIRQLTVARAGAVKARTAALVQLGQLLVTAPAPLREQVDAKTLLGRAAQCTRLRPDLTRLGDPVQASKLALRSVARRITDLNHSIDELDEGLSPLVAKTAPRTLQRLGVGTQHAAQLLITAGANISRLRNEAAFAHLCGVDPIPASSGKTVRHRLNHGGDRAANSSLHMITVVRLRYCEQTRTYLQRRMNEGKTKREAMRCLKRYLARELFRTITADLKIMSGPLDGL

SEQ ID NO: 512800 - protein, 375 aa, unidentified
MSKIRFLGLDVHADTIAASVAEPDGEVRPLGIIPNRLESVRKMVAKLGPVNQLKACYEAGPTGYVLYWQLTAIGVACEVVAPSLVPVKAGDRVKTDRRDAAKLARSYRAGDLTAVWVPDAAHEALRDLVRAREDAKQDQHRARHRLSKFLLRHGRRPPEDVKKSWTLKYLTWIKEQVHFDQPALEATLLDYVHEVDHMAERIERLEKAIDVAIEKAPAEMRAVIEALQALRGVAKITAVSIVAEVGVLSRFDRPRQLMGYCGLVSSEFSSGNRIQRGHITQTGNAHLRRVIMEAAWAYQHRPWVGGALLKRQQGLEPGIKEIAWKAQWRLHTRYKKLSARGKNKNQIVTAVGRELLGFIWAIAVRTEARAAARAA

SEQ ID NO: 512801 - protein, 323 aa, unidentified
MNKYNEIFGVDISKDVFDVYGSKRGHNQFKNAASGFMFFLKNLPKKSLVVMEATGYYHYRLAQFLFKQGVLVSVVNPLSVKRFIQMKLAKVKTDKSDAKAICEYGQINQVPLYSALSDVQSECLQLFRLLDSYLKKRTMTKNKLHGEDVLGIPSKHVYRSLKRNRKHLDTEIASIETKLLSLVKQDQQAQLTLLKSIPGLGVKTALFLIVITDGFTKFETAAQLCSYVGITPTIRQSGSSVRGRSSISKVGNKKLRNLLFLCSFSACKHNKSCREIYERIVNKGKSKKLALIAVSNKLLKQAFAIAKSGNPYDEKFVSVLMAK

SEQ ID NO: 512802 - protein, 334 aa, unidentified
MYVGLDAHKRACYGTITDQEGTILKQGKFASSPEGVTTFIEDIDEASIAMEAGYCWQPLIDALKEKGYDVRLAHPQRVKAIAEAKVKTDKVDSETLAHLLRANLLPESYVPPRDIRELREMVRRRSFLVGMRTKLKNRIHAELAKRGIDLETPLFTRRGRELLRSLGLEAVDQLLPVMDALDVQIICISGSLRRMSGEDERARLLTTILGVGYYVAMLIVSEIGDVNRFPSAEKLCGYSGLVPRVRNSGDSVRHGGITRDGSRWLRWALTQAVLVHVRWDEDSELSRFYRRLAARKTKQEAVIATARKMLKVVFWMLRDGEPYHSGGLEPALGR

SEQ ID NO: 512803 - protein, 430 aa, unidentified
MKSNTQNAKIEAITEKTLVLGIDVGSEKHYARAFDYRGIEYSKKPFKFSNTEAGFVTFKEWILDLKERHEKDKVVPGMEPTGHYWFNLGKFLQDNEMKPVLVNPHHVKKSKELDDNNPTKNDRKDPKVIAGLVREGRYMIPYLPDGVYADLRTASNIRFQLQVELTRIQNRISRWFNIYFPEYKTVYGKPDAKSGMLILKAAPLPEDILTLGIDGVNQIWRDAKLRAVGKARAKTLIEAAEHSVGSKEGAVSARMEIRMLLEDYESRNIRLQEVMTLIEGLVKQIPMAEKLLEIKGVGIKTVSGFLAEVGDISRFNTPKELQKLAGLALVESSSGKHKGETTISRRGRKRLRYLLFEVAMSLVAKNPEFRELHNYYTTRRLNPLKKMQSLMAIAAKLIRVFYAMLTKGVDYDPKKMVSDIKRPAVYLQAA

SEQ ID NO: 512804 - protein, 341 aa, unidentified
MKKNIFFIGIDISKADFAASIYKTPKEPIVTKEAIPNNPKGFEMLLLWLKDHLIDRKNCRICMEATGVYSQAISYYLLFQGFPVSVEPPLKVKRAFDPVGHKTDPVDSKQIAEYAYRFQDELTSWKPRDETLEKIRQLLSVREQFTKQKVALKNAIQAYHKQRVQVALIKKAQKETLSQLEKQIARIDKELAKLINQDPDTLQKASNLKSIPGYGMLLAAHLLVITENFTKIQQYKRLAAFIGIVPYKHQSGTSVCKRAKIRHFGPMPSRKLLRLAAQSVATHDVTFRRYYLRKVAQGKAKALVLNNISNKLLKIACTIIRNNTRYIKDYRSIHPMYLKSA

SEQ ID NO: 512805 - protein, 349 aa, unidentified
MSMVCGLDLHRQQITFDALETESGEVWRGRVWQPDRERFRRWLCRDVARRAGGEPVAMAVEGCTGWRYVVEEIVAAGYEAHLAEPADTQAARGRKRHAKTDRSDARMLRELLQSGDLPESCIPPTDVLEWRERVRLYKSLVDQRRVWIQRIHAELFQHGVAVPEGAIRSTATRDRLLSNDVALTSAGRQRVRVGYSMLEATDAEAQSLKRDLQRFGHRQPACRALVEETYGIGGLIAVAVWSELGDCHRFSRSEQVVRHSGLDVSVDSSDRHRAHGHLTRQGPPTLRWALFEAAMNASHHRSPDHAYYSAVKDRHDGKLAAISVARQFARRCYHVLRNLDPDVVYAMPD

SEQ ID NO: 512806 - protein, 321 aa, unidentified
MNQLSGEISKGIGAEATQDKALGRVLKLGLDVHYRQVTVAMQEDGGRIKAAGKMGLGGFLNWVRTKLEQGWRIESCYEAGASGYWLHRQLVELGVKNLVVAPKAMGGAEAKRQKTDKRDSAQLCDALERYLRGQDKALSVVAVPTVEQEQNRALIRYHRQMIKDRTRAEARGKGLLCAQGIEVGGRWWESKGWTQLQSDPRLKDWMKEQLEDWRKKILSAQAEEKPLRKRIEALAPERLPKGVGAYSAAVLKYEMKGWERFSNRRQVASYTGLCPGIHLSDGRGKEGSINRCGNPTVRWTLVEMVWRLMIWQPQYGPVRRA

SEQ ID NO: 512807 - protein, 385 aa, unidentified
MKPNSQMTLDRYFRQCVGIDISKDKFTACLYMYDMAADTGCCTGSIDFPNNRTGFNQMVKWSRKEAQKGFPLGYLMEPTGSYYEPLAYHLHKIGQALYVVLPNKARKFCEYEGIKTKTDAMDARCLALMGCKNRKLRPWEPPLPIYRELRQLTRLRADLVKMQTQMLNHIEAIDYMESVAPEVRKSYEKLLDTIEKQLEKSEKNITAKLAQDKELKAKVERVATAKGIGVQTVTCIVAETQGFHLIGNRKQLTSFAGLDVKAKQSGKDDPKHHITKKGNAHIRAALYMPALSAAHCNRQMVQAYGRICDKHPDAKMIGVTAIMRKLLLLVYSLWKSGEVYDETRDKTHMPKKKKLMNEYGPEDCLQPNLEPVDWEATAKDGNPPF

SEQ ID NO: 512808 - protein, 388 aa, unidentified
MQDVADQSAAPTTIGADLCAIFISLELSRSTWLATSLSPGRGEKMSKHSVPAGDIAALLARFSELRRKACARTGKSFPIVVIQEAGLDGFWIHRVLLSEGIESHVVDAASIATSRRRRRAKTDRIDGETLLRALLAHKRGEPRVCSMVRAPTPEDEDRRRICRERKVLIMERVQHVNRIKGLLFSQGASGYEPLRRDRRSRLDALQTGDGRRLPQHLKAQVCRELDRLELLLEQIKAVEAERDALLDAEQTKASAPPPMLLGVRGVGPEFASVLWSEGLSRHFDNRRQVAAYAGLAPTPWQSGSVNREQGISRSGNSRLRTTMIQLAWLWLRHQPRSALTLWFKDRMERNGGRRRKTTIVALARKLLVALWKYVSAGVVIEGAMVRPA

SEQ ID NO: 512809 - protein, 340 aa, unidentified
MNEITTIGLDLAKHVFQVHGVDAEGRTVLRKQLRRAQLLAFFSRLPRCLVGMEACATAHYWARELSAFGHEVRLMPAQYVKAYVKRNKNDAADAEAICEAVLRPTMRFVPAKTAEQQAAVLLHRGRERLVRQRTMLVNALRAHLAEFGVIAPQGLRNVGRLIAIIRDEEDTRLPGLARQVLQVLATQIEQIEAAVTGLEKQLMGWHKSNPISQRLATIPGIGPIIATAIAAMVAEPSGFRSGREFAAWLGLVPRQNSTGGKNRLGGISKRGNQYLRRLLINGASANLLRSKATNADPWVIGLRRRRPSLVVAVALANKTARIAWAVMHRQENYQRMATAA

SEQ ID NO: 512810 - protein, 348 aa, unidentified
MLHFVGLDVSVKATSVCVVDDAGKVILEQKIPTEAADIIALLTSLGVSFGRIGIEAGPLSQWLVNGLMAADLPVICVETRHMKALLTAQQISKTDRNDARGIAQMMRVGLFKPVHVKTLVAEEQRMLLTSRKLLQRKLLDVESDLRGTLRNFGLKVGVVGSSRYEARVRELVEGFPRLAAIVEPLLSVRRVMRQQFAVLHKMLLDMVRGDPVCRRLMTAPGVGAVVALTYRATVDQPQRFVHSRAVGAHVGLTPKRYQSGEIDYDGGVSKCGDALLRTMLYEAAHSLLTHTRQWSWLKAWGMRVAQRRGMRRAVVAVARRLAVVLHRMWVDGSEFRWRKDSAAVPAVT

SEQ ID NO: 512811 - protein, 412 aa, unidentified
MQIIHPCCCGVDVHTKTVVACLIKQGKKQVRTFSTMTDDLLAMSDWLVAEGCTHVAIESTGVYWKPVFNLLEGVLEVILVNARHVKAVPGRKTDVRDCEWLADLLRHGLLKASFIPPLYIREIRELTRYRQTLVKEQTAVANRVQKLIESGNIKLGQVATDVLGVSGRQMLRALADGEHDTEKIADFARGQLKKKKNELQRALEGRLTKAQRFVLGELLKRIDELTAAIVRVNEELRAEVSRSTDPFVAEAVKLLETIPGIGQRIAETIISEIGVDMSRFPTDAHLASWAGMCPGNNESAGKRLSGKTNTGSTYLRDALIQAAWAATHTKQTYLAAQFRRLVRVKGKKRALIAVGHSILVIIYHVLKQRASYQELGGDYFDKQNTEKLRARLIRKLESLGVKVTVEMMAEAA

SEQ ID NO: 512812 - protein, 364 aa, unidentified
MKKSSKKQYRSAVVESKPEKVVGLDLGDRHSHYCILTSSGEVMEEGRIQTTAASLEKHFGSEARMRIALEAGTHSPWVSRLLKGYGHQVIVANPRKIPSLRRSKSKNDRNDARQLARMAAFDPELLHPIEHRSAERQQDLNLIHTRSVLVRARTMLINSMRGLVKSTGGRLPACSSEAFPEKVPAAVPPALKAACAPLLEQIAQINQTIAAMDKQIDGLDKKYPEIAILRTVPGVGPVVAACYALTLDSPQTMPTNRQAGAYLGLRPGQQQSGDSNPQCGITRTGNTYLRSLLVQSAQYILGRLGPNSELRCWGLKLAASGGKRGKKRAIVAVARKLAVILLSMWRNRKKFEPFPQSATQLATA

SEQ ID NO: 512813 - protein, 346 aa, unidentified
MNQIIRIGMDTSKHFFQLHGVDASERPVLRRKLRRQELLMFFAKQAPTVIGMEACGAGHYWARELGKLGHKVKLIAPQHVKAYVKRNKNDGRDAEGLCEAMSRPTMQFVPVKTEEQQAALMLVGVRQQLMTRRTQLSNAIRGYAAEFGLITAKGLVKVEPLLAQIAQDESLPALAREMFTLQSRDYTRLQLELKAVEARLMAWHRANPDSQRLAKIPGIGPIGATTLVMKAPNPRLFPSGRHFAAWIGLTPKDHSTAGKTRIGKITRAGDEMLRSVLVAGATSVIQQAKKSRGRPSPWLVALLARKPPKLAAVALANKTARIAWKLLTTGESYDGARVPVASKRAA

SEQ ID NO: 512814 - protein, 320 aa, unidentified
MKFYTKQHKYYCGIDLHARTMYVCISDQQGNMLVHKDISTNADYFLKVISPYKEDIVVTVECIFCWYWIAGLCAAENIPFVLGHALYMKAIHGGKAKNDRIDSLKINALLRGGMIPTAYVYPSRMRSTRDLLRRRNHLVRKRSELMAHVQNTNIQYNLPEIGKRIDRKKNHEGVAERFTDPSVQKIVEVDLEMIDHYNTILSRLEWYIEKTAKGHDSKTYYLLKTIPGVGQILSLVILYEIHDINRFPRVQDFVSYSRLVKCAKESGGKKFGTSGAKIGNAYLKWAFSEAAVLFIRGDKRRQKYFDKLKKSMEKESLSPY

SEQ ID NO: 512815 - protein, 389 aa, unidentified
MLHDHPSDEPTAIRTHIGAIFVSLELSRSTWLVTSLSPGKGEKMSKHSVAAGNVAGLLTLFAELRRKAEARTGQSYPIITIQEAGLDGFWLHRVLQREGIESHVVDPASIATPRRRRRAKTDRLDGETLLRALLAYKRGEPRVCAMVVAPSSEEEDRRRLCRERRTLIEERVIHTNRIKGLLFAQGICDYAPMRRDRRARLDALRTGDGRELPSHLKAQIGRELDRIELLLGQIKAVEAAQDALLAAARRPASQEDTPDPVTMLLALKGLGPNFAAVLWSEAFYRQFANRRQVAAYAGLAATPWQSGGIRHEQGVSKAGNPRLRTTMIQFAWLWIRHQPQSALTRWFKERSQQGRKRAIVALARKLLVALWKYVTQGVVIEGAVMKPAA

SEQ ID NO: 512816 - protein, 362 aa, unidentified
MEFFSGLDVGMDETAICVVDDKGKVVLETAVVTDPEAIKIALKPYLGRLRRVGHEAGALSPWLHPELLKLGLPMVCLETRHVRAALSAQRNKTDKADALGIAHIMRTGWFRKAHIKSEACYRLRLLLTHRRNLKRKVLDLENAVRHSLKAFGIRISGTGRGGFAQAVREAVAGDALVSELIDAMLNARAALWKEYCRLHDLVVKLVAGHELCRRFMQIPGVGPVTALSFMTAIDDPSRFKRSRDVAAYFGLTSRRWQSGTSIDVKGRISKAGDGDVRRALYEAASALLTRYKRRDKVKTWGMVIAKRTCHRKAVVAVARKLAVIMHAMWVDGTFYCGDSAATAADVRAHAAVKDSKLLGRYA

SEQ ID NO: 512817 - protein, 348 aa, unidentified
MTIAMIGLDTAKNLFQAHGLDEGGRAVLRRKLHRSELVGFFEQQPRCTVFLEACGAGHYWGRLLSGFGHEVKLIAPEAVRPFVKRGRKNDAADAAALCVAGTRPETRFVPIKSVEQQAVLALHAGRSLLVKQQTMLANALRGLAGEFGVTVPRGLHKLEELTALVSAEESIPAAGRQAMAELYAHGRAVAERVATLEEQIVRHARQDATARRLATIPGIGPITASLIAATVGDHIGAFRSARHFAAWLGLVPRQHSTGGRTRLGGITKAGNAEIRRLLVLGATSMVWRATCWDSKAGLWVRGVLARRPVRLVTVALANKLARIAWALMTRGEVYQAQGRAPAAAAAVA

SEQ ID NO: 512818 - protein, 350 aa, unidentified
MKKICIGIDVSKETLDVTVIHIESYELMEKLGYSKFENRPSGFRSMTAWVRKVIKSRGQMDEALFCMETTGSYDLPLCHWLHKNGLNVWRESALQIHCSKGFQRGKSDKEDSEIIAQYAARHQNRYTAFVPDAEAIADLKELICYRDSLVERRKECKVRLANKKETLVNKNSKAWKCIERLSKAEIKRLDKVIGECDEEIRNLMKEDEQMEKNYQHLTSIVGIGLINGAALIAYTGNFKKITTPNKMSCYCGCFTFYEDSGTSVHRKSPYRNACCKMLKGYLRMAAKSAMLANTELKKYSERLREKGKPYAVILNNVANKLLHIMFSLVKHDYDYEYNHEVVRRMEREIA

SEQ ID NO: 512819 - protein, 398 aa, unidentified
MISVGIDVSKEKSTICILKPYGEIVSRPFEVCHTEKELSELTSMLLRLNDDVRVVMEATGIYHLPVLCYLKEKGLFVAVVNPFEMKEYRCQGLRRVKTDKQDAVTISNYGIDHWYRLREYEAEESIYAELKLLGRQYRHYMRMRVESVLELTHLLDYTMPGIKTLLKGWNETNGKDKLGDFAEEYWHYDNITKKSEEQFIESYLKWAKEKGYHQSQDKAVKIYALAKEGIPTVSSDTPSTKMLVQEAVRVLREVDNTLMTILTQMQALAKSLPEYPVVRAMGGVGNVLAPKLIAEIGDVRRFHSGKALIAHAGIDAPPYQSGQFIGTERKISKRGSSSLRKIGYEVMRCLKTHKEPEDAAVYRFILKKEKEGKSKRAAKIAGLNKFLRIYYARVMEVY

SEQ ID NO: 512820 - protein, 393 aa, unidentified
MDYRSVVQVGLDVHRTFSTASLRDAAGHIITRQRLDHADRDKLLQQIKRWPQGTPVVLEATFGWGWLSDLLLALGMQPHLASSRKVAAWRDGRGLAKSNKTDANLLSELWSERTTIVRGKTHRWWEVWLAPPAVRQQRELLRHRMYLVQSQTRLKNRIHATLHRHGILHAYTDLFGVKGLNFLQQLTQDMTLVESARQTLRDDLTLLKTLRQHIAQATRQCRASMRRSADGQRLMTLPGISSVLGYTILTEIGQVDRFDNCRSLLRYSLLAPMSDDTGEPCEGKPIGRRIGHAGRATLQWAFIEASHTAVRRSPFFREIFNRRTHDGKQDRGRGYITVANRLCRIAFSMLRHQTNYQEIPPARPGGMKHQSSSRPEVGQLYLELARNRQVSEA

SEQ ID NO: 512821 - protein, 330 aa, unidentified
MKKNYYSGIDISKKTLDIVIYDPPTQKAKIQMKVKNNQKGYNDMLDAFIQNGISISDVFICLEHCGIYGLELGCFLEEKQVMFCFCSPLLIKKTMGLIRGKSDPLDAYKIAKFCYLYRDELHASKMPTSVMLEIKTLIAERNRLVKAHKVEKQVLTDLHSQLSEATLKRTKQRKSLLNSDIKAVEKEIISLVQVQTEIKTNFDLLKTIPGIGLINAVMMILCSNNFNGITNARAFACYCGVAPFEHTSGTSVKGKTRVSHFANKRMKADLTNAARSAIVHDPETRKYYLRKKAEGKAYGIIVNAVKFKLITRAFAVINRRTPFVVLRKAG

SEQ ID NO: 512822 - protein, 403 aa, unidentified
MVSVGVDVSKGKSTVCMMKPYGEIVKSPYTINHTKDDLLAMVAFIKTLDEEVWVVMEDTGHYHWPILLFLYEQGMRVTCINSLRMKKYCSQSIRRAKTDTIDSVQIANYGLTYWHELEAYVPRTEVFQALRTYSRQYYQYTCVETKIRVNFQNLLDQVMPGISARLADQNGRHKLTEFVYRYWHFYNITNHSKTVFVRSFSSWAKKQGYRSNEFIASEIYELAQTGIPVLPCNDSTKIIVQQLAQTLLTVDQTRIDILSRMDELARQLPEYDLVKKMSGVGDKTVSLLISEIGDVSRFKTKHSLIAYAGIDAPPYQSGKFDATQRSISKRGNKYLRRIGFEVMLSLLRNKPSSDPVYMYILKKKSEGKSSKTAMIAGFNKFLRIYYARVMELYSYIDNTRIAA

SEQ ID NO: 512823 - protein, 388 aa, unidentified
MNVGADKSEPLTAIHTDLGAIFVSLELSRSSWLITSLSPGGGEKMSKHSVPGGDFAGLMERFAQLQEKARLRTGQSFRIIVVQEAGLDGFWIHRALQNEGIESHVVDAASIATSRRRRRAKTDKIDGETLVRALLAYKRGEPRVCAMVKAPTPGEEDRRHLCRERKALTAERVRHVNRIKGLLFSQGISGYQPLRRDRRQRLEELQTGDGRAFPQHLKALVNRELDRLELLLKQIKTVEAARDALLAVEQTAMPAPAAMLLDIRGIGPEFAAILWSEGLFRHFENRRQIAAYAGLAPTPWQSGAVDREQGVSKAGNPRLRTTLIQLAWLWLRNQPRSALSLWFHERVSRNGGRLRKTTIVALARKLLVALWKYVTAGVVIEGVTMKVA

SEQ ID NO: 512824 - protein, 426 aa, unidentified
MKYTQNERIMQITEKTLIVGIDVGSEKHYARAFNFRGVEYGKLLVFNNNAEGFAKLKEWTGQIAGSKGFTDVILGMEPTGHYWFNLAENTKKSGMRIVLVNPHHVKKSKELDDNNPSKTDQKDPKTIAMLVKDGRYMEPYVPEGIYKELRTAMESRWRIIKELAAIKNRVSRWICIHFPEFSKVFGDWEGKAALLILNECPTPGKVVEKGINGIIAIWKKHKVRAVGIKRAVKLLESAKASIGTAEGLVSAENELGMLLEDYEGKMRQLEKTMALVEELAKQIPGFEKLLEIKGIGLITAAGFLAEVGDITRFSHPKQIQKLSGLSLKENSSGKHKGETTICKRGRKRLRYYLTFGIMPLLSKNEEFRALHQYYTTRKERPLKKMQSLVALSNKLIRIFYVILTKNVAYDPQKMMADIKRPVVKAA

SEQ ID NO: 512825 - protein, 456 aa, unidentified
MHKFYLGADVSKGYADFVIIDAKKQPVEKNFQLDDTFEGHCLLYNKLYTFCKDHPDSIIYAAVESTGGYEKNWHHSLVKFQSTLSLNTAHLNPFGVSHNRKAGMKRNITDKISAQNIAEYMIAHPEKVSYQPQDYLASLRKQWGFVKMLTKQSTQLLNQLESVVYNANPEALIYCKDGMPDWILKLLKSYPTASRLAKAKIKSVAKIPYISSERARNLVAAAKKSVACTTDKVTEQLVIATVKQIIHLKKVIKRQSEIMANECSIHEVELLKTFKGISDYSAIGLILNMEAVERFASTKKLASYFGIHPVYKKSGDGTWGIHMSKKGRKEPRHILFMVAMSAIKCNPLIRSIYLKHTQKGMKKMAAIGVCMHKILRIVYGMLKHNRAFDPDIDRRNREKIVQCKADVCRDKNRRYQDYDPKAPISRRQKMQRKERELSHSDKHTKSGISAPVPKAA

SEQ ID NO: 512826 - protein, 347 aa, unidentified
MPIGDNHAVTAVDIAKATFEVAVSIQPGRVSERMTLSRSKFLVFFATRPPTTVVMEACGSSHYWGRQLQQLGHRPVLLPPSLVNPYVVRNKTNRTDAKGILEAYRNEEIHPVPIKSLHQHTLMSLHRARSAWMRARTARINTVRGLRRELGVFLPTGAKKVVPLVHGYIGDAESECPPALRPMLQAMCREIRDLEASIRGVEMQLEQLAKGLPIVAQLRSIPGIGLLTATALVGFVGDVRRFKNARRFASYLGLTPKEFSTGKKRRLGRISKQGNTYLRHLLIHGARSLLRAATTMNETDHLRTWALAKAASRGPHKGATAVANKLARIVWAVWSKHDAYRSLPAAA

SEQ ID NO: 512827 - protein, 433 aa, unidentified
MRVMHERVAGIDVHKDMIKVAIRSPGEKRWTRKTEIFEFRTFYGVLQAMARDLRARGVTHVVMEASGVYTEPVYYALCEQDFDEVAVVNPAHVKALRGHKTDAAGCRRLAELFECGLLHGSYIPPAQLKEVRDLTRYRMKTVQARTSEIQRLGKALESAGIKLGSVASEITGASATAMIDALIDGERRGPVLADLAIGRMRTAGKIADLSMALAGRFTDHHALLCRLHRDRITLFDDAVAGLDGQIAQKAGRWQQELDLLKTIPGFGDVIAQAWLGEIGPAPHRHFASHEKLACWVSLCPGNNISARKRKHGRTGDAGAYIKPMLIQAAWNAIRTKGRLQARYSRLVRRFGGEKNPAAKKKAITAIAHTLLKIAYQVLKSGQPYQDLGADFYTRRESPAQQHAYLERRLQKLYPGQTIIITISPPPGGPAEAA

SEQ ID NO: 512828 - protein, 360 aa, unidentified
MTVDKYVALDVDSANIVIGVYDRKGQQIMRGCIRTNGKDIRQFFKGLSGNVHVVFEEGTQAAWLYDLIRPLVAAVTVCDPRENKLLKSGNKSDDIDVDKLARLLRLGDLQAVYHGEETIQGLKHLVGAYENLVSDTIRAMNRLKAMFRGRGIGSRGTKVFSNEGRDEWLTKLNIEGLRVRAGYLYKQIDCLMKLRTEARKAMCGEATRHSAYKVISGVPGIGPVRTAQIIATVGTPHRFRTKRQLWPYCGLAVVTRSSADYEWVGEQIKKRKRPPQTRGLNKNYNRRLKQVFKGAALNAIRTNEQFKQYYQRLIDKGIRPEMAQLTVARKLSAITLAVWKKGEKFDPEKLNQAAQSTGNQ

SEQ ID NO: 512829 - protein, 342 aa, unidentified
MEHTTIAVDLAKSVFQVAVSHRPGHLDEERRLSRDRLLPFFAQRPPATVVLEACGSAHYWARQLQPFGHTVRLLPPHDVRPYVRRNKTDRTDAKGLLEANRNEDIHPVPVKTIEHQAIASLHRLRSTWLATRTARLNTLRGLLREFGIFIPVGAQHVVPQIRALLVEPIPVPLLLHTTLAAACDEIAMLETNMRAVERQLGALAAEMTDVTLLQTVPGVGVITATALVALVADIRRFPSGRHFASFLGLTPKEDSSGSRRRLGAISKQGDVYVRMLLTHGARSVVWHAKTAARPTPLQQWAAQAEQRRGRNVAAVAVANKLARIVWAVWVQQRPFAADHRPG

SEQ ID NO: 512830 - protein, 367 aa, unidentified
MKKVSTAATKQSRNISQQKLIIGLDLGDRNCWYCVVDEAGQIQLEQRVRTSSKALQEVFGAMPRSRIALEIGTHSPWISRLLRELGHEVIVANARKVRLIGESRKKDDRMDAQTLARLARIDPELLYPVKHRSAQAQADLMMIRARAGLVRARTGLVNTARGLAKSYGERLRSCNVRNMNPEKAEGLSPELQRALEPLLACIESVSEQIREYNERIEDLAQASYPQTALLKQVKGVGTLIALTYMLTLEDPHRFGKSRDVGCYLGLQPGRRNSGKSEPQMHISKEGDPYLRTLLVQGAQHILGPFGIDCDLRRWGLKLAERGGKSGKKRAIVATARKLAVLLHHLWVSGEVYQPLHNSSRTTVAAAA

SEQ ID NO: 512831 - protein, 423 aa, unidentified
MESANTPRNEQVITLPEDPPGGVTAGLDWAHDDHAVSVVDTRGRELDRCTIEHTAEGLKQLIRFLTRYNAAEVAIERPDGPVVDTLLTEGVIVVVISPNQVKNLRRRYGSAGNKDDRFDAYVLADTLRTDRARLRPLTPDTDETIALRRACRARKDLVAHRVAVGNQLRAHLQNALPAAVGLFQHIDSQISLTFLERFDTQDKLDWLTPTRLGGWLRKQGYSGRTQPTALHAKILAAPRGPVGTLATTLAGITAGYVTVLRTLTEQARILEAQIDRQLTGHADQHIFTSLPRSGRFRAARLLAEIGDCRGRFPTPESLICLAGAAPSTRQSGRTRVVGFRWSCDKQLRDAVTDFAADTVKANPWAAHLYQRARNRGHDHPHAVRILARAWLTIIWHCWQNNEPYNPARHRALQPYLTPETKAA

SEQ ID NO: 512832 - protein, 350 aa, unidentified
MLIIGCDYHPAFQQIVFVDTETGDCGEQRLEHSEAARKFYRDLARQGMKVRVGMEASGHARWFERLLAELNFELWIGDATEIARKRERKQKTDRQDAQHILKLMLKDDFPRIWVPSWENRDLRQLLWHRHRMVQARTRIMNQLQAVALNEGLRCKKRLWREHGREQLESFRLAPWASRRRQDLLELLDRLNPTIAELSQAIEQEAEKFPEARWLMTHPGVGALTALAFVLIIGRADRFQCGKQIASYLGLVPLEDSSGNRRRLGHITKQGSSILRFLMVEAAQVTVRSLPEWRSKYFHLRMRRGRKIAKVAMARRLAIRLYWMWRKGWDYEQVVKFGSHVGKLGTGDGVQ

SEQ ID NO: 512833 - protein, 395 aa, unidentified
MKYILSFDIAKGKSVYCFIDEFKNTIIDASLINHKKDEFDLLFSKIKDYNNLVVIMESTSIYHLPVENYFRSKGINTIVINPKLVKQYKDTLNKSKTDKIDCFKIARCYLGTIDFLYQKNDEYLIYNPLARQYWSLIESQTRLKNRYKQLIEIVFPEFNLIFNDLYSDLALNFIHDFPHPDLFVNRRTDYLMNYLKDKNGTTQAFRFRNKVLKMKDISSKSLCYVDSNSFHVHNLVQTIELIQYHKLEIDKIKNKLIDGLKDKKLFKIINSIPGFGEFSTALFLSEVGNVTRFNNSKQFKSFLGIDSVINQSGISIHYGPISKSGNKFGRTILFNIVTTIIQISAHSNQNNPIYLFFRKKQSEGKHHYKCIIACETKLCKIIYKLCSSNCLYINK

SEQ ID NO: 512834 - protein, 402 aa, unidentified
MACVRHMVDGAVKREVRTFKTTTKDLMALSEWLSAEGCTDVAMEATGIYWKPVWHILADGDFKPMLANAAHVKNVPGRKTDVNDATWLADLMAHGLIRGSFVPDEPTQEMRNFLRTRKQFVRERTSHVQRIQKTLEDANIKLDSVITDIMGLSGRRMIEALIAGETDPFALAGLAHRRIKASQAELEAALRGRVSDHHRFMLRLLLQHIDAIDAAIGQIDQEVDAHVEPFRTAIQILSSIPGISDLSAEVIVSEIGIDMNRFPTEGHLISWAGLCPRNDESAGKRRSTRMRKSLPPRRAGGAPWLKTTLIQCAWAAARTKGSYLQAQFQRVRSRRGAKKAIGAVAASVLTAAYHMLKNGTLYEDLGSDHFDRRAKGKQILRLVSRIQNLGFAVQITPIGAAT

SEQ ID NO: 512835 - protein, 371 aa, unidentified
MPRPAKKRRLRILKLENPMNSTHYIGFDVHKKHINFCVKAAGGEIVEEGRLASERSALRLWAAALHYRWDGAMEATLFSGWIFDTLKPYATKLDMAHPAMLKAIAAAKKKNDQIDARTIADLVRCNLLPRCHVASPEIRELRRLLRYRNLVVRESVRMQNKMAGLLMESGAPFNKEKLHGKKYFSRLLNQLEEVPDSVKDLLLLSRGAFEMFQSVQKRLIQQLLAYPELRQRVERLTTIRGVGEITALTWALEIGDPARFSSCAKVMSYCGLTTALRSSADKQQRGPLSKQRNGWLQTALIEAAKLAPRWNPQLASLHARELERGHRNRATLAVARKLAAYLLAVDKTQKPFQLRTLAAAPTSIDMMQNSG

SEQ ID NO: 512836 - protein, 319 aa, unidentified
MLGIDVSKETLACTLLDAQTQKPVWSRTYPNTATGVTRLLRQTPPSAPWALEPTGRYSLLAATTAQAAGRRVLLAQPKQARHFLHSIQSRAKTDSLDSHGIGLFALCRPLPAYPLKSRVVEQLDQLLCARKSLSAALASFALQANELPHAAPALAPVRAALQAQKEAIDQQIAQLTAGHQEFAIAAELEKVPGIGKVTAATLASRLASHSFTHSDQFVAYCGLDVGVRQSGKKHSQSGLTKQGDGELRRLLYLAAQANLRSKGSPFKAHYERERAKGLATTAALCAVARKLARLAWSLHKHGTTYDPARVYQQNQSSPP

SEQ ID NO: 512837 - protein, 432 aa, unidentified
MVLRELRGFAFQARPAPPGGRWAKISPLSTPSWITLKKDVSRTFRTKLLKNKGKSHIFGYNLVAQQNLTERRLAMNKIKNNRLDFTGQPIYVGLDVHKKSWSVSIHSQQCEHKTFSQSPEVEKLVYYLQRNFPGALYHSVYEAGFSGFWIYDQLREKGIDCIVVNPADVPTKNKERAKKRDPVDCRKLARSLRNGELEGIYVPCRLKLEDRSLIRTRLGMVRKQTRCKNQIKGMLLFYGIHLPEELINSHWSRRFIRWLERIRMEKASGNIALNAHLEELNHLRKIIAALNRAILALARTEEYRVPVKLLKTVPGISTLTAMTLLTELYEIGRFPSLDELSSYTGLIPDTHGSGEKEYTGGITERRHRQLRCVLVEASWVAVRKDPALMMAFLQYCKRMRKTRAIVKIARKLLNRIRYVLKNQMPYVPAVVQ

SEQ ID NO: 512838 - protein, 405 aa, unidentified
MFYFGIDWSENHHNLCILNEAGAYISQIVFEHSPAGFAQVELERRRLDAPASDCPVGIETSYNIVVDFLLDHHYPVHIVPPNATEGYRNRQHGSGAYDDESDAALLASIMRTDRASHPLVRPNLPLTQQLLAQVRLIEILRRSIQRQSNQLRAVLLRTYPSGTGMFSDLTAQITLEFLLAYPTAQEACTLSAEAFETFCRQHGYTRTDLIPLRYTQLLEAAPEADPAVIQAYRSQVRVLAQVLLPQVRGRTQAIVQLGQLFEQHPDAPIFASLPGAGLLLAPALLAKFGDHRDRFPAAGGVQALAGTCPVTQRSGKTKKLVKFRHGCDKEFRRITQQFARASVPKSGWAAAYWKEIRPHCDSDSHAYRILANRWVAVIWKLWQTHRPYDEAYHVQQRARRRKPRL

SEQ ID NO: 512839 - protein, 345 aa, unidentified
MMVVLGTDAHKRSHTVVACNEVGAEIGTVTVPATPPGHLRLVKWAAQFTVRRWAIEDCRALSRRLEADLLRVGEHVVRVPPKLMAGVRRSARTRGKSDPIDALAVARAALREPDLPTARLDGPSREVRLLVDYRESLVKDRTAAQNRLRWRLHELEPGYDPPAGSLNRYKTLAAIDQLLDNHTGVVADVARREVTRIRELTTEANQLEADITVRVTGLVPSLLAIPGCGALSAAKLVGEAADISRFKSRDAYAMWAGTAPIPVWSANNTRFRLNRGGNRQTNAALHRIAITQIRIHPDAQAFITRRLQAGSTKREALRLLKRKLANVVYRTLLADTQQPALDKAA

SEQ ID NO: 512840 - protein, 392 aa, unidentified
MYIIGIDIGKNHHKASIVSPKGKQIGHSLCFATTHKGADSLMNFIFKNIGDSPCVFGMEATGHYWYPIYSFLKAKGYTIYVINPIQSDSLRKMYIRQTKNDSIDSFLIAEVIRFGQFSTTSMADENILAMRQLCRYRDSVISSRTEIKLRISTIMEQIFPEYEKQFSSLWLSTSMGILEKYLTPENIQNAPLDGLYGIIKDKSHNRLTMDKALSIKEAAADTFGIKIAQEAFSFQLKQLIDRMHFLDQQIEALDHEILSYYEKFDCYLHTIPGIGMIAAATILAEIGDIHRFKNSSALVAFAGIDPTVRQSGEFNSIHNHMSKRGSPYLRHAIFLAATTCSFHNSPLNAYYKKERDQGKHHLTATGAVARKLTTVIYAVLRDGKPYEPKKFC

SEQ ID NO: 512841 - protein, 385 aa, unidentified
MQTLNDLSQSRIVLKQDSTLIAVIEMSLSSWLVAGLVPGVERQPLKKLAVDESVLLKLLHRWREEAEKTGRRIERIAVAFEAGRDGFWLARWLRARGIEAHVIHASSAAVSREHRRPKTDRLDTELLKRVFLGWLRGERDHCKMVTVPTIRDEDAKRPNRERESLVGEQTRIVNRMKAALSRLGIRGFNPKLKKAAARLEDLRTPEDEPIPPNTLAELRRDMERRRLISDQIRQIEDARLERLERMPNDGSHAMVRLLARVIGVGIETADMLVQEVLSRTMRDRRAVARYAGLTGAPDESGAKRREKGLARSGNARVRRGMIQLAWRFLMYQKDSTLAQWFRARTENARGTRKTMIVALARKLLIALWRLVTTGEVPAGVVLRAA

SEQ ID NO: 512842 - protein, 412 aa, unidentified
MDVIYPRCCGLDVHKKTVVACCIRSTEGRKPVKETRTFRTMTTDLLALADWLQEQGCTHVAMESTGVYWRPVYNLLEGQFELLVVNAQHIKTVPGRKTDVKDAAWIAELLRHGLLRGSFIPSKPQRQLRELTRYRSTLVQERARTLNRLQAVLEDANLKLASVVTDIYGVSARAMLEAILAGERDVETLADLARGRLRSKRDQLKEALEGRVTAHHSFLLTEHLSTLEYLDEAIARVSAEIDQRLTAEQEAITLLDTIPGVGQRAAEILIAEIGTDMSRFPSAKHLASWAGMCPGNHESGGKRLSGKTRKGSRWLRQILVEIAHVASKTKNTYLAAQYRRIAARRGKKRALMAVGHTVMTIVYTMLTRQQPYQELGAAYFDQRERHRVERRLVQRLERLGYEVALQPRALAS

SEQ ID NO: 512843 - protein, 358 aa, unidentified
MAVIEGVCRIVGGVDTHKDLHVAAIVDEQDRIIGTRSFATTRQGYRQMLAWMRSFGELQRIGIESTGSYGAGLLRFMQQAKVTVLEVTTPDKQDRRRRGKNDDLDAQNAAHAAFAGQRTVTPRSRDGMIESLRVLKACRKTAVSARRIALQMIHNTIVCAPDGLRDQLRSLTRMQLVRTLASWRPDLTAYRDLDSAYRIGLKSLGRRYLELHDEIADLDAMIAAIVDELAPNLVARNSIGHTGAAQLLLTAGDNPERLRSEASFASLCGVSPVPASSGRTVKHRLNRGGDRAANSALHISAIGRLRTDQRTKDYVARRLAEGHSKLDAIRALKRYLAREVFTLITQRRKEINATRIAA

SEQ ID NO: 512844 - protein, 373 aa, unidentified
MKKTTRWIGLDVHAETIAVAVAEKDGTVHSVGTIPNRPDAVRRAIKKLENGGKLHVCYEAGPCGYGLYWQLAEMGVECDVVAPTLIPVKTGDRVKTDRRDAEKLARLHRSGDLTAVWVPDAEQQALRDLVRARHAAKRDQLRHRNRLGKFLLQLDLRRPEKIAAWGTKHMTWLDGQKMSHASHQAVLTDYLNEVKRAKERVERLEKAIDAGIARAPKHLQELIAALQSLRGVAKIGAATLVTEVGRFSRFESARQLMAYVGVVPSEHSSGGSTHRGSISKTGNARMRHVVGEAAWSYRHRPANGPALKKRQEGQDEDVKAIAWKAQHRLHQRFQKLSAQGKHHGRVVTAISRELLGFVWAIGRAVEVKLDAAA

SEQ ID NO: 512845 - protein, 420 aa, unidentified
MKIFVPVAGVDVSKRFSDLCVLSPDNNVLLRQKIYHDMVSMKLAEKKLHEIELECGARPVVVMESTSHYHLILFQFFTDAGFEVVVVNPIQSGALKNINVRKVKNDRVDAYRIAMLYRLKVLRPSQIPTSSLRGLRLLTRQRSELKGDVARFKNRLTAYLDQIFPGYGEVFSDVGGSASRAVLHMCPTPEKLLNADGSLLAKAICEAGNKGPKFGAEKAAKLREAAGSAQVIGVRSASNASLIKNVLDIIEGLLAAIQRIEGEIKELVTQDTRLDEDVKLLCSIPGIGFSSAVVIAAEMGDISLFRKPKQLAAYFGLDPGERQSGTFKGRKNKLSKRGSPQVRAALHMAAVSSVSRNRDGTYRNPVLAEYYERKCAEKPCKVARVAVMRKLSNIIYAVLRDHKPFELRTPQEHMALLAAA

SEQ ID NO: 512846 - protein, 436 aa, unidentified
MDEVTDEPLYRDRVCGIDIGKAGLVATIRVPSEKNPARRAAETRSFGTTKREVLALADWLRSWQVPAVVMEATSDYWKGPFYRLEAEGFDCVLADARQVRHLPGRPKHDPGDSKWLAACFERGAITPCFVATEEFRLIRLHTRYRHDLTEERTREKQRAEKLLESAAIKLSSVVTDLHGVTGRDIMNHLIAGERDPKALAQLARGRARRKIPELGAALDGAEFFTPAHAALLAAMLARIDQLNAGIGELTEVIERLLAPYEEQLQQAESMPGWGRRAAQDALAETGPDMSRFPSGAHLASWAGRTPLDNSSGKHTGRAKAKKGNRYLASLLGETAVAAGKTQTREGARYRQLARRRGKAKAQVALGNTQLKVYHALLSRPGTRHADLGPDYYERQRNVRRQIAHHVGKLGALGFEVTLCRLPSPDPDPAAPGSHAA

SEQ ID NO: 512847 - protein, 341 aa, unidentified
MSEVSTIGLDIAKHVFQAHGADASGRVVFRKKITRSKLMEFFASQPRCVVALEACGGAHHWGREIGKLGHTVRLIPPAYVKPFVKRQKNDAADAEAICEAAQRPSMRFVAVKDEEQQANGVVFRARDVLVRQRTQCINALRGHLTEYGWVVPKGTAHVATLIGQIEDPNCSLPESARAIFRVLVTSLTSLEESIAVLDSEISRRSKEDPVARRLMTIPGVGPITATAITALAPPIETFATERDFAAWLGLTPLQKSTGGKQRLGAISKMGERTLRRLLIIGGSAVVSHACRRGAPDGSWLARMLARKPRMLVTVALANKMARIVWALLAKGGAYRAPVAAA

SEQ ID NO: 512848 - protein, 332 aa, unidentified
MYYIGMDLHKQDLVMAVEDEQGPVGRPRRIACRDTEAIRAAVERWRPFRAVVEASASYRWLYDLVSRQGEMVLAHPLRLRAIATARAKTDKLDAALLARLLRANLIPAAYVPPARYQRLRDLTRTRARLSYGATLAKNQIHALLARANVHPPLKTLFGPRGRRYLAGLDLGLSGNLARDELVRRLEHYGREIAAFDAHLEAVASEFPEAEALQVLHGIGRYSALLVVAEIGEPERFRNGRQVGAYAGLTARVHQSGKTEHRGSVSKQGSRWLRWILVQAAIKLVRRDERLANFYQRIRRRAGRNVARVAVARKLAGICWVRLRRWQREQAAA

SEQ ID NO: 512849 - protein, 326 aa, unidentified
MQGKEPSERTTKIKFNVGIDVSKSWLDVHVLACGETLRVSNSAEGIRRLKRWLRRFDVTLVVMEATGKWHRPLHRSLFGSAIPVAVVDPYRVRMFAKAQGILAKTDRLDARVLAQFAAVMAPGVRPPAPELMQELAELVCARDSAVAEETALKNQLSAATVTFLKRQLDRRIVRIAKDIAALEQEIHQRIAADEALARRYAILTSITGFGPVVVPTLIACLAELGTCNRRQISMLAGLAPVADDSGERKGARVIWGGRPAVRRCLYLAALAAARHSPEMKAFFLRLTASGKPAKVAIIAVARKLVVLANTLIAENRPYTPQPPIFA

SEQ ID NO: 512850 - protein, 427 aa, unidentified
MPYRIAGVDVHKKMLAVAVADVEVEGEWRFERRQFGTSPSQLRQLAEWFVVSEVEEVVMESTAQYWRPVWDTLERQWQPTRRTGVERAPTSGALHLAQAQSNHGPRGRKQDFPDAERLVKRFVASELTLSFVPDVTQRLWRTVTRRKYQVTCNRVQLRNRLECLLEEAHVKLSSLVSDLLGSSGRRMLRAVASGETDPATVAALGSPRLHATPDQLRDALGACTDLDPVYRRLLAMTLDELAVMDAHLLQLNEELARLLRVHQDAVERLAAVPGLGVDSAQQIIAEVGPTVATFPTAKRLASWVGACPGHEESAGINHSHRSPNGNRQMRRLLNQAANAAVKTKGSIFELVYRRLVVRLGHKQAIGAIAHRLCRLVWKILRDRVAYEERGPAVTKARAHRRAAKMIRELRSLGYRIEPALAPASTRA

SEQ ID NO: 512851 - protein, 464 aa, unidentified
MKRHRRRQSPKPRVSASVLERINPNAAGIDCGSAEHFVAVPSDRDATPVRSFRTFTTDLHRLADWLAACRVTSVAMEATGVYWIPVFEILEARGFTVMLVNARHVKNVPGRKSDVSDCEWLRDLHMVGLLRGSFRPADAMVALRAYLRHRASLVESAGTHVQRMQKALVQMNVQLPLVVSDITGVTGLRILRDIVAGRTDPQALAQHRDYRCHASEAEIVAALTGNYRPEHVFVLRQNVEAFDYVQQQLAACDTAIEAHLQTLTAHATPPTTPLPPPRPRQKPRDNEPRFELRTPLHHLTGVDLSQLDAIGPYTALRLLSEIGTDMTRWPTDKHFTSWLTLAPNNKISGGRLLSSRTQPSANRAAAILRLAAMNLGRTQTALGAFYRRLAFRVGKAKAITATARKLAILVYRTLKDGLVYRDPGADAYDAQHRTHVLRRLRQRAANLGFGLVNLTTGEVEGTVS

SEQ ID NO: 512852 - protein, 345 aa, unidentified
MLMVSGVVGGVDTHADVHVAAAIDSNGGVLGIESFPTDEVGYRSLTDWLVGFGPVVKVGVEGTGSYGVGLARHLHREGIAVVEVDRQNRQNRRKLGKSDPIDAEAAARAALSGSAKTTPKRRDGTVEQMRVLMIARRSARRQRNQTLNQLRQIVITGPDEVRARFKDRYKTGLVTEAARMRPRKGSDPIVFTTYVVIRGLARRIQDLNDEMRTIDRTLEELIDATAPSLLECYGVGAVTAATLLVTAGDNPDRLHTERSWAHLCGVSPVPAGTGKTSGRVRLNHGGDRQANAALYQVVLTRMSSDAETRNYVRRRRAEGLSTREIMRCLKRYVARQTFKHLPRAA

SEQ ID NO: 512853 - protein, 347 aa, unidentified
MEQISRIGMDTSKHIFQLHGVNIAEEPVLRKKLRRTEMVVFFEKLPPTVIAIEACGGSHHWARLLQSFGHQVKLIAPQFVKPYVKRGKNDAADAEALCEAMSRPAMRFVPVKTPDNQAALMLVGLRDRLIRNRVQLANAIRGYAAEFGLTAAKGVCKIEPLLDRAAADKTLPALARELFAFHAAEYAQLQEQLEKVEAKLVAWHRADECSRRLAQIPGVGPIGASMLVMKTPTPEVFRSARHFAAWLGLTPKDHSTAGKVRHGVITRAGDEALRSVLVVGATAVIRQIRYGRGALSPWLLDLLKRKPPKLAAVALANKIARIAWKLMVSGQTYRATGSRSPASARAA

SEQ ID NO: 512854 - protein, 360 aa, unidentified
MNQHRAGRKIAGVDLGDRDSFVCILDDASGEVLERATIPTSGEAFEQYFAQREPMLVALETGTHSPWASRAVTDAGHEVIVANARQLPLIYGAKHKSDRRDGEKLARVARMDPRLLAPVQHRSREQQRDLSVIRSRHALVRSRTLLINAARGMVKAFGSRLPKCAAEAFHKVAWPLVPSELGLSLHPVFESIATLTRQIRALEDEIDRLATDTYPQVQLLTQVPGVGNLTALAYLLTLGDTQRFSDSRMVGAYLGLAPGRRQSGDRDQPTRITKAGDEHLRWLLVQSANHILRRDSPDTDLKRHGRKLAKSGSKISKRIAKVAVARKLTVLLHALLVTAEVYEPLRNTHARRRRQPLISA

SEQ ID NO: 512855 - protein, 360 aa, unidentified
MVEVVLGVDTHLDFHVAVVLDHLGRRLGESKVPTTLGGYRNLLRWAERFGPVRCAGVEGTGSYGAGLARHLKDVGIPVVEVERPKRRHLKRNGKSDPKDAEAAARAVLAGEAAGVPKSADGKVEMIRTLRSARRSAVKARVHAANQLQAMLVTAPEGLRRRLGGLPTKELVTLAARFRPGAYPEDVEEATRSALRSVARRHQVLSEEIAALDVQLQRLVAEAAPELVLLPGVGTNHAATLLVLAGDNPERLRSEASFASLCGVSPVEASSGKVVRHRLNRGGNRDANRALHMVCVVRMGSDRRTKRYVSRRTAEGKSKWEIMRCLKRYIAREIYRVLLSSTTAKPPPIKVPSCISEVDVA

SEQ ID NO: 512856 - protein, 412 aa, unidentified
MVRKGQVVAVVMIGVDPHKGSHTAVAVGADEAVLGQIRVRASAAQAQRLLAWAAAWPERTWAVEGAGGLGHLLAQELVAAGERVLDVQPKLAARVRLLASGSVNKNDPNDARSVAITALRSPSCPPVRPDDHAAVLKIWAKRHHDLSRTRTQVACRLHAVLCELVPGGISKEIYADQAEQVLAGAEQSGAVQQARAELAAELVADLRRADVLLRETKKKLAAAVRVSGTSLTEIFGIGPVIAATVIGDVPDASRFASRDRFAAYNGTAPIEVSSGSRVIHRLSRRGNRRLNHVIHMAAITQIRHKHSDGRVYYDKKIAEGKTPKEALRALKRQISDAVYKRLKADAARTAATTAQGPGGQTGNDSVASAASSHPGHQLFGQATPGPASTLRPSIHQPEKPTSRGRRKTAPTS

SEQ ID NO: 512857 - protein, 348 aa, unidentified
MKNTITIGIDLGDKFHIAVVFDGEGNELETAQVTNTKAGVSKFFQPYKNARVAMEAGTHSPWISRLLGEMGLTVYVGNPRKLRFIWDSVDKSDARDARILGMVCRIEPRLLHPLRHRSSQAQADLASIKSRDMLVKSRTQLINHVRGLVKANGDRLPKCSTASFAKKCEPLVPPELRSALDAVFQTLFHLNERIKALDLQIEQLSMERYPETQYLRQIAGVGPITALCFVLTIEDPACFFKSRQVGPFLGLTPRRDQSGDTDKQLPITKAGNTYLRRLLVGSAQYIMGPFGPESNLRLHGMSIAARGGKNAKKRAVVAVARKLAVLMHRLWVTQDKYQPFYGMNKKAA

SEQ ID NO: 512858 - protein, 351 aa, unidentified
MFHQSGEATEMKVTTIGIDLAKNVIQVHGLDERGKAALKKQLKRAQVATFFANLPPCLIGMEACASAHHWARKLESFGHNVKLMAPQFVKPYVKTNKNDVADAEAICEAVSRPNMRFVPVKNAEQQAVLALHRARQGFVKARTAQANQIRGLLAEYGIVIPQGIGHIAKRLPEILENAENDLPGAFRQLLDRLGDHLKELDRQVGELEVQIQAWHRENEVSKRLAQIPGIGPITASALVASIGDAKNFENGRQLAAWLGLVPRQHSSGGKQVLLGISKRGDTYLRTLLIHGARAVIRVPERKVGHADSWLARLMGRRNHNVAAVALANKNARTVWALLAHGRDYEANYGVA

SEQ ID NO: 512859 - protein, 419 aa, unidentified
MEVLVECCAGIDIGKDEVVACVRTPVARGRGRCKQTRTFSSFTGSLEAMADWFTAEGVTEIAMEATGSYWKPVWYVLEERSFALKLVNAHHVKILPGRKSDVLDAEWLAELLEHGLLRGSFVPPPAIRQLRDLTRYRKRLIQAHTSECQRIQKTLEDAGIKLDSVASDVLGVSGRAMLAALVAGERDPEVLAELAKGRLRRKLPALRQALRGRFGEHHALLIGLCLEHTAHLEAAIARLDERVDTLLANHTGEAGLPFARARDRLDTITGVGKRAAETIIAEIGADMTRFPTAAHLASWAGVAPGNNITGGKRGSGKTTHGDVWLLDILTQCAWAAARTRDTYLSAQFWRLARRIGKKKAAIAVAHSILVICWHLLTNDCDYDDLGGDYFTRRNTDRQRDRLIKQLHTLGYRVTLDRAA

SEQ ID NO: 512860 - protein, 386 aa, unidentified
MKDETFVPREYDVFAGLDVDKKSIAATFSSPQGFIRSLHMPYSVDYLLNHVRKHFGDQKVAFVYEAGPTGYGLYDGLVAQGYRCLVAAPSMIPRAPGQRVKTNRLDSRGLSESLRGGQLKSIHVPSPIYRELRHLTQLRDTVVREAAAHKQRIKALLLLEGIGFPPATAGRQWTLRVKAQLRKLRCSRTVRFKLDQLLDSLEFCEKQVVSSTKEIRRFCKEDVELFQSIEYLMSIPGIGWIVASQLLARMGDWREIDNVRQLGSFLGLVPTENSTGDSVDRGSITRAGDGRLRSKMIQAAWSAIRQDAELREFYRSVCQRNPRGKGARIAIVAVARKLSTRIYAVLKKQRPYIVRKQVHSAPLTQEETSPQGTTRRCAEPGETDNS

SEQ ID NO: 512861 - protein, 408 aa, unidentified
MGRAAEVVAPSSSIRTDGGCPVVQVNDLSRSLAAFDPISTLVVVVEMSKASWLVSSVVPGVERQPLKKLEPDATALLRLIERWRTEAVRAGRPIRRIALAYEAGRDGFWLARWLIARGIEAHVIHSASVAVSRERKRAKTDRLDAAMLMRVFLGWLRGERGHCGMVAIPTMEEEDARRPNRERESLVNERSRIINRMKSALARLGIRGFKPHLRKAPERLAGLRTAEGTGLPANIIEEFRRDMARLALVREQISSIEKTRAERLERAPDTGPHAMVRLLARVIGIGIETADMLVREILSRKLRDRRALARYAGLTGSPDESGLKSREKGLAKAGNARVRRGLIQLAWRFLMFQKDSALARWYRTRTEGPSGARKTTMIVALARKLLIALWRLVTTGEVPDGVELRTAA

SEQ ID NO: 512862 - protein, 458 aa, unidentified
MRTIGIDLAVTATHKAVVVDDTGQFVTPVLSFRSCWEEIAHLVARAREGVEADHPLQAVMEPTGMAWFNIAVPLSRLGITVYLVNGRKVAALRRYYKQHAGSDRISARVLAKLPLVDSESLYPLAIPTPVQLACQRGCKQDDRLQTWITAIQNRLLDTDRFAWPGLEQVLPDPFGPTARLFRRDWYDPVRVIEAGPQRLALVFAAVAAPKDDLSWMKGLVELAIDVLKLYGLEALDYARLQEEICRDQELLAKLEQQQAELQKDTVQPLYHQLHPSGHLETLYGVGHKGAPVFASFIGQADRFVDNRHFRGWHGLVPDSRQSGESESKGLRISQAGPDLIKKFGFMGANTARRFDPQIAAIYYDQMVNKGKHHTQAVCACATHLLDRILVVLREDRPYELRDVDGAPVTPEQAKAIIAERYQVPEEVRQRNSKRARRERDEQQLEHRQPRQKGSRPRR

SEQ ID NO: 512863 - protein, 456 aa, unidentified
MASRKQKAAQVSPALPPQLATANLHAAGIDSGAEAHFVAVPPSDDPQPVRSCGAYTADLEALADWLATCGITTVALASTGVYWIPLLELLETRGFAVLLVDPQQVQKIRGRPKSDVYDCQWIQRLHTFGLLARAFRPADQVCGLRSYRRHRAMLLTYAGQHIQHMQKALTQMHIKLQHVVSDLTGVTGMAIIRAILAGERDPVTLARLRDYRCQHSEETLAKALYGQWREEPLFALAQAGALYEVYHQQMLEGDRQIEAHLSTCAEHSPDQAPPSPPTRKRNQPTFDVRGSLQRVTGVDLTTIEGIDDTTALIVISEVGLDMSRWPTVKHFTSWLGLCPHQQVSGGKVLSRRTKSSADRVATALRLGAACLHHRHSALGAFFHRMKARLGTPKAITATAHKLARLIYTMLKHGTTYVQRGMDDYEQQYRERAVQSLTRRAKAFGYTLVQTPVGTHS

SEQ ID NO: 512864 - protein, 428 aa, unidentified
MNCNTQNAKIASITEKTLIVGIDVGSETHYARAFDWRNYEYSKKPLEFSNTEAGFLTFKAWVEDIAEKHGKTAVIPGMEPTGHYWFALGKFLQDNGMKPVHVNPHHVKKSKELDDNNPNKNDRKDPKTIAALVNEGRFSYPYIPTGIYAEIRSLSNLRFQTQEELTRIKNRIARWFSIYFPEYKDVYGDLKAVSGRMVLKVAPLPEDIRKLGAEGVNRIWRDAKLRGAGMKRAKTLVSAAEHSVGSKEAPEAARIELKNLLNDMDVYASRLEELLQGIEEKLKEIPYVDKLMEIKGIGLVTVGGFIAEVGDIGRFDNPKQLQKLAGYAIVANDSGKHNGESRISYRGRKRLRYVLYEAAISLIGKNAEFREIHEYYRTRKANPLKKMQSVVAVACKILRIFYTILTKGVDYDAEKLMSDIRRPQMQAA

SEQ ID NO: 512865 - protein, 356 aa, unidentified
MKTHKVQDSVVKGKEIFVGLEDSKKTWKIAVRCDKMVIHRVSMEARYPVLIQYLRNKFPECNIHLMYEAGFKGFNLYDELTEDGINCVVIPPHVVTQPKVNRVKTDKRDALRLALVLENHDFKDPCHVPDKERREDRQITRTLIAMQKDIIRTRNRIRKFLDFHGIEVSLPDRWGREEFRALKELSLSEPLRISLSVLLTQLEELWIHQTSLRTALRQLCRKERYEKTFKIAKSLPGIGWFTAIRFVLEMGEDLSRFTSGKKLASFVGLTCSEYSTGETVSKGSITGMGSGFIRSTLIENSWIAIRKDPVLLSKFTRIWRGGGSKKKAIIAVARTLIVRFRACVLSGTPYTVGVVQ

SEQ ID NO: 512866 - protein, 338 aa, unidentified
METYAGIDLHSSNNFVGVINDKDKILYGKRHANRLDDVLKALDPFKDSLQGVVVESTFNWYWLVDGLQEHGFPVHLANPSAIQQYEGLKHTDDQWDSFWLAHMHRLGILPEGYIYPKEHRAVRDLLRRRLLFVQHSTSHILSLQSMISRNLGFKMSNNEIKKLKPTDIESLFDCSNLVFMANNSLAAIEFLKKITKGIEKKVKSQVKMRKEFEMLLTIPGIGNILGLTINLEVGDIGRFAKVGDYSSYCRCVESKRISNGKKKGENNKKNGNKYLAWAYVEAAQFARRYCVKAQSFYQSKEAKTKPVVAIKALSNKLSKASYYIMRDQVAFDEDKLFS

SEQ ID NO: 512867 - protein, 324 aa, unidentified
MEKLYAGLDIHKEKLAGCIMDKDGTITREHTFPSSKKALERFLNGIPSSDITIAIEACGLWRGAHRLLTDMGYDVKLANPKKTHDIACQKKTDKVDARILADLLRTHYLPEVWIPDEQTLQFRDLTRHKATLTRLKTQVQGKIRGYLLRKGAKYGKLSKEETLSTLTDDPDINNLIQVYHSVKQEEKEVMRRIKKIARNRKETTMLMSMPGIAEFSSLMILAEIGDIRRFSSPKELVSYSGLCRGIYQSASTERSAPNTAVNKWLKWIIYECSGRATMLDPRFQDYYYKIQQRKGFKTARRATARKMLTIIWHMLANEELYHAA

SEQ ID NO: 512868 - protein, 366 aa, unidentified
MKKISTVQVFGNEIFKEQKLTIGVDLGDRWSFYCVLDEAGKIILEQKVSTTTEALKQAFAKIPRSLMALETGTHSPWVSRLLKELGHEVLVAHAQKVELISKSNRKDDRHDARTLARLARIDPELLGPVRHRSAKAQIHLTVIRARAELVRARTGLVNAARGLVKSYGERLPKCGTKQVSRELAAELSVELREVLEPLLNEIESLNERIKEYDARMEKIARESYPQVELLKQVKGVGTQIALTYVLTLDDPHRFRRSRDAGCFLGLCPGRRDSGQSQPQMHISKEGDRYLRTMLVQGAHYILGPFGEDSDLRRWGLRLAERGGKNAKKRAVVAVARKLAVLLHRLWVSAEVYEPLRNSQKAMRAVA

SEQ ID NO: 512869 - protein, 410 aa, unidentified
MELLHPHCAGLDLHKETVVACVRHMADGKVTTDVKSFQTTTHELMELSDWLSSQGVTHIAMEATGVYWKPVWHILSDGEFALILANAAHVRNVPGRKTDVNDAVWLADLMAHGLIRASFVPDEPTQQMRDLLRTRKQFVRERSSHIQRIQKTLEDANIKLDSVITDIVGLSGRRMIEALIGGETDPEALAALAHGRIRATKAELEAALRGRVTAHHRFMLRIHLNHLDALNTTIADIDKEVDGNVEPFRVAIEMLTTIPGVSSLAAEVMVSEIGIDMSRFKTEGHLISWAGLCPKNDESAGKRRSNRMKKGAPWLKTTLIQCAWAASRTKASYLQAQYLRIRSRRGPKKAIGAVAASILTAAYHMLKDGTLYQDLGASHFDHRDKGKQALRLVNRLQSLGFTVQITSMAA

SEQ ID NO: 512870 - protein, 438 aa, unidentified
MTDPNERSEPDFAAFIGIDWADQRHAWALQTTTQKAIEHGDLDHAPEAIDAWATELGRRFGGRLIAISLEQSRGALLFALTKYAHFVLYPIHPATLANYRSGFRPSGAKSDPSDAGLLLDLLVRHREKLRRLNPDTVETRTLQFLVEGRRKLVSDKTRYSNRLTACLKMYFPQVLDWFSEVSSQIAGDFLERWPTLEKLQRARSDTLRAFFMEHHSCRSERIQRRLEEIRRAVPATHDMAVIASCVAAVTAWVRLLRELRQAIHSYEEQIETTARQHPDFAIFDSLPGAGAALVPRLIAALGTQRDRYHSASELQCYSGIAPVLASSGKQSWVHWRWACPKFVRQTFHEWAAHSIGSSAWASAYYTQQRAKGKSHNTAVRSLAFKWIRILFRCWKDRKPYQEDLYRHALAQRAASTIGTVNVQWKTCQGLRKLSDFIP

SEQ ID NO: 512871 - protein, 394 aa, unidentified
MPELFVGIDVAKDTSSAQGIDRNGKGRFSLTFAMDSEGFMQLWKAITAHRKDLLEVSAAVESTACYHINLYTFLTAKGISTVVINPLLIANFAKLSLRKTKTDKKDAMSIAQFLLVHRETISQLSLSQDLQDFRDIARERESVGNLLSAHKVEIKRLLQSTFPELERIGDLSTRVMQEFIAAFPSARLLKAAKPKAIQKILQRKGVGTRLTYTAEDLIQAAKQSVATISPAKELILQGKVRTHEHLRERYEELTKILTEYCKSSMLEDFEIITSIDGISKCTATTFLAEIGCIGNYASYKKLIAFAGIDPTVYQSGKFEGSSRISKRGNRHLRRVIWLMTTCVLQHNATFRAYFMKKRSEGQPFKKAVFATAHKLVRVIFAMLTQRTMFREVCA

SEQ ID NO: 512872 - protein, 299 aa, unidentified
MAVGVYPSGEIKTFPYQPQGVWDLLVFVGSFKPERIIIEATGGLEAAVAAELYNSGLPVCVINPRQVRDFAKSIGVLAKTDNIDAVVLGRYGEAIKPQVRPLGTEEEQAIKELVARRRQLVEMLVQEKNRYCRASKKTGKDILKHIKWLEKRIKDQNTDLGDAIMKSRVWAEKASILKSVPGVGDVMSFTLIAELPELGTLGRKEIASLVGVAPFNCDSGKMHGQRRVWGGRGNVRKVLYMGIISGIKFNSVLRAFYERLIAAGKKPKLAITACMRKLLVILNAMIKSKQVWKAELIEA

SEQ ID NO: 512873 - protein, 399 aa, unidentified
MLHDHPSVGPTAILTQFGAIFVSLELSRSKWVVTSLSPGNGERMSQYSLTAGDIGGLLARFADFKRKARERTGSDYPVITIHEAGLDGFWVHRVLRNEGIESHVVDAASIATSRRRRRAKTDKIDGEALLRALLAFKRGEPRVCAMVVAPSPEEEDRRRLCRERQTLIAERIIHVNRIKGLLFAQGISDYAPLRRDRRKRLEGLRTGDRRSLPVHLKTQVSRELDRLELLLEQIGKVEAEQEALLAVESKVASGQEPCNREPRNREPCNAVTMLLAVKGIGEHSAAILWSEGLYRQFANRRQVAAYAGLAATPWRSGAVVHEQGLSKAGNPQLRTTMVQLAWLWLRHQPQSALARWFRARGERGRKGSIVALARKLLVALWKYVTHGVIIEGAVMKPAA

SEQ ID NO: 512874 - protein, 371 aa, unidentified
MEHTRFVGLDIHKERISIAVAESGRSGAVEYLGEISNDPVAIGKLCDRLEGRGNALAFCYEAGPCGYGVYRQLTSLGHRCDVMAPSLIPHKSGDRVKTNRRDATMLARLHRAGELTPVWVPDADHEAMRDLIRLRSVVRQIVTRTRQHLQGFLLRHGRKHGRGTAWRMAYRRWLSTLAFGHPAQQIAFQDYTDAVMDAERRLKRVEEQISGLLPEWNLRPVVDALQAMRGIALINAVVLVAEVGDFTRFSNPRQLMAYFGLVPGERSSGETIRRGGITKTGNTHARRALVEGAWAYRMKARIGRHKVDRIEALPKIIRDIGWKAQVRLCTRYRRLRARGKTANVVNVAIAREMVGFIWSIACTVQSTPKTA

SEQ ID NO: 512875 - protein, 337 aa, unidentified
MKSATTIGIDLAKNSFSVYGVDDKGKTVLSRTLTRAGVVRFFANLPSCLVGMEACASSDYWARTIESLGHEVRRIHPQYVKAYLLGAKNDTNDAAAICEAVQRPNMRFVPHKSPEQIDIQCIHRTRQGYIKSRTALVNQARGLLAEYGIIIRQGISAIRNQLPLIIADEENALSGLMRRNIASLYESICFFDSQILEQDKLLKTVAKENEACQQLMQVPGIGIMTATILLTVAGVASNFKNGREFAAFVGLVPRQNSTGGKTRLLSISKRGDCYIHGARSAITRILAGQTPKYRPNPWVIELIARRGRNKACVAMANKTARIAWSMLAQGTEYRHAA

SEQ ID NO: 512876 - protein, 385 aa, unidentified
MGSQTFIPRDYDVFAGLDVDKRSISVTFTDHQGSVKSMRMPYNVEYLVNHVRKHYGERKVVFAYEAGPTGYGLYDGLVVQQYPCLIASPAMIPKAPGQRVKTNRLDSVRLAENLRAGQLKGIHVPTALYRELRHLTQLRDALVSEVVAMKQRIKSLLLMEGLEFPPAPAGSQWSFLVKDQLRKLPCSSVVRFKLDQLLDNLEFGEKQVLKTTREIRRFCQNDPELSQCIEYLKSVPGIGWIVASQMMARIGDWRQIKNIRELPAFLGLVPTERSTGERTTRGAITHSGDPRLRSKLIQASWSAIRQDGELREFFRTVAKKHPRHLGPRVAIVAVAHKLCVRAAVVLMKQRPYEMREKVQSEPLTQEKTVPQGTTRRRRVPGEKIS

SEQ ID NO: 512877 - protein, 341 aa, unidentified
MKNISILSIDLAKNVFQLHGQNKQGKQVLKKRLRREELRNTIANLPPCLIAMEACIGAHAWARQFMKMGHQVKLLAPQYVKPFVRVNKNDQRDAAAIALAASLSSIPSVSVKSEEQLDLQAIHRVRERLVRERVATGNEIRGLLADMGVVIPTGEAAIKNLLPTLLEDAEQPITHRGRLLLDDLRSQWLEKEAHVKRYDQMLKEYSKGNEECQKLMEIPGLGIINASLLWCYIGDAKRFESGRHVAASLGLVPKQASSGEKEKHKGISKQGNKYLRKQLVHGARAAYRVLQKDGATGRLADWAKRMKSSGKHPNKIVVALVNKLARIAWSLLSKADARYQS

SEQ ID NO: 512878 - protein, 477 aa, unidentified
MTSMTPTTGSVTGGVDTHGQTNHVAALDQLGRQLGDQEFPTTPGGYRALLRWLRGHGHLGLVGVEGTGAYGAALARYLRAEGVSVVEVDRPDRKARRARGKSDPLDAYAAARAALAGTATGTPKSRDGRVEAIRTLRVARSGAVKARSQAINQLKSLLITAPAALREQLRHLSTTTLLATCARLRPTEELTDPEQATKAALRRLARRHQHLSEEIADADAELTTLVTVAAPQLLALAGVGVEVAGQLLVSAGDNPERLHSESAFAHPCGVAPVPASSGRTHRHRLNRGGDRAANNALYIVVLGRLRYDRRTRAYAERRTQQGLSKREIIRCLKRYVAREMFTALTAGAVDSPLRPPRPCQRRLDVSAATTRCHYAYRPQQRPDCQLTATIAYGTTSLCSACAQQRSTLGKGLAPRRLPVTEPDPLGLLTDANDQLNTATEQLTSAVLRARQHHITWAAIGTVLSTTRQAAQQRFRLP

SEQ ID NO: 512879 - protein, 351 aa, unidentified
MKDYTGKKVYLGIDVHKKTYAVTGVCEDVVIKRATLPANPQDLVNFCKKHFVGASIESAYEAGFSGFHLHRILEKNDIKNIVVHAAGIEVAVGDRVKTDKRDSLKIATQLAAGRLRGIHVPSEEREEKRALTRIRNTIVEHRTSVANQIKALLHQHGLIPPTARQKISIKWIENLKKLPMRNGIRVALNHLIGIWQELTKRIKEINLDMAKQATEDCALETVYRSAPGIGAIGARVLANEVEDMSYFKNERELFSFTGLTPSEYSSGGHIRKGHISRQGKTVIRKTLVLAAWKAIQKDSLLRVAFERIALRAGSKRAIVAIARRLIGHIRACFQKRCLYRTEGKTIVSVAA

SEQ ID NO: 512880 - protein, 337 aa, unidentified
MEQVIRIGLDTSKHVFQVHAVDIEDRVVLRRQLRRGEVAVFFGALKPTVIGLEACGASHHWARLLQGLGHTVRLLPPSYVKVYLKRGTKNDARDAEAICEALGRPSMRFVPVKSETQQAALMLHSARELLVKQRTMLVNAIRGHAAEFGIVAARELGKLSALLERVQSSTMPELAREMIALLARQIDPLEVKLREIDRRLKAWFQASAESQRLATIPGIGLIAATALAMKVPDPTVFRSGRHFAAWLGLTPTQRTTAGKHRLGKISRQGDEGLRSLLIVGATSVVRWAKPGRAAPWLIELMARKPRKLVAVAQANKTARIAWAIMTRGETYRRPIPT

SEQ ID NO: 512881 - protein, 316 aa, unidentified
MTDVFVGIDVSKDRLDVAARPSGESWQVANTELGIATLVKRLAKLQPTLVVLEATGRLESAAVSALAVADIPLAIVNPRHVRDFARSTGKLAKTDKLDAQMLARFADAVRPEPRPLPDETQQRLEALLVRRRQLLGMVTAERNRRRRAPVLTRAEIDEHIAWLQVRVEALEDELNKTIRSSPLWREKVALLRSVPGVGPMLAATIVAQLPELGVLTHKEIAALVGVAPLNRDSGNWRGKRTIWGGRPQVRAALYMSALVASQFNPLIRPFYLRLLATGKPKKLALTACMRKLLIILNAIAHRGMPWRSPASVAVTA

SEQ ID NO: 512882 - protein, 317 aa, unidentified
MSNEFCIGIDVAKQAFQVASRPAQWMGSYPNNRQGYQEFLTCLQDHRITLIVLEATGGYEKPLAAELVQAGYPVVVANPRQVRDFARGLGRRAKTDPIDAETIAQFGEIVQPRPKPLQKPEIEALAELVTRRRQLTDLLTQETNRSQMIHHAKVRKSIRKMIKTLEYQIRELDDLIDEQIQADDDFQNKNQILRSAPGIGPQTTAMLLSHLPELGQLNRHQIAALAGLAPYDRQSGQQVRRAHIAGGRKEIRCLLYMAALTARTYNPAIRRFAQRLEAQGKPFKVVMTACMRKLLLILNALIRDQQVWTPKKFLKNT

SEQ ID NO: 512883 - protein, 343 aa, unidentified
MKLSRVGVDLAKNVYQLHGVDRSGKTVWKRRLKRHQWFKVLLDTAGPECEIGMEACAGAHHWGRELQSRGYTVKLIPPQFVKPYVKSNKSDAKDAEAICEAMSRPNMRFVTVKRVEQQDIQATHRIRAELMTQRTAKANQIRGLVAEYGLVAPKHLSSLRAAIPCWLEDAENGLTGDFRTLLHGVWTDLLLLDDRVGEMDQVIKRLADNNEDCVRLQQLRGIGPMVSTAMIATVGDARQYPKSRQMAAAIGITPRQHSSGDRDRLLGISKRGDVYLRTLMIHGARAVVARAKHKDDRLSRWVTNIANKKHPNVAAVALANKTARMAWAMLRHETDYDPDFALR

SEQ ID NO: 512884 - protein, 356 aa, unidentified
MSRDTKYIGMDVHKEAVVIAVRNSTGQPVMESIVETKASSLLQFIHGVQGELHVTWEEGTWAAWLYDLLKPHVHEVLVCNPRRNALLKEGSKNDKVDARKLSDWLRTGMLRPVYHGEHGLRTLRELARSYQTISQDLNRVMNRVKALYRGWGIACSGTQVYAPRYRQEWFDKIEHAGVRRRAELLYQQLDGLQTLRRTLRPELLAESRKHKASKLLRQIPCIGPIRAARLLALMQTPHRFRSKRQLWTYNGLGIETRDSAQYRFVRGQLQRAKKPQQIRGLNRNHNHEMKEIFKGAATRASCGVGPLRDFYEALLAKGMKPEMARLTLARKIAAIALTLWKKEERFDAQQLKTQAA

SEQ ID NO: 512885 - protein, 315 aa, unidentified
MTVLGIDVGKEYLDCELLGDKRATKKVSNSVRGFEQVVAWLRNRKIAKVHACMEATGGWSEELAFFLHEYGHTVSIVNPMQIRAFGQSELSRTKTDKADAGLIARFCAAMHPPAWEPPKPAERRLKQLVRRRRSLVEMRMQEQNRLESPGMDNVRDSILGMIDVLEGQIKDLDAQIKATIDEDDDLKGKRDLIESIDGIGPITAATILGETPHIEKFQTSKALTAFAGLCPHVRQSGTSIRSSRTTKIGNRAIRKTLYMAALAALRSNAVIMAFAERLRERGKQNMEVIVAAMRKLLVLVFGVLKTGRPFDPQRA

SEQ ID NO: 512886 - protein, 427 aa, unidentified
MSYRIAGIDVHKKMLAVVVADVEVDGEYQFERRRVGTSPDQLRSLAVWLAEREVEEVVMESTAQYWRPVWDALERYWQPIRQKQEGAGPMSGTLHLAQAQSNRGARGRKRDFPDAERLLKRLVAQELTLSFVPDVEQRLWRTVMRRKLQVTRNRVQLQNRLECLLEEAHIKVLSLVSDLLGASARRMLQALADGETNPATLAGLASRRLHATPDQLCDALGACTDLHPVYRRLLQLTLEELRVIDDHITQLDQEMAGLLSPYQPAVQRLAEVPGLGVDSAQQIIAEVGATAATFPSPKHLASWVGACPGDEESAGVNYSHRTPHGNRQMRRVLNQAANAAVKTKGSIFELVYRRLVPRLGHAQAIGAIAHRLCRLIWKILHQGVSYEERGPAVSKHRAHRRAAKMIRELRSLGYRIERIAAPSGSPA

SEQ ID NO: 512887 - protein, 402 aa, unidentified
MNAVGIDVSKSKSVVAIMRPFGEIVSTPFEIKHTASDIHSLIELINSVEGESRIVMEHTGRYYEVLAHQLLEANLFVSAINPKLIKDFDNDSLRKVKSDKADSVKIARYALDKWQNLKQYNVMDELRNQLKTMNRQFGFYMKHKTAMKNNLIGILDQTYPGVNTYFDSPARSDGSQKWVDFASTYWHVDCVRKMSLNAFIDHYQNWCKRKKYNFSKSKAEEIYGKAKELVPVLPKDDITKLIIKQAVDQLNSASITVESLRTLMNETASKLPEYPVVMAMKGVGTSLGPQLMAEIGDVSRFTHKGAITAFAGVDPGVNESGSYEQKSVPTSKRGSSDLRKTLFQVMDVLIKTHPQDDPVYQFLDKKRAQKKPYYVYMTAGANKFLRIYYGRVKEYLASLPES

SEQ ID NO: 512888 - protein, 348 aa, unidentified
MTVYIGVDFHARQQTISYLTTEEGTIQHLVLLHDNPVTVRAFYAQFAGQRVVVGFESSGYAAWFEELLEELGCELWIGHATYIRQFAKRRQKNDRRDADLILELLHTGDFPRIHRYSRTTREMLQQLRYRQRLVKMRTMAMNMLLFMASSRGVSLRTQLQSKRGQAKLQQLALPATLGTQRDELLSLLQTLNEKISTIERWLEQQTKADLAVQRLQTHPGIGLLTSICVRYTLEDAGRFANTRKVSAFAGFDPMQDQSDERNRMGAISKQGSRWLRFYLVEAGQVAIRKDADLQRVYQRIARRGGHAKAKVAVARRLLVRAFIMLRDEIDYAEFQRRGVAARSSRGTA

SEQ ID NO: 512889 - protein, 343 aa, unidentified
MRYIGLDVHKDNITACVLSSTGKVKYEHDYVRDSDHWDLSELLTFGDKNGYCVMMESGTYAYQPYRFFADRGAETHVVHAHSLKIITESDSKTDRKDALSIAKMLRLWKRGEIGLSMSFMPTKEQCELKDICRYREEVSRKLGDETRRIKSQMMRNGQILPAGFDNFQTMKSRKYVSETYPDDLTLMRRMASLEDLFDERDRMQAEVESRLPGDRNVELLSEIPGIGRQTAIQIMSMIIDIDRFDDPEKFCSYFGMVPKVRDSGGSEHHGRMTKKGDRMMRMIMERATESHVHNCNSTVTRYYKKTVKRMGTKKALITASRKMMSMIYSILKNKRCFRIDPSV

SEQ ID NO: 512890 - protein, 412 aa, unidentified
MDVYCGIDRAEDHHDIALVDRDGKLLARCRVNDDAVGLAQLLELLAGHGDSAGDPVPVATETPRGLLTACLRAAGRQVYPINPLAVARYRDRHPVAGRKSDHGDAVVLAGVLRTDMHAHRPLPAGSELAQAIAVLARAQQDAVWDRTTAHNKPRSHLREYYPGFLAAFAGARDGIMRPGARAILAAAPAPADAARLTPAQLRALRRKAGRSRGIDTAAARLRDAFRVRQMRQLPLAEEARGRQALAPLRQPDAACAAADDLEQAAAESFNQHPDAGIITSFPGPGPPAGARALAEIGDDRSRFSDAKGLKAYAGAPPITRASGKSRSVTHRKVKNNRLAAAGHTWSFSALTASPGARAHYDRRRDAGDGHSAAQRNLFGRLHHCLRHCLATGQHYDENAAFPATARKLHQAA

SEQ ID NO: 512891 - protein, 360 aa, unidentified
MFAQRTSVGLDVHARSVVGCAIDEATGEVVHKRFGYELAQVIDWVKSLPGPQSATYEAGPTGFGLARLLEASGIACTVAAPSKLQRPSGDRVKTDARDAEHLARLLRLDEITAVRVPSIAQETARDLVRAREDTRGELMAARHRLSKLLLRYGAVFEGKNTWSAEHDAWLRRQRLLLPGSPAAFDACFEAVKQIEARKKRLEAEIEHAAVSSEYAPVVTRLGCLRGISTLTGYALAVEIGDWHRFTGRTIGAYLGLVPQEYSSGSSRALGPITKTGNSHARRLLVEAAWHHKKVYRPAQVMQARWDAAPVAAALRGQDGNRRLHAKWLQYVARKKRTTVANVAIARELAGWCWSLAVMDD

SEQ ID NO: 512892 - protein, 426 aa, unidentified
MKYSQNERIMQITDEVLIVGVDVASQTHYARAFDNRGIELGKLIKVANSKQGFCMFKIWANEIVRKHQKRSVMVAMEPTGHYWFNLAQYLKEHGMKPILVNPFHVKRSKEFDDNNPTKNDLKDPKTIAMLVKDGRYMEPYIPEGIYSELRVSMESRWQIIKHLNVVRNRVRRWINIYFPEFETVFTKWDGKSALIVLKEFPTPDKVLGKGVDEIVARWKAEKIRAVGRKRAMDLVEAAKISAGVREGLRAAENDLMILLEDYEIKMNQLDRVMRLVGQITGEIAGFNEILKIKGIGLATAAGFLAEVGDIGRFTHPKQIQKLAGLNLKENSSGKHKGQTTISKRGRKRLRSILFQGIMPLVAKNPEFKGLHHHYTTRANNPLKKKQSLIVLCCKLIRVLYVLLKKQVAYDPRKMMSDIQRPALKAA

SEQ ID NO: 512893 - protein, 357 aa, unidentified
MDSIAVDDIVIGVDTHKDTHVAWACDGPGRHAGDVEIPATNDGYAELLAWGAALGPVAAFGVEGTGSYGVGLARFLRRHGRKVIEVSRPPRAGQRRLSGKSDVIDAEHAARQVLAGAATAVPKLADGQVEAIRLLKVVRDTAVKAQKTAMITLKATLVTADDELRVSLRPLTDHKLILACAALQSGGEMSDPVVAMRHTLAAFARRWLGLHEEIKTHTRHLKTLTQAAAPAMLEAFGVGFDTAAEMLIAAGDNNDRVRNEAAFAKLCGVCPIPAGSGRTNGRHRLNRGGNRQANAALYRTVIVRMHWHPETIAYVQRRTAEGLSKKEIIRCLKRYVARELYVLLPATSAENHLALVA

SEQ ID NO: 512894 - protein, 355 aa, unidentified
MRFYKQQHIHYCGIDLHKKTMYLCIIDEHGEVVLHKNVRTRRPDFMRAVAPYREGLVVGCECMFAWYWLADLCGEHGIDFVLGHALYMRAIYGAKTKNDRQDAYKIAHLLRGGNFPLAYTYPAEWRPTRDLLRRRGYFKRSRAELLTHIQNTVTQYNLPPLRKKLAYKANREGVADHFPDKHVRRSMEADLILLDYYDEVISQLELHLERTAKTHDAHTFYLVKTVPGIGKILGLTLLYEMHSVERFPRVQDFLSYCRLVRPAKTSAGKRTGDTSGKKIGNAHLRWAFSEAIAGLLRDSSEVKRMKARLEKKYGEGRALSILAARLGRSIYHMLRKREAFDMNRFLGQAEMVVAQ

SEQ ID NO: 512895 - protein, 354 aa, unidentified
MFFAGIDAHTRYVVVVVVDRMGDKVLGATRVKVDRPERLVELLAPYRPLEAIMETSSSWPWLHELLRGAGVHFVLAHARRLRAIAEANYKRDDIDAELLARMRLAGLIPEVYPTPAAQREWATLLRHRATFVRECTALANRIHAQLHMRGLYLTRGHLLTRDGWQWVKTTAWPHLDLEQRALVRSHRRVIRELRPLVRALDQRIRDVAAGIPEAQLLTTITGIGAHRALVICAEALPISRFPTPGHLASYAGLVPRSKQSGVRPVRHGEIPAGANRWLRGALVRAVVAHVRHAPASWLTQYYLAQKARVGWPTARVAAARKLARAIHAMLRTTACWTDDPSRGELARTHAAQTA

SEQ ID NO: 512896 - protein, 311 aa, unidentified
MFIGIDVSKARLDVAMRPSAEKLSVSNDEAGIQALVKRLSELKPVLIVLEATGGLERSVSGTLGSAQLPVVVVNPRQVRDFAKATGQLAKTDRIDAEVMARFAEVIRPPLRPLPDEVSLELRALIARRRQLIEMMVAEKNRLSAASKAVRKRIAAHIRWLETELDRADKDLDHSIRQSPIWQEHEDLLRSAPGIGPVVSRTLLAELPELGRLNRKQIAALVGIAPLNCDSGTFRGRRGIWGGRATVRAVLYMAALVASRRNSVIRDFYKRLRDKGKAPKVALVACMRKLLTILNAMIKHKTRWSEIIPQTS

SEQ ID NO: 512897 - protein, 402 aa, unidentified
MKEAARVTTIGIDIGGRSHAVARCRAGNLKADREIVRIGQSRTGFAALDAWFERQAEPVTLVTMESSGHYWMPLASHLRGREVPVAVVNPLAAKYFAKSRLARTKSDPADARSLAEMAMRDQPVVRDPLAGAELRQAARFAMTLVTEQAKVCQRLIRLVELGFPELGELFDDPTCRTAREVLRIAPTARAAVRRRTSTLANANAGPGHRRLGQARAERLQAAAADSIAVPELEAEVAFEVGLLLDQYDLLERQISDADDRVAGLLDGELARRLRTIPGVGPSIAAALLAEIGDIGRFSDFDQLLAFAGVHPAERSSGRKGANPETAWHMSKAGNSHLRAAAYRMAVVGVQHNPVIAAHYARKRAAGKSKMNALGHCMRKALSLVWGVWRNGQDFDPNWGAET

SEQ ID NO: 512898 - protein, 348 aa, unidentified
MLADELDYVVGVDTHLDEHVLAVVAAPSGAVVARRAVRANARGYSAALGFAGEAAGGARVWAIEGTGSYGAGLARYLAGRGETVFEVSRTPRAERRLRGKDDSLDAARTARAALASETLALPRSGERREALRLLLITRRSAVDVRREALGQLRGVIVTAPDRLRQELRGLPLGRLLERCSRLRRSSAMSADEVATRLVLRSLGRRIQAATVEADELEQEILGHVRALAPRLLDEPGVGPIVAAQLIVAWSHHGRLRSEAAFARLAGVAPVPASSGQTTRHRLSRGGDRQLNRALHTIVLHRRQHDPTTKDYIAQRIAEGKTKRDATRLLKRYLARHLYRLLQQEPLMT

SEQ ID NO: 512899 - protein, 436 aa, unidentified
MRGCRCSMIMGFTKPIEHFNLQRKKVITMNTLYVGIDVSSKSNVVYLMLPNGDKHSNFSVANSHEGSTLLVKKIYSALTSHSLDTVLIGLEATSVYGDNLVYFLREDATLAPFNRKIHVLNPKQVKKFHDTYNDLPKNDYVDSFVIADCLRFGRINKEVYMGDYRYKALQNLTRARFFAVQNLVKEKQRFMNVLFKKHSAMPLKKVFSNTFSTTDLAVYDEFKSVEALANMDLHELTDFIIEKGKNRFPDPDAVAKAIQKAARSSYRLPKTVNDSVNQVLSISITSMKALESQIKEFDKAIIALMELLPNVLISIPGIGPVYSAGIMAEIGDINRFDNQASLAKYAGLAWKQHQSGGFEAEVTRLIPSGNRFLKYYLCEAAFSLVRCDKEYSDFYHLKYKEVNRCQHKRALALTARKFVRLVFRLLKDNRLYCPAK

SEQ ID NO: 512900 - protein, 453 aa, unidentified
MARKAEKEHTKDGLKLKIVNPNAAGIDIAYGEMQVCVPEDRDGENNRCFGSFTCDYEEIASWLKACGITTVAMESTGSYWVGLYFFLEEKGFDVLLANAKDVKNVSGKKTDEADAEWIMLMHSYGLLKPSFHPDAAARSIRELARHRDNMLRSAGKEIQHMQKSLVLMNIKVDTVISDILGKSGKAIIEAILAGNHDPKSLAQLADPRCKASKETIEKSLEGTWDAVHLFELKQSYDLYKYIHTQVADCEAEMDRMLNDYTDGNGTDMQGYVPTKKRIAKKNAISFDAEKHAFSVWGVNVMEIPGMSHGALAVLMGELGSSFAEKFTSAKSFCKWCNLVPNNKISGGKLLSSRVPKQKSRVGQVFRLCANSVKSVKTGLGVYFRRQKSKGGHLQAIVATANKIARIFYTMVTTKVHFDESKVGLDEKELLQRKIALAQRTLDRLNLRLSVAQG

SEQ ID NO: 512901 - protein, 374 aa, unidentified
MVLVGGATRCGEAPVKVQRTSVGLDVHARSVVGCGLDGETGEVFQRRLCPDHREVLEWIKGLPAPVAVTYEAGPTGFGLARFLLAAGIMCLVAAPSKLQRPAGDRVKTDARDAAHLARLLHLGQITEVTIPTVVQEAARDLARARDDCRTDLMGARHRVSKLLLRQGIVYYGGQAWTGKHELWLRGQRFDNPALSMAFEAALDAMVACVHRRDRLDAAITVMADESEFTPVVRGLGCLRGISTLTAFGLAVEIGDWHRLTGRSIGAYLGLVPCEYSSGESRVQGGLTKTGNGHARRLLVEAAWHHRPHYRPSRDLRRRWEAAPAAAQERAHAANHRLHTRWAGFDQRKKRPVIANAAIARELAGWCWSLAVMHD

SEQ ID NO: 512902 - protein, 315 aa, unidentified
MDEPPAVFVGIDVSKDRLDVHLRPSGKAFCVPRDAKGLDGLVGRLGSLPIALVVLEATGGFEATVAAALAGAGLPLCVVNPRQIRDFARAMGRLAKTDALDAEVIALFAERVRPQARPLQEPERSHLAELVGRRRQVIEMIGMETNRRGQTVDKQLARRLDRHVAFLEKELADVDRDIGQAIKASPAWREAEALLKSVPGIGDVTARTLLAELPELGTIGRHQLAALVGVAPINRDSGLMRGRRAIGGGRTSVRRVLYMAALTAIRRRSPLRAFYDRLTTRGRPKKVALVAVMRKLLTILNAIVRDRTPWQPLNA

SEQ ID NO: 512903 - protein, 349 aa, unidentified
MDSVTLVGIDLGKHSFHLHGQDKKGQAVFRKKLNRKQLIEFFARFHPCTAAMEACAGAHYLARKLIAMGHDVKLISPQYVRPFVKGNKNDFIDAEAICEAASRPTMRLVPPKTAAQQTLSMLHRTRESLVHDRTKTANQMHGFLLEVGVSLPVGFAVIKRLPALLAEHEDLPPQLVSVLQRLHEHFKYLDDQIAELERDLVQQVRKDDQGQRLMTLPGVGPITASVLASEMGDGQRFGSSRDFAASLGLVPRQYSTGGKATLLGISKRGDKNIRRLLVQCARVFMQHVDKDHSPLGEWVRALLSRRHSNIVACAVANKLARMAWALVRGHTVYNPDRSKPALAPAPAIA

SEQ ID NO: 512904 - protein, 418 aa, unidentified
MQVDNEDPEIIERVAALDVGKAEVVCCVRLPGPNGRRLQEVRTVSTMTGALLALGDWLAGLGVSRVVMEATSDYWRAPFYLLEDRFETWLVNAKDVRHLPGRPKTDRLDAVWLCKVAERQMLRPSFVPPPAIRQMRDLTRYRVDLIETRTAEKQRVEKLLEDALIKLTVVVSDPFGVSGRAIMAALVAGERDPAVLAGLARGTLRAKTGPLTEALTGRFSEHHAFLLTQMLNRIDTISADIGTVQARIDAQIAPFARAVARLDEIPGVGVTAAQTILAEIGLDMSRFPTPAHLASWARFAPGVSESAGRKKGNAGTGRGNRYLARVLGEAAIGASRTQSFLGERYRRIARRRGKKRAIVAVGRSILMIVWALLSDEDARFIDLGPDHYDARTNAQRRLRNHVRELQALGYTVTLSPAA

SEQ ID NO: 512905 - protein, 343 aa, unidentified
MVYIGCDQHKHFCQLAILNEHGKMIEQKKLYHNDREALKRYFQSLPEASEMAIEASGFDSWLSDFVENLGIKVHLGHPLKTRAIADAKIKTDKIDAKVLGQLLYADLLPKAYHAPLEIRRKRYFLRFRLCLNRYRASLKNRIHSLLHHLGLRTPEVSDLFGVRGKEFLNQLQLGEGYQEVLLGYLELLEKTEARINCLKKRLAFYSKTDKEIRLLQTIPGVGILISQVILAEIGELERFQSAERLCSYAGLVPSLYQSGQTLRHGPCHKQGNKFLRWAMVEAAQTAVRKDPLLKDFYARIKKKKGSQKAIVAVARKMLVIVFHVLKKQEVYQYHTARQARKSA

SEQ ID NO: 512906 - protein, 370 aa, unidentified
MKEYSEAFIGFDTAKKKHAVAIADVGREGEIRYLGEIDSSPLTIERMIRKLAGRYEKLHFCYEAGPTGYGLYRQVRGLGHDCSVVAPSLIPKKSGERVKTNRRDAVSLARLFRAGELTSVWVPDTVHEAVRDLVRARETASQDLRRKRQQLLSFLLRHGRIFSGRQHWSRAHLRWLAQQKFDHPAQQIVFQDAVDAIDDAAARLRRLDEQVAAIVPSWSMAPVVAAYQAMRGVSFVVAVTFVAEIGDLRRFDNPRQLMAFLGLVPSERSTGERVRRAGLTLAGNKRARRVLIEGAWSYRYPARVSQTLQARLEGLPKAVREIAWKAQIRLCARYRRLNAAGKKLPVVIAAIAREMAAFLWAIARHVAPAA

SEQ ID NO: 512907 - protein, 417 aa, unidentified
MNSPKEVYVGLDVGRESMEAIWVDEEGRRTDSLSFTNDNAGYEEFLRKLQESRETGKTITVGAEGHAGDLSPLDQYLNEEDFKFLSIHPLKVRRYKDILGQPQKTDRYDAYVIADFLRSRENQLENRPQFDPTVQEVKKLSRTHKDLKKQINRYTNQLHETLAEYFPELLDDSFPGLTTKTTLRLLNEYNSLEKIRETEVEELGKFLDDASRGYYGEELASQLLETVRSIKRSPLAESAYQLKIETLTDILLTIKDHTREIKKKISQLLQDWEDAQIVLSLGGAGDITVGRWLGEIESIDRFDGSDPLSLFCGASPLPYSSGKYSNDRTSKRVNKRAKDAIMQIARCSIKHNPESRRYYNKKRDEGKSHWHAIKCLARQLIRVIYAMLRDRTYYQPNKKSKQQGEEEDKKEVTTTPA

SEQ ID NO: 512908 - protein, 323 aa, unidentified
MTPTVLGIDISKKDFHVVLLNSNRGTKPKKFTNNTQGFESLHDWLKQQDVVELHACMEATSIYGEALAEFLYQQGFIVSIVNPARIKGFAKSELLRTKTDSVDSALIARFCGAIKPSPWTPTAPEVKELQALLRRLESLKEMETQERNRLETATATVAQLTQSHLEYLLEQQKLIKQLIGDHFDQHPHLKQQRDLLTSIPGIAQQTASVLLAEIGQVSDYDNARQLAAYAGLTPCEHTSGTSVHGKTRLSGTGNVRLRKALYLPAVVAMRHNPLLKAMSERLLSRGKVKMQVIGALMRKLVHLAFGILKSQKPFDPNYLSATP

SEQ ID NO: 512909 - protein, 410 aa, unidentified
MEVLYRVCCGLDVHKKTVVACLRFPGPNGKRAEEVRTFGTTTRELLKLADWLTAAGCTHIAMESTGVYWRPVYQILEGAFQLLLVNAQHVKMVPGRKTDIKDCQWIAQLLEHGLLRSSFVPPAPLRELRELTRYRRQLIEEHTREVNRVHKLLETANIKLGDVASDVFGASGRAMLKALIAGERDAATLADLARGLLRKKEAQLREALMGRVTAHHIFMLQGLLHHVEFLDRQIALFDARIEEQTRPFAAALERLDTITGVARRSAEQIVAELGDDMSRFPTAAHAASWTGICPGNNESAGKRKSGKTRKGNRWLRATLVECARGAVRARDSYLAAQYHRIARRRGDKKAIVAVGHSILVAAWHVLRDGVAYRDLEPGYFDRLNRERLIRHYTRRLAELGVATVAPVPVG

SEQ ID NO: 512910 - protein, 338 aa, unidentified
MTTIRVIGIDLGKNTFHLIGHDYAGKEVFRKKFNRQKLLQLLSVHEPVIIAMEACGGAHWLARRCESYGHQVKLIPAQYVKPYVKTNKNDFIDADAIAEASMRPSMRFVSPKTELAQVCTVVRKIRSGYIKERTACMNRIGSILLEFGISFPRGHHNMKNLFQYLADNKEPVPPMLIIELREQLDHYYQLNAWIKDQEKKLENLLKENELMSLLQSVPGIGPMTASCCLSAVGNPHDFANGRNFAAWVGLTPHQYSTGGKSRMLGISKRGNKELRQLFVHAARAVIWRDQSAERYFGSWLIDLKRRKPFNVAVVALANKIARIAWSVMTTHKTFEIRI

SEQ ID NO: 512911 - protein, 415 aa, unidentified
MGLKIVYPICCGIDVHKTFVVACIASTDKGVTTYKRHRFSTYTKGLRELSQWLCENNCKDVCMESTGKYWIPVFNMLEDSCNITVAHPKYVKAIQGKKTDKKDAKWMADLFKHDLVPGSFMPPSDIRHLRDLMRYRTKLTNMIASEKNRLQNSLSVSNIQLGSVVSDTLGKSSMNIIQKLLQDPENPHLDIPSLIHGSMKDKIPELELAVDGFITPEQVGKIRVILNHYKYLKHCKDELEQLILSLAEPYTEEINLLLTVPSIKSIFTAIGIISEIGVNMDEFPSAKHVCSWAGLTPTNNESAGKKKSVKISRAGVYIKPLLVQCANGVAKSDKHPEIRNRYLSIKKRRGHKRAIIAIARMLLTAIYHILKKKEPYNPELYKTSEVLPASRELTVEQAIALAKSQGFKIKEQPAT

SEQ ID NO: 512912 - protein, 345 aa, unidentified
MYYCGIDIAMKSSYIYITDSRGQKKTSGEIPTKASVFRQRLRPYLRGGLAVAIEAGNQTAWIYDLLVDIGVKVTDVNPAKVKLIAESRRKTDKIDAKILCELLRLDGLPHPVHVPDKQTRSLRGLLVARRQMVSARTKLCNVVRGMLRQEGIGLPARALKSFVGWQRLMRRSYSHEHLPLVLDAYYQSFVSLTRSIEVLDKQLAKRERADERAARLKTMPKVGRIASLTFLAAVDQVDRFETSRKVVSYSGLSPTVRSSGERTEYGSISREGRSELRTVWVQIAHLVVQDTSRSTARLRRWYSKVAAHRGKKTAMVALARKLLTIAYRILKDQTVYCPSLVSKAG

SEQ ID NO: 512913 - protein, 352 aa, unidentified
MKYVGLDWAYRTAQWCALDPGGEIAGEGRFAADRDGLARLVLELGDEVTACLEMMSGALWARDELVACGWQVQVADARKVKTVAPLAAKTDKVDARLLAELSRRQLVPALWLPSLDDRELRERLRRRMHLVRLRTSAKGRIFGLQTQWGIRISPRRLRRADGITLLERAGMPAVWRHSISECLALIDFLDARIVPLDAELRPFAQADPRAVLLDTIPGVAELLALTIAVEIGEISRFAGPEKLVSYGRLAPRVRQSGEGRPHTGPLNKSGSRLLGWAAVEAAQHAWRESNPWHQRYLDVSRRSRNHNSAKAAVARKILIAAWHMLSRNEPFKPAPRTGATSVPASSRLALAA

SEQ ID NO: 512914 - protein, 355 aa, unidentified
MSQEKYVGMDVHQATISVAVLDSRGKLIMESILETKAATILEFLQGLHGSLSVTFEEGISAAWLHDLLKPHVTRLVVCDPRKNALLKDGSKSDRIDARKLAELLRGNQLTSVYHGEHGMRTLKELGRSYATITTDLTRVMSRIKALYRSWAIPCSGTSVYAARHRAEWLDKISEPGVRLRAERLYQQLDLLQPVRQQARRDLLIESRKHHAVKLLRQIPSIGPIRAALLVAQLQTPHRFRTKRQLWAYSGFALETHDSGEYRYVRGKLQRNRERMTVRGLSNNHNPDVKNLFKGAAISASTHPGPLYDFYVALLEKGMRPTMARLTLARKIASITLTIWKKGADFDATQLHRQEA

SEQ ID NO: 512915 - protein, 338 aa, unidentified
MKLYGAIDLHSNNNVTVLIDEKDKVVYQKRLANDLPSIVEQLSPYSSSIEGIVVESTYNWYWLVDGLMDKAYRVHLANTAAIQQYEGLKYTDDDSDARWLAHLFRLGVLPEGYIYPKEERPVRDLLRKRSQLVHHKTAHLLSIQNLYCRNTGQSISANRIKQLSSEKIDALFTNCDLVLAVKANFTVMQSLETEIAILERIVKERVKLKPAYRYLLTVSGIGQILALTIMLETGDIRRFSKVGNFASYCRCVKSEKLSNGKRKGSGNTKNGNKYLSWAFVEAANFAIRFEPLIARFYQRKKAKTHRVVAIKAVAHKLARACYYIMRDEVPFDVDRAFA

SEQ ID NO: 512916 - protein, 319 aa, unidentified
MSGMYVGVDVAKAELVVAARPSDERWSVANDERGARTLAERLKRGAPALVVLEATGGYELAAVAALAAAGLPVVVANPRQVRDFARATGQLAKTDRIDAGVLALFAERVRPEVRPLPNEEAQELDAVLTRRRQLLEMLTAERNRLGQVAGRGRRPVKKSLKAHIAFLERELRVADTDLGAMVRASPAWREKDDLLRSVPGVGPVLSLTLLAELPELGRLSRREVAKLAGVAPLARDSGTLRGHRYVHGGRASVRAVLYMAALVATRRNPVIRAFYERLLAAGKPKKLALVACMRKLLTILNAMARSGVRWEAPNALATT

SEQ ID NO: 512917 - protein, 347 aa, unidentified
MKKIATIGLDIAKNVFQVHAADADGSTVFNRKIKRADLLEFFAKLPPCLVGIEACSTAHHWARRIAELGHEVRLIHPAYVKPFVKRGKSDFNDAEAINEALTRKTMRFVPVKSAEQQASAMIFRTRTLAIRQRTQAINALRSHLAELGVATPQGTTGLKALIAIANDEHDGRIPASARFALQQILKQIEFLGEYIARLDREILARTKNDADIKRLMTIPGIGPIIAVAITALVPDLSGFKSARHFAAWIGLTPKSHSSGESQALGNISRMGNSHLRTLLVTGAMSVIRSAKTAERVSPWLAKLRKRRPFKVAAVALANKTARIVWALLTRGGNYIKPGSSADAGTMA

SEQ ID NO: 512918 - protein, 422 aa, unidentified
MLEATSDREEIIERVAALDIGKAELVCCVRVPGAEGKSRRVQEVTTYPTMTRALLGMVDRLTELEVTRVVMEATSDYWKPPFYLLEAAGFETWLVNAKDVKHLPGRPKTDKLDAVWLCKLAERQMLRPSFVPPPPIRVLRDLARYRADLIGVRTAEKQRVEKLLEDAQIKLSVVATDIFGVSGRQMLAALIAGQRDPQILAQYARGRLRGKLAALEEAFTGRFNDHHGFLLSKMLARIDQVSADLDDLDAAIEGEVAPFAQAAARLDEIPGIGHDTACVILSEIGMDMSRFPTAAHLCSWARFAPGVKESAGRRKGNGTTGHGNSYLARVLGEAAVSAGRTDTFLGERYRRIARRRGKKKAIVAVGRSILVIIWHLLGDDQARFHDLGADFYDTRAGTEHAKRNHIRQLHALGYRVTLEPAA

SEQ ID NO: 512919 - protein, 338 aa, unidentified
MNHYAGIDVSLKESHVCVVDASGKIIREGKVASEPEDLIGWFGALGLAVTRIGLEAGPLSQWLYAALRDAGLAIELLETRHVRNALKIMPVKTDRKDAQGIAELMRLGWFRPVHCKSMEAQEVRAMLTARKLVQKMLHEAEMSLRGILRGFGLKVGKTTPVTFEARIRELVAGHPSLEGIAQSLLAARAVLRRELNGFEKRLRAIARCDTRARLLTSVPAVGTIVALTYVSAIDDPARFKSSKIVGAHFGLTPKKYQSGETDRSGRISKIGDASVRAALYESAHIMLTKPIKGCTALKAWAMRIAKRAGMNKAKVALARKLAVIMHRMLADGTTFTPA

SEQ ID NO: 512920 - protein, 320 aa, unidentified
MQTPSAVLNIGADVAKKAIAVACSEGSFPVREIANQRTAVLAFLKGLPAGSRIGVESTGIYHEVFAEVAHQLGFLVFVLNPKDTRHYAKAVGLRGKTDRVDAELIARMIAHEHTKLHAWIPPTPQHREIDRLIKRRAKLISLREAVAMSLHELDGFAADLKALRMRFNQLIARIDLRVKTLIDANPDRKQNFTRLCTISGVGPVVGSALVNTLERVPVKSADAFVAFTGLDPRPDDSGQHRGKRRLSKRGPAELRRLLYLAALSAVKTKPWRPLYEHYRARGLSSTATLVILARRIARTAWSIYTHKTEFDPGRLTKPLT

SEQ ID NO: 512921 - protein, 438 aa, unidentified
MSNKVIFNLDELFISVGIDVGADFSWMSIALPNQQFVGKPYKILHNSIDSLTTAVSKIKEAEELYSLESRIFLESTGIYHYPLFCYLRDKGFNCSVINPIITKNSTNINIRKVHNDRFDSKKAALVGLKPDLKVSLMPSDLALNCRNLCREYYDLMDNRSAYVNKLQGELRMAFPQYLGIFSKVTINTSLTLLETYTSPSAFLEADKQEIIDIIKSTARFGLTYAQNKYNAIIQAATDANQFGYIIDSNIKRIRLYISFIRKYDEEINSILESLHELVDANEDADFVKQIHLIETFKGAGFLSAVSIMGEIGDFSAFSKPKQLFAYFGLDPAVKQSGKFEGTKVQMSKRGSAIARRVIHTLTLQSISISRNGEAKNPVLREYYLKKCDSKPKLVAMGAVSHKVCNMIFAILRDNKPFEIITPQEHIKQYNASKCDMAA

SEQ ID NO: 512922 - protein, 346 aa, unidentified
MEHSAGLDVSVKETSVCIVDETGKIVREVRVASEPDALLEVLKSHAYRFNRIGLEAGPLSQWLFSALAEVGVPVVCVETRHMRAVLKAQINKTDRNDARGIAQMMRVGLYRPVHVKTLRSQKLRMLLTHRKLLQSKAIAIENDLRGTLRNFGLKVGMVGTVKFEARIGELVENVPDLAALVEPLLVVRRAIREQIAILHRRLLAIVRDDEVCRRLMTIPGVGPVVALTYRSTVDVPARFRNSKAVGAVFGLTPAQYQSGEIDRTGAISRCGDEMMRVMLYEAAHIMLVRSTKWSWLKAWAMQIARRRGMKKAIVALARRLAVIMHRIWVDGTEFRWTREQHAAAGA

SEQ ID NO: 512923 - protein, 411 aa, unidentified
MATMFCGIDWGESRHDVAIIDQAGNILGRAKITDDAAGFTELLTLLAEAGDCEDAQIPVAIEKDHGLLVSALRSTGRAIFPLNPLAASRYRARHQVSGAKSDATDAVLLANILRTDLAAHRPLPADTELAQAIRVLARAQQDMAWTRQRIGNQIRSLLKEFYPAALDAFAPLARGGLAHPEARMILAVAPTPAKAAKLTRARLRTLLSKSGRQRRIDAEADRLFEALRGKYLRHPTVVEDAMGIQLAALLTHFDAVCQASDDLEVAAREHFERHPAATVINSFPGMGTLLGARVLAEIGDDRARFAAARGLKAFAGSAPVTRASGKKTVVTYRRIKNNRLAAVGTIWALSALSVSPGAKRHYDARRERGDWNRQAQRHLFNKFLGQLHHCLQTGAIYDETHAFPPPLDLAA

SEQ ID NO: 512924 - protein, 340 aa, unidentified
MRLYTGIDLHSSNSYLAIIDETGKRVFKKKLPNDPECILAALAPYKDVIIGIVIESTYNWYWLVDTLMAEGYKVHLANPVEIKQYKGLKYSDDQHDAFWLAEMLRLGILPEGYIYPKEDRPIRDLLRKRSHLVKLRTSLIISLQNIICRNNGFRLKTNDVKALNTDRVAPFLEMNEDLALAGKISKESIDFLTRQIKAVEKVVEERMELREQYKNLLTMQGVGKTLGLTIMLETGPISRFAQVGNYCSYCRKVSTKWISNDKKKGKGNKKSGNKYLAWAFSEAAEIARRYYPEARAFYQRKMQKTNAMIAHQALSHKLARAAYYIMRDGVSFIPKKIFTS

SEQ ID NO: 512925 - protein, 354 aa, unidentified
MVVASVFHKPEQLLGALEPEFARPGRRTDNVSTRSTKTSRRSFIGIDVSKQFLEVAVHKNEYHFRCPNDPKKFPTLIAELIALRPARIVLEATGGLERPLLHALRRAGLPVVLINPRQVRDFAKALGLLAKTDRLDARVLAHFAAAIQPPLRPIKTAEDTELDALMGRRNQVSDMLAAEKNRRGSAATEAARADIDAHIEWLEQRLKALDKQLKDQLKRSVAWQQKDKILQSVKGIGFVTSVSLLADCPELGQLNRHQIAKLAGVAPLNRDSGKQRGTRHIFAGRAPVRAKLYMATLTAIRCNPVIKAFYQQLIARNKLKKVAIVACMRKLLTIINVMVRDNKVWTVKAQPVSA

SEQ ID NO: 512926 - protein, 400 aa, unidentified
MYVGIDWAAESHDVCVVDTAGTIQGRATVAHSRDGFEELVGHLRRWAKHGEVLVGIERPEGRLVDRILEAGYPIVLIPTYAMKDLRRRYAVGGAKSDPGDSYVIADVVRTDGHRLRRLEPLSPETRALRSVVRARDDLVDQRVALSNQIRACLETYWPGAAVIFADVASEICLAFLERYPTPEAAARLSDVRLQSFLKKAGYSGRRSPAELLERLRAAPEGIRGVEAEARADAVRAMVRVMRSLLRSIKDLDRAVVAHLGEHPDAEVFTSLPRSGQINAAQMLAEWGDCREAYPDPDSVAMLGGLCPVTHASGKHRDVSFRWACNKRLRVALTAFADNSRHASPWAADIYRRAIARGCDHPHAVRILARAWVRVIWRCWQDRKPYNPALHRAATHLEEAA

SEQ ID NO: 512927 - protein, 350 aa, unidentified
MFVGIDVHKDTHTAVGVSPFGEKMFEITIGNYKKDFEALTNKVAEMKESLSPYFGLEDCHGYGERLSAYLYESGHQILAVPSVMVDRDRQKATHPEKSDSLDALGVAKVMMQNIDSLPAYTISEEGKKAKQIKELSMDREYLVEERTRLKNHLHNLLHRIWNTEYIQKFKDPFTLKALRYWSKAKPKCDSFLLRSMKRKTKRLLDIYHEIIDLEKEMEILLDQNYTIQTASGCGTTIAGMIVGEIGDINRFHSPGALAKYAGCSPRECSSGKKHRHIKTRSGNRRLNCAFHRMALSQISRSGNELAKTYFRRKVSEGKSKSQSLVCLRRQMVNIVWMMLKHKTVYNPQMN

SEQ ID NO: 512928 - protein, 344 aa, unidentified
MQPMYYIGLDVHKRTISYCVKHGSGMIHAQGAIPATRLDLDRWMKTLPQPWTAAMEATVFTGWIYDHLQPHATALKVAHPLMLRAIAAAKKKNDRIDASKICDCLRCDFLPECYMASTAIRERRRTLRYRNLLVRQMVQMKNKIGMLLMEAGVSYNNQKLHKAGYFRELLATNPDINEGLRPLLRLCRETVVRLQKTESALVRSLERDALLVDRVERLMTIPAVGPITALTWALEVGDVQRFSSIKKAISYCGLCGAEKSSGNTIQRTPLSKQRNKHLQTTLIEAAKMAPRDSPELAMLYDREKQKGNANRATLAVARKLVAYLMAVDRGQRNFQVVESNCVAA

SEQ ID NO: 512929 - protein, 445 aa, unidentified
MFIQSQDDSHYCYSFFTKVVILMMKLKYSICCGLDVHKNVIVATIVTTNKEGISEYDQKSFSTINSDIQKFHDWLIENNCYYVCMESTGKYWIPIFNYLEKDIDVCLTHPKYVKAIKGKKTDKKDSKWIADLYKFDLVRCSFIPPKDFRQLRELARYRFKLVCMKSSEKNRIQNCMTVSNIGIASVLKDPFCKTATEIMSYLLEHTSDTIDEKAVRRLIKKGTKATSNEIIEAIKGYNIETDQAKKLELARNHLDYLEDMITQTEVELYVRIKPYYEFVEFVSTMPGMTELSTTIVLAETGVNMEIFDDAGHLCSWCGLSPANNESAGKKKSVRIAKAGDYLKHVMVQCALSAVRSRKQPYFAVKYNAIKKRRGHKKAIIAIARMMMVCIYHMISEKKPFAPTDYEELMDSREQKKRVILNEENALAFLAAQGYDTSQLVKCNDN

SEQ ID NO: 512930 - protein, 343 aa, unidentified
MKDASTIGLDLAKNVFQVHGVDGSGETVIRRQLRRGQVLPFFKRLPPCLVGIEACATSHYWAREIAALGHEVRMMPARYVKPYVKRNKTDMADAEAICEAVTRPTMRFVPIKTPTQQSILMLHRTRELFVRQRTMLVNALRAHLAEFGIVAGVGRNGLEKLLEVIADERDERVPPEVRSCLLALRAQLVLTKQQILEADRRILAWHRSSELSRRLDEIPGVGPLIATALVASIPDPKAFRSGRDLSAWIGLVPKQNSTGGKERLGHISKAGNRYLRKLLVVGALSVIRRAKQTGTTRRPWLVALMARRSTKVAAIALANKIARIAWVIMTRETRYKEPLPQAA

SEQ ID NO: 512931 - protein, 403 aa, unidentified
MIKDHDSIDVFIGVDVGKSDHHAVALNRAGKKLWDKSLPQDEAKLKTMIKVLSKHGRLLFVVDQPATIGALPVAVALASGIEVGYLPGLAMRRIADLHPGEAKTDARDALIIASAARTMPHTLRNVETADEQVAELTMLCGFNDDLTKEGTATSNRIRGLLTHIHPALERVIGKHLDHPAMLELLAKYPTPTALRRAGKARVETLLRKHAPRAFKRWVPELFEALDQQSVIVPGTEAAGTALAHQARSLAHNRAAQTDVLTLIQALVEAHPLHELLTSMPGVAIKTAARILTEVSGKDFASPGHLASYAGLAPVTWRSGTSIRGDHSSKKGNKVLKSALFLSAFASISSKDPASRIYYDKKRAQGKNHTQAVIALARRRCNVLFAMLRDGTIYDAAGQELAAA

SEQ ID NO: 512932 - protein, 410 aa, unidentified
MIQARQDTRGFGGQKANLFDRFRPFADGVDGAPNGIKRAKMVVVTNPSEGKPSMGKSIIDTSSVTRVGVDLAKRVFRIHAVDATGFVVIARSVNRRTLLKFFDSLPRCVVAMEACSSAHHWGRQLLELGFAVRLIPPAHVKPYVRRNKNDAADAAAICEAAGRPGQRFVPVRSVENQAELMRHRARELMVGQRTAALNALRGHLSEIGVVAAQGVPNAYALKALVDGGVDENGEIVVPDCVRLALAPLIRQIDALDEAIEAIDRTLEASARTDETARRLMTIPGIGPVTAMALLATIQDFAAFSSGREFAAFLGLTPREHSTGGKPRLGRITKMGDRYLRKLLVVGACSALAARKGHNDALRRWASGMLERKTVKYKFKLTAVALANKLARIVYALATKGGHYDDRPVAA

SEQ ID NO: 512933 - protein, 411 aa, unidentified
MESLLRQELPATVLVVAIDPGKVANRVWLASGERGLIGEPVTLPVLREGIDELERLVGASEAAGVPLIGIEATGSLHRAWTAELERRFPGRVRLLAPSETQAARAQLGSRRFKSDDRDCAALVYLLRQGLGRPPREPALEALLAAVSHRRALVDELKVLRQRLHAQLNALCPGLSAPQGHGRVLELLRPSGQAVLACAVAFGGRPPSMRSLIARAPGRLTRRNAAFWAARWRACLPPPADAELRAERLCFDLERLRGLLAALARVDAQSATLLAQTDGQVLTSLPGVKAVRAAAFACHSLPIERYATAEQLYSATGLAPASYDSATIRRRGGISRQGLPEHRDALMAIAWGLSSHSPAFRERGDELRSRGFAPIQTRVALARHACRLCHALLRSQQPYDEARYRQARRRGR

SEQ ID NO: 512934 - protein, 394 aa, unidentified
MKLIGIDIEKNKHFFCVMDQQTGEIISQPVSFSNDKEGFDFLVQEIKSYPKDSILIGMEDTGHYHFALLKYLLDLQYTVALINPKTTDFNRKMQGGITKNDKLDTINICDVLDTPERKKQYRITKVNSFDLYEQKQLTRHHHNLKEEENVYKNRLQKCIDIVFPEFNKLFNSKYGIVYMNILKMFGSAENIANTDIRTIRKCFEIEGRGNRISLTPERLKECARSSIGISSSAEVIQIKHLTAQIELIEEQLTEIDKKIEEFSIQNNSPILSIPGISHFSGTSILAELGDISNYSKPSQIIKFAGVAPLHYESSQFNAQHTAITKKGSKYLRKTLYQIILPVIRHNPVFNKYYQLKISQGKGHRCAQGHCVRKLLRIIYHLLKTNQQFDPQLLR

SEQ ID NO: 512935 - protein, 349 aa, unidentified
MVTLGVDAHKRTHTIVAVDGNGAEVGQRTVAATSAGHLEGLRWASQWPERRWAIEDCRHLSRRLTTELLVAGEAVLRVPTKLMAAARRGARTRGKSDPIDALAAARAALREPDLPVAQLDGPARDLRLLVDHREDLVAERTRIENRLRWHLHELQPGEEPPTRSLNRHATLRALEATLAGQPGVVARLARELVVRCRDLTVAINALEREICERVSGMAPRVLALLGCGALSAAKIVGEVGRISRFRSRNAFAMHNGTAPIPVWSGNHERFRLNRGGNRQINCALHRIAITQMQRPGPAQDDLTRRRAAGDTKTEAIRALRRRISDEIYRRLRADEAAANTQLRDFLAAA

SEQ ID NO: 512936 - protein, 311 aa, unidentified
MTLICGVDVSSETLDARIGPDGPAERFANTPEGIEALAAFGQAHGVALVAMEATGGYEKLPFMLLWAHGLPCAILNPRQVRHFAQAMGFLEKTDPIDAGLIAAFAAVKRVAPQEPAPETQQQLEALVTRLRQLTELRVAEKNRRRLVANGGVRASIGEVIALVSRQIRSLEAAVASLINDDPLWRQLDQAFRSIKGVANRTVARLMAEMPEIGTLSNKAIAKLAGLAPLARDSGKSNGRRPVRAGRANIRSILFVVAEIVRRFDPDFAAFHAKLNRAGKPKKLIRTALARKLLVRLNPKARNARAELAFAP

SEQ ID NO: 512937 - protein, 316 aa, unidentified
MTTAPIFVGIDVSKDRLDVALRPTGDGWTVAHEEPGIATLVERVRGLAPTLIVLEATGGLEAPLTGALAAAGLPVVVVNPRQVRDFAKATGTLAKTDALDASILARFAEAIRPALRPLPDAATQALSALLARRRQLVEMLTAEKNRLGPAPPPMRKGIRAHITWLERQLAHTDDELTQAIRESPVWREQDDLLQSTPGVGPVLARTLLASLPELGTLNRKQIAALVGVAPLNRDSGTLRGRRTIWGGRAQVRTILYMSALTATRCNPVIRAFYARLCAAGKAKKVALTACMRKLLTILNSMVKHRTRWQEHLASTP

SEQ ID NO: 512938 - protein, 358 aa, unidentified
MVTTTNIRKLNDRILASKCETVKIGADVHARDIVACVQLDGALPERPVKLTAEQLIGLVAGLIKAGRTVHVCQEAGPCGYVLHRRLLAAGAKSLVVVPTALADGRQQKTDGLDATALVDKLDRYLRGNTKAFTVVTVPTPEQEQVRGEVRLREQLKHDRHAWEARGRSLLLAQGHHVTGPWWRAGNWAPLAATLPAWLVERLEVIRKMVLALDAEERALHTQLEACAPAQLPKAVGALTWVMLAREICDWTRFKNRRQVASYTGLCPGGYQSGGTQRDGHINRHGNPVVRHLLIELTWRLVRWQPDYPPIRRLLESGAKGAARRKLAVATARKLAVDLWRLATKQTTPETLHLLVPTA

SEQ ID NO: 512939 - protein, 348 aa, unidentified
MTIVDAARPVTGGVDTHLDLNVAAALDPVGGLLEVAEFPATSGGHRRLLGWLAGFGPVTRVGVEGTGSYGAGLARYLRAAGIEVVEVDRPNRQARRRAGKSDPLDAIEAARAALSGRASGAAKTRDGNVEAIRALVVAKRSARATKIKSLNQIRHLSYTAPDQLRERLKGVSRQQLAARAAALRPSQREGADPVLVATKTALRILGRRVLALDEEKACIDALLSELVTQTAPQLLTLHGVGIDTAATLLVTAGDNPGRLRSEAAWARLCGTAPIPASSGKVTRWRLNRGGDRQANCALRGIVITRLSNDPRTRAYMARRLAEGRSKPEVIRILKRYVAREVYRHLPRP

SEQ ID NO: 512940 - protein, 430 aa, unidentified
MKSNTQNAKIEAITEKTLVLGIDVGSETHYARAFDYRGIEYSKKPFKFSNTEVGFATFKEWILDLKERHEKDKVVPGMEPTGHYWFNLGKFLQDNEMKPVLVNPHHVKKSKELDDNNPTKNDRKDPKVIAGLVREGRYMIPYLPDGVYADLRTASNIRFQLQAELTRIQNRISRWFNIYFPEYKTVYGKPDAKSGMLILKAAPLPEDILTLGIDGVNQIWRDAKLRAVGKARAKTLIEAAEHSIGSKEGTMSARMEIRMLLEDYESQNMRLQEVMVLIEELVKEIPMAEKLLEIKGVGIRTVSGFLAEVGDISRFNNPKELQKLAGLALVENSSGKHKGKTTISRRGRKRLRYLLFEVAMSLVAKNPEFRELHNYYTTRRLNPLKKMQSLMAIAAKLIRVFYAMLTKGVDYDPKKMISDIKRPTVYLQAA

SEQ ID NO: 512941 - protein, 354 aa, unidentified
MVLLGVDPHKDTHTVVAVDQAGRQLDQTTVPARTLGHGELVGWARTRWPGPAQRTWAVEDCRHVTGRLERDLLAAGERVVRVPPRLMAGARQAVRTQGKSDPIDALAVTRAALREPNLPTAGHDQASWEVKLLVDHREHLVAEPTRTINRLRWHLHQLDPDLEHTTRRLPGRGLRRITARLAQTAADAGSVVQVRICQAQVSAIQALSDQIGQLDRQLRQQVARLAPSLLSLPGCGTLTAAKLIAETAGVARFRSQACFAMHAGVAPVPVSSGRTDRHRLSRGGNRQLNAALHRIAITQLRLPGPGQAYYQRRRAQGDATGEAVRALKRRITRAVYQDLKQAEQRLRAASPAAA

SEQ ID NO: 512942 - protein, 312 aa, unidentified
MAKIICGVDVSSKTLDARIGQDGPSRSFDRTPEGIRALAAFCKSHDVEFVAMEATGGYEKLPFSLLWLAGVPCAILNPRSVRRFAEAMGIFEKSDDIDTGVIAHFAEVKRIVPQAPASGAQQELEALVTRLRQVTDLRTSQTNQRRLVTEACVLEDIDELVAVLNRQIRALEAKIAQSIDADPLWKALDAAFRSIKGVANRTVARLMADLPEIGTISGKKATKLVGLAPLANDSGKLKGKRSIFGGRAHVRSILFVVAELVRRHEPDFRKFHETLTAAGKPKKVIRVALARKLLVRLNAKARDARKELGLAV

SEQ ID NO: 512943 - protein, 366 aa, unidentified
MKKNSTMAIRRKQIFKGKKLTIGMDLGDRFTYYCVLDEAGEVMVEQKLPTTKPAMKQVFSRMPSSRVALETGAHSPWVSRQLTQLGHEVIVAHARNVRLIGESSRKDDRLDARMLARLARLDPGLLSPVQHRSAEAQVHLTVIRARAALVGARTALVNAARGLAKSYGERLRKCGTQQVGKKLAAGVSVELRVALEPLLAEVASLTQRIADYDRRIEQIATQVHPEVALLRQVKGVGTLIALTYVLTVGDPHRFRRSRDVGCYLGLRPGRRNSGSSQPQLHISKEGDGYLRTLMVQGAHYILGPFGQDSDLRRWGLKLCERGGSNAKKRAVVAVARKLSVLLHRLWVSGEVYEPLRNHNSAAGAAA

SEQ ID NO: 512944 - protein, 391 aa, unidentified
MVCVGIDVAKDKHDCFILNSEGEVLRDVFTIPNNKDGFEALLQRIQSCTQKSDKIKVGLEATGHYSYNILGFLLDSGLPTYVINPLHTNLYRKSLSLRKTKTDRVDARTIATMLMSDVNLKSYTDTAYHNEELKSLTRYRFDKVKERAKLKSSVARLVNILFPELEKLVPTLHLVSVYALLNEFPGASHVAAAHLKRLTNLLEEASKGRYCKDKATEIRDAARNSIGSKMPAKSLELKHTIRLIRELNAEIAEIESAIQDIMDEINSPILTIPGISYRMGAMILAEIGDFSNFDSPDKILAYAGLSPSTYQSGQLNNCYAHMEKRGSRYLRYALFNTAKFVCNWDPTFAAYLAKKRAEGKHYNVAVSHAAKKLVRLIYALEKSGHSYRLAA

SEQ ID NO: 512945 - protein, 347 aa, unidentified
MLHVGLDLSRRKVDVCLLNEDGEHLDQLAVPPDSDSLRALARRIDEVHGEPVCAVVESMTGARLVHDALEQEGWSVEIADAQKVKGLAPLACKTDRIDSMVLAVLSQRDLVPAIWLPDPRIREERELARFRLHLVKHKSALKCRIHSTLINFGRPCPVTDLFGAEGRRLLARLDVPEPWRGNVTAALELIDDLERQIGEANRRLKAGHADHPYIPLLLSAPGVGWVLAFTIAAEIGEIERFSSPEKLTGYTGLCPRVNQSGDADRRGPLTKHGPTYLRWALLEATMHALKHPAYSERYQRNKRRLGKQRGAKVAQIDIARRLAHAIWHMLTRNQQFAPRGATFRLAA

SEQ ID NO: 512946 - protein, 482 aa, unidentified
MTRRILGMDLGITSGHHAVVIDETCRVLARSRAHPTVDSLEALERLALADAPEGTELEVVIDPTGAAWLPVAVFFTARGHRVFRPDVSQTAHLRKALARRKKTNRVDAEVLAKLAVWSRGALHALELPTGEAAQLDRVVRATERLTEEIARHKARIRDLARTAMPLIGQAISKTMGRADLEVLRSYGDPRELLKLGLEGLTRLIFQVSRGEHGEAKARAYLRAADEAVALYGDSGAVAFEVLAEELAAEITRLEVAEATLRPLERRREECYRKVDPTELARSVPGIVRVGAPLAVAFTGRAERFPTADRYASYVGLVPGSSETGETDRKGQSMTKAGNRRLRRMFVRAADTARKLDPQLARIYYVQMVERGAHHNKAVSVVAAHLARRFWATMVRGTPYVIRDLDGRPADRAEAKAIIAGRFTVSEDVRARRRSKKKRRTAPHQVPMGHVSAVSPRRATEPRRPSSAPSIMRARREVVKASS

SEQ ID NO: 512947 - protein, 452 aa, unidentified
MAMAKPQVVDDEEYQRVHERAAAADVAKAPGVVCTRVPHPSRPGARCSTVQTVTATMNAIRKPGRQLRKDGIEIVTLESASGYWRIWYYVLEAAGLTVQLVNAAQAGNLPGRPRTGRLDAMWLARLTEMGMLRASFVPPAPVRELRDYTRARVRLVRERARCYQQLEKLLEGALIKLSSVASKLTTGSARDMIAAMIAGERDPQVLAALARTRMKARHAALVEALAGMSGDHHGELAQMLLDQIAFPDGKIGQLATRIRQRLSQIPGAWGADAGGATGPGAGSEPDARVLPAAGRLAEIPGISPGLARSIIAGTGLDMSRFATAGHLVSRAGLCPATQQSGPRIRKDRKGQGDTWLRGYPGQAATAAARTRTFPGERHARIARRRGKARAQAATARSILVIIWHLLENPGARFTDLGYDYYATRTGKDRRIRNHIRQIQALGFDVTITARAA

SEQ ID NO: 512948 - protein, 420 aa, unidentified
MPDDRCRLGSDDVVIGLDLASVEHQVVVLTADGQRLTRFKIPHSRVGLEELLRRTMPAALSRTGGSRVFAFEATGHVWEAVAYILRARGERYVVINPLTTFRVREARQLSREKTDLTDAEQIAELCRSGLVTRTQLEARPYLALRRAWGEYRRLREERARLKVLVAHQLYGLFPEFLRVWADLLQPGALAVLRTGLTPATMAALSLGEFVARVREHRAGRRVWRFKLAQVHRYAEQTIACPDGVDVLAREVQRAVARIDVLTAQMTTVATEVDALLADLEETPYLRTIPGLGWASVAGLLAHVGAITKYRHGRQLIKLAGTNPSRRDTGQTVGRGQTMSRRGRAGLREVMYLATISCLQHNPRIRAHYDRLIQRADRPLSKMQALGACMNKLLLYAFAVMSRREAFQLDHDWQRTMSRVA

SEQ ID NO: 512949 - protein, 334 aa, unidentified
MAKKYYIGLDVHKDQTTYAVKDWDGATVASGKTATQFADLQNVLGEYIGEAIVAMEACTSYYSLYKKMKEKEIDVHVANVLQLRKVIGKNDRLDSERLADMLRLKIMPESYIPEDKVQNLRVLINLYHNSVEENVRYQNQIHAVLDRNGNQIQCRDIFSKKGLIRIKQYLQMNNDFALRNLVAAFDYSEQRKENLKCEITAYLNINFKEEYELLKSIPGIGETIAGYLIAEICPLDRFVNKRKLRRYAGVVPISEKSDKKVYATYLPKHASRSLLRYALVLAANCAVRTSCRLQKYYQKKKKGGTHGQAIMCVASSMSDIVYNVLRSKKAYPRS

SEQ ID NO: 512950 - protein, 344 aa, unidentified
MATQPTVLPKLYIGMDIHKKSWSVHLRTDISDHKTITIPSSNDVLYHYVQTNFPEHEVSLVYEAGCCGFTASRYFLNLGWNVLVVNPADVPRTDKQSHQKTDVLDCRNLAKQLQSGHLRGIYIPDQKQDYLKSLVRQRAETTRQLRKIKCSIKALLLYHGIEIPKEFDNPNWSKAFIKWIENIPWQEPVGKLCMESKIRLLKVIYQEYLELVNKLRSYCRKNHKKDYYLLKSIPGVGGYLSSVVLAEVGDLRRFNKETQFASFVGLVPNIRNSGMTENVFGVTPRCRDLLRSYIIESAWVALRLDPEMQTYYRKHQGKNPKSIIIKIARKLLNRMLSVIKKETK

SEQ ID NO: 512951 - protein, 316 aa, unidentified
MTDLTTSFSHFIGCDVGKREIVVFNSRDGKNSTIPNSKKALAAFAAGLDRTCLVICEATGGYEAALLDAMLDAGIAAHRADARKVKAFIRSFGIRGKTDKIDAKAIAQYGAERASKLALWQKPAQSRQCLQSLVLTRADLVRDRVAYKNRLAAPGAEPVKVMLREVIKCLDRQIATIEAKARALMASQPQLVRDAASLRAIEGVGPTIAMALLALMPELGTLNRRQAAALAGFAPHPNQSGTRDGYRKARGGRPEVKTTLFMGALSATKSRKPMGQFYQRLIAAGKKKKVALVAVMRKIIVIANAKLRKNHEVQLS

SEQ ID NO: 512952 - protein, 394 aa, unidentified
MEAVTSQPHTPAAIRTDLAAIFVSLELSRSTWLITSLSPGNGEKMSKHSVAGGDVAALLHRFAQLQEKVRSRTGNHVPIVSIQEAGLDGFWIDRVLKANGIESYVVDPASIAISRRRRRAKTDKLDGEALVRALLAYKRGEPRVCAMVNPPSPEEEDRRRICRERKVLIAERVKHVNRIKGLLFGQGISGYEPLRKNRRKQLDELHTGDGRPLPTHLKTQISRELDRLELLLEQITAVENERDTLLAAQKDSVAATATLIPAGAMLCDVKGIGLELAAVLWTEGLFRHFDNRRQVAAYAGLAPTPWQSGTIDHEQGVSKAGNPRLRTTMIQLSWLWLRHQPQSALSLWFTARVQSSGGRTKKSAIVALARKLLVALWKYVTAGVVIEGAVLKTA

SEQ ID NO: 512953 - protein, 343 aa, unidentified
MEYFAGIDVSLEASSVCLVDSAGKIIRETKVASDPGALIEHFASLDLALKRIGLEAGPMSQWLYEGLTKAGFDVVLLETRHVKAALSAMIIKTDRKDARGIAQLLRMGWYRSVHSKSPGSQDVRALLTGRKLLQAKLRDVELSIRGILRGYGLKVGEMSRGRFEGRILELVDGHPVLETVIGAMLHARHALWNEFTKMHREMLKIVRQDRVCQRLMTTPGVGALVAITYRSAVDDPGRFAKSQTVGAYFGLTPKKYQSGETDLDGGISRVGDTMVRTALYEAAHIMLTRATRFSALKRWAVDVAKRRGMKRAKVALARKLATVLHRLWVDETEFRWGKEASAA

SEQ ID NO: 512954 - protein, 360 aa, unidentified
MAQIRSFAGLDVHAAKVIAATVDGGSGELRFRRLSGATSEVAAFCAELPTPTRVAYEAGPTGFGLARELERAGIACVVAAPGKIARAPQDRVKTDRRDAERLVRLLMAGELHPVRVPSVTEEALRDLVRAREDLRGDLMRARHRVGKLLLRHDVRFEGNNWTQAHRRWLAGLELGEPVAQAVLEDGLGAIDALLVRREALERQMTGLVPASPWATEIARLRCLRGIDTLTALGLCAEVGDFGRFRRPGQLMSYLGLVPSENTSGEKRRQGSITKSGSQHARRLLVEAAWHNRRAPRIGRELARRQDGQPHHVRAIAWQAQRRLHRTWQRLDHDRGKRRTVVAVAVARELAGFCWAVTTAD

SEQ ID NO: 512955 - protein, 468 aa, unidentified
MENNYILYVGMDVSKGKADAAILKVSDRRSVKPKFLRKKLSFKFVKSEVASFLETVRNYSDVNCTSTSICFALEVTGIYSTNVYNYIKANLYENESIKFLNTDFVNQWRIAHNIAKSDPLDAQTISTIIGTDSDVQYVNDNVFENKNGYQDLKALVHRHYQIKKIYSQEINRLIAQCDCLFPELQYVFEPKSAAFIAVLSSYPTTHDIINASRVEVFDVIYEATKHRCSMDKVDKLFELCQDTLVPDDISSYGKSIILDLVENIKNIKGRLKSIERYIRDVASLNPAYKLLLTITGCGPITAATVIAETGNIRRFKNADCFVSYSGTSPRNKRSGTSVETMGKISKKGSRYLRHAIYMIAEFARRHNPVLKHQFERIKNGNKKRHKLANIAIANKIARYIYSIMKNKSSFVISHDHIMRLPEETRDTFFNSISLDFPKNTRKQIYQYSDINGELHRFVYIKTDEMIPA

SEQ ID NO: 512956 - protein, 416 aa, unidentified
MKRTQNTRGYERYFAIDTHREYHLVGGQNADQKWVVNPRRVSIEKFAEWAQKNLREGDIVVLETTTNVWDTYDIVTPLVSRVLVANAAAVGEIAGARVKTDKEDIKRLLKLLVGGIVPEVWVPPAHVRELRGFISYRNRLVKMATMIRNHLQSLLHKHSLMLPKEGILNQAWWDAQTSISTLEKMQIRQELGLLEEIKKLQAAVNEELEKQSTGELWGKQALQLIQLPGVGVIVAMTVLSAIGDITRFEDAKHLVGYSGLGAGVHDSGKTHRDKHITKKGRKELRWIMVEAAWRAVRMSPYWKEQYEKHLKRMRKPNQAIVVIARKLLVAIWHVLSKEELDVQASEEDLAYKMLLLSWSLNENVRMGLSYKQFAKYALMKLGVEKDITRFVRKDIPRRLAAKEEVLARMEELGITQ

SEQ ID NO: 512957 - protein, 371 aa, unidentified
MEHTRFVGLDIHKERISIAVAESGRSGAVEYLGEIANDPHAISKLCNRLGLPGKPLIFCYEAGPCGYGVHRQLTSLGHRCDVVAPSLIPVKSGDRVKTDRRDATMLARLHRAGELTSVWVPDTDHEAMRDLIRLRSVIRHIVTRARQHLQGFLLRHGRKHGGGTAWRMAYRRWLSTLAFEHPAQQIAFQDYVDAVTDAERRLQRVEEQILSLLPEWNLRAVVDALQAMRGIALINAVVLVAEVGDFTRFSNPRELMAYFGLVPGERSSGETVRRGGITKTGNTHARRALVEGAWAYRMKPRIGRHKVDRIDALPKVVRDIGWKAQVRLCARYRRLSARGKTANVVNVAIAREMVGFIWSIACTIQSAPKPA

SEQ ID NO: 512958 - protein, 384 aa, unidentified
MNTIQYIGIDVDKDKCNITSIDENGEEIEQYHIENNTKELNKFIKKTPQDAEIAIESSTCSKPIYWMLKKKDLKVHMAAPGKIKLISQSKKKTDPHDSRLLADLLRLNYLPPSYVPTEEIEDLRKLLRHRKNLGEKRTMTKNQIHAILQRNGIKHGFSDLFGRDGIRFLKQQNLPQLEEIILQGSIRELGFLSYEIHVIDMRLAAIAETDKQTHLLMSIPGVDYYSALVILSEIGDIYRFPNSKKLVGYAGLAPRVYQSGKTKHHGHISKDGPSILRWVLALSAHGVIKKPGKLRRFYLRLSKRIGKSKALVATARKLLIIMYHMLTKQKEYEERDDDLTKRKIKRMKAKSQRIIRLKETGMLRNENYEQLAEKGITMVTFSPA

SEQ ID NO: 512959 - protein, 392 aa, unidentified
MVVSVGIDVSKDKHDCFIVSSEGEVLADGFTISNTMDGFNCLLQRIQNCTTPQDKTKVGLEATGHYSYNLLGFLLDNGLTTYVLNPLRTNLYRKSLSLRKTKTDRVDARTIASMLLSDAGLKPYTDTAYHNEELKSLTRYRFDKVKERAKLKSSIARLVCILFPELEKLVPSLHIASVYALLEEFPGAKQIAAAHLTRLKALLETASKGRYKRDMALEIRDAARNSIGARIPAKSLELQHTIRLIRELDAEIHEIETEIENMMDEIHSPITTIPGIGYRMGAMILAEAGDLSRFDSPDKLLAYAGMSPSTYQSGQLKNCYPHMEKRGSRYLRYALYNATKYVCLWDPTFAAYLAKKRAEGKHYNVAISHAAKKLVRLIFAMEKSKQPYCSAA

SEQ ID NO: 512960 - protein, 356 aa, unidentified
MSYEVKYIGMDVHKEAIVIAVLNESGKLVMESVIETKASSILQFIHGLRGELHVTWEEGTWAAWLYDLLQPQVQHIVVCNPRRNALLKEGSKSDKVDARKLADLLRTGMLRAVYHGENGLRTLRELGRSYQTISKDLTRVMNRLKALYRGWGIPCAGTQVYAARAREEWLSKIPQAGVRRRAELLYQQLDGLQALRREVRPEFLAESRKHKAAKLLRQIPCIGPIRAARLIALMQTPHRFRSKRQLWTYSGLGIATHDSAQFRFVSGQLQRSKKPQQIRGLNRNHNHEMKEIFKSAATRASCGMGPFHDFYAGLLTNGMKPEMARLTLARKIAAITLTLWKKEERFDAKQLKTQAA

SEQ ID NO: 512961 - protein, 426 aa, unidentified
MKHDAPELAAYVGLDWADERHAVCLQAADSRKRESYDVEQEPEALHAWVSRLRTEFGGRKIAIALEQSRGNVICALMSYDFLILYPINPKALARYREAFATSKAKDDPTDADLLLDLIVRHRDQFRAWTPDDPLTRQIQALVQYRRKLVQERVRITNRLTSLLKCYFPQALDWSGSLDAIQACDFLEKWPSLEAVRKARPSQLRDFYLARGSRNHQLIEKRIEQIRTAHALTHDTAIVSASTEMMLAIVAQLRPLIGSIQRFNDQIESLFNQHPDHQIFESLPGAGDVLAPRLLAAMGADRDRYDSACDIQQFSGIAPVTIKSGKKKIVYQRRGCARFPKQSFHEFAAQSIRSSAWASEVYNHQKALGKSHHAAVRAVAFKWIRIIFRCWKERLPYDEDYYLQVLRRRNSPYAQDTQPTERRVANA

SEQ ID NO: 512962 - protein, 420 aa, unidentified
MLVESEDSEQIIARVAALDIGKAELVCCVRVPGRGTRRLQEVSTHSTMARSLTELANHLVESGVQRVVMEATSDYWKPVFYLLEAHGLDPWLVNARDVKHLPGRPKTDVLDAVWLAKLAERQMLRPSFVPPPPIRQLRDLTRYRIDLVATRTAERNRVEKLLEDACIKLSVVASDIFGVSGRAMMAALIAGERDPKVLAQLARSRMRTKIGRLEEAFNGHFNAHHGFLLTRMLARLDGIDADIAVLDEQIEVYLAPFAAAAARLDEIPGIGAVAAAIILAEIGTDMSVFPTAGHLCSWAKFSPGIQSSAGKTKGTASTGHGNRYLAQILGEAAIAASRTDTFLGQRYRRIARRRGNKRALVAVGRSILVIIWHLLTDPDATFIDLGPDHYTKHLNPETKRRNHIRQLEALGYTVTLTPAA

SEQ ID NO: 512963 - protein, 316 aa, unidentified
MSEVSKVVVGIDVSKARLDCHALPSAQSFATDNSQAGIEALSQWLKQLHAELVIMEATGGYETRAATATAALGFRVAVVNPRQVRHYAKALNRLAKTDRIDAKILAEFGARVDVQVRALPDEETRELAELVSRRTQLVNMRTQEKNRLAGAAGKLRDGIKAHVKWLDEQIHSLDIDLTAKLRSSQAWCEKRDLLHSAPGIGPLSTAMLVGRVPELGKLDRKAIAALVGVAPLNDDSGKRQGRRHIWGGRGDVRSMLYMATLSAKRHNPVIREFYERLRRNGKQFKVAMVACMRKLLTILNAMVKNNTKWAPSLKTG

SEQ ID NO: 512964 - protein, 317 aa, unidentified
MAQEVYFEQVVARGCGLDVHKETVVATVSGTGIKKETRTFSTFTRSLTELREWLLSLGVTHVSMESTGVYWKPVFNILEGFGLTILIVNARHIKYVPGHKTDKKDSAWICKLLLAGLLKGSFVPPVEIRNLRDMTRYRRKLEGAVTAEKNRMIRLLEDANIKLSTVLSKVHGASGTKIVDAMLSGETDPEVLLELCHGRIKADREDIKLALEGRLTDHHKFMLQMIKKDINQTEALISDLDKEIAKQLQPYAEELSLLKQIPGVGEQTAGALIAEIGVNMDAFPDEKHLASWAGMSPGNNESAGKKKVEEPRMGTKM

SEQ ID NO: 512965 - protein, 319 aa, unidentified
MAATAKDQKMFVGIDVSKDRLDVHIHPSAVTFAVDRDTDGLSQLVTRLKDLDLAVIAIEATGGFESTPVAALAAASLPVVVVNPKQVHNYAKALGLNAKTDALDASVIARFAEATKPEIRPLPDDETLALAELLARRRQIVQMITAEKNRALRMAANKLLQKSIGRIIDALERELARLDEGIDTTVKGSPLWREKENLLASVPGIGKVIARTLLAEMPELGKLDRREVAALAGLAPWTRQSGQWRGKSMIGGGKTVPRTVLFLGALSAARYNPDLKAFSLRLLNAGKSKKVVLIAVARKLLTILNAILRDKTPWSPKTV

SEQ ID NO: 512966 - protein, 339 aa, unidentified
MRKDEFECIGVDVSKKTLDVALFRGKVDWNEGHIKVDNNSSGYKELRKWLRLKKAEKKQLRICMEATGLYTHDFRSWLEQEGITYYVVDPKRMHHFAPPQSIKGIRQTKNDKADAFRIAIYCSLFHESMEPSRLPSAAYFKLKRLLAERRQYVKQSVLYKQQLSDISIYDTVSSRMRKEKEVGNLKDDIRQTDKEMKSIIDSDPAIKRNYDLLTSIVGVGIVVAVTTIVLTENFTVFASPRKYASYIAIAPFPHESGTSVRGATRVSKQGFRQAKADLSISVLSAMSHDSELKEYWLRKKAEGKHAGTILNAIKFKIVLRMFAVVKRGTPYVNTKGYRR

SEQ ID NO: 512967 - protein, 307 aa, unidentified
MSMVGGLDLHRRQITYDVLDVDSGEIWRGRLWQPDRQRFRRWLGTEVAARSRGESVALAVEGCTGWRYVVEEISAAGFEPFLAEPADTQAARGKKRRAKTDRTDAQLLRELLSAGELPESWIPPPDVLEWRERVRLYKSLVDQRTLWCQRIHAVLYHHGVAGPEGAIRTEKTRALITSEQVQLSAAGRERIAAGYKMIDAADREALPLKADLQRFGARQPACRALADAQYGIGGLIAVVLWSELGDCRRFCRSEQVVRHSGLDVTVDASDRRRAGGHLSRQGPETLRWALYEAAKNSSHGRSPDHSY

SEQ ID NO: 512968 - protein, 321 aa, unidentified
MNKYTETFGVDISKDVFDVHGSLSGHLQYENSPKGFKEFLGRIPQGSIVVMEATGYYHYRLAQYLSKSSITVSVVNPLVVKRFIQMKLSKVKTDKSDSKSICEYAMKNQVPIYNFLSEVQSECLQLFRLLDSYLKKRTATKNKIHGEEALGRPSTFVYRSLQRDRKHLDKEISGIEERLLTLVKQEYQHQLTLLTGIPGIGIKTALFLVVMTEGFSKFENASQLCSYVGITPTTRESGSSIRGRSRISKVGNKKMRNLLFLCAFNACRHNKACRALYERITMKGKSKKLALIAVANKLLKQAFSIVKNGLPYDENFVSKLA

SEQ ID NO: 512969 - protein, 321 aa, unidentified
MTKKNSLCSFIGIDVSKQLLEVAVHKSDYHFCSANDPKKFPALIAELIALRPARIVLEATGGLERSLLQALQAAGLPVVLINPRQVRDFAKALGQLAKTDRLDARVLAHFAAAVEPPLRPLKAAEDTELDALMGRRNQLSDILGAEKNRRGSAATDTARADIEAHIEWLEQRLKALDEQLKEQLKRSVAWQQKDQILQSVKGIGFVTSVSLLADCPELGQLNRHQIAKLVGVAPLNRDSGKQRGTRHIFAGRAQVRSKLYMATLTAIRCNPVIKAFYQRLIDRNKPKKVAIIACMRKLLTIINVMVRTKKPWNVKAQPVSA

SEQ ID NO: 512970 - protein, 314 aa, unidentified
MTIQTPIVGIDVAKESLSLYRLDTQQASTLANTRSTILAWLKTLPADCALAIEATSTYHVLLADLAYQRGHRIYVIDGYRLSNYRKGIGGRVKNDQSDARLLARYLAHEQRQLRPWKPTCKAYRRLQVLLRRRATLIRSTTALRLSFAQDRQMARELKPVLERMKRLEVRLNDELNKALQEAGLAEQAKRCQAIEGIGPLTAAALNLAFLRGSFRSSDAFIAFLGLDVRVKESGRYNGRRKLSKQGDSETRRLLYNAAMAASRTKAWQSRYQQYLQRGLKRTEALIVLARKLARIAFALMKTQQPYRPTVDTVG

SEQ ID NO: 512971 - protein, 433 aa, unidentified
MTNRLQVGIDFSQKKADFCLLFPDGQPLESHISFANSRLGCSLAKQLLLDTLNTYAFEGLDVSGEATGYLWLPFFLQLSADPDLAPHDLNLFLLNPRWVKWFKKCFPQDHKCDAKDPFYIAERTRTHRPEVVWSPPDCLPLRMYTRLRFHIVRTLAREKCYFSTFLFLKASSYRCIKPFSDVFGATSRLVLTQQPTWDELAALPVAELAARLYELSGHHLPDPHANARKLQQVAQESFSLDASLALPVQRILNLTLAHIRFLETQVAQVNTWIAAELEAYPVIVQLTTIPGIGPVCSSGVGAEIGGIQRFLQPQKWDQKRKHYRPRNLRDAEDAVAKIAGLWWPRSSSGDFEAEDRRMAKTGNRYLRYYLIQGADRMRQHIPEYAAYYARKYQESSKHRHKRALVMTARKSVGLVVGLLHRNEPYRSKEERHT

SEQ ID NO: 512972 - protein, 341 aa, unidentified
MKHDLNVVGIDLAKHIFHLVGMDDRGTIILRKRLMRGEVMAFMAKLPRVTVGMEACGGSHYWARRLREQGHEVKLMAPQYVKPYVKTNKNDLRDAEAIAEAVTRPSMRFVPIKEVEHQDIQALHRVRERLMGARTALVNEMRGLLAEYGIVLPQGVNAFRKTVREKLEAEQAKLTSLSQEIFSKLFDELVKLESELAYYDDTLEALAHSHPECQRLLTIPGIGPITATALIAAVSDVGVFTHGRHFAAWLGLVPKQHSTGGQTRLLGISKRGDSYLRKLLIHGARATLRWARTKTDRRSQWIRGLLERRGWNRTAVAVANKNARIVWALLSRGEVYRASTS

SEQ ID NO: 512973 - protein, 343 aa, unidentified
MQTITTIGLDIAKTVFQVHGVDAGGQVIVRRQLKRRYVVPFFQKLSPCLVGIEACASAHHWSRELQALGHTVRLMPPAYVKPYVKRQKNDATDAEAICEAVTRASMRFVPTKTLEQQSGLVLHRTRHLFIRQRTSVINAIRAHLAEFGIVAPVGRHGVEELLTVVADPSDKRVPDIARACLLALGDQLQSIKKQILEFDRLIRAWHRSNEMSMRLEAAPGVGPVLATALVAAVADPKSFRSGRNFSAWIGMVPKQHSSGGKNRLGNISKQGDRYLRGLFVAGALSVIRYAKVHGTKHRPWLTALLARRPTKVAAIALANKIARMVWAMMATGERYKEPVALAR

SEQ ID NO: 512974 - protein, 404 aa, unidentified
MPELWAGTDAGKGEHHCTAIDTDGNKVLSRRVPNNEPELLELLGDVLELADGGPVTWAVDLNSGGAALLIALLVSHEQKLLYTPGRTVHHASAAYRGSGKTDAKDAFVIADTARMRRDLQPLTETSEIAVDLRIMTARRMDLSADRTRAINRLRAQLLEYFPALERAFDYSTSKTALILLTGYQTPSALRRIGRARLTTWLKNHGVRTVTNAKSAANTALTAAEAQHTVVPGEKTAARMVRTLAMEVMALDEEIDQLNTLIEERFREHPDAAVITSMPGIGDTLGAEFIAATGGDMAAFGSPDRLAGVAGLAPVPRDSGKISGNLQRPRRYSRRLLRMCYLAAQAAAIHCPESRRFYQRKRAEGKSHKQAVLALARRRLNVLWALIRDHRTFETAADRQATAAA

SEQ ID NO: 512975 - protein, 388 aa, unidentified
MPAAETPVAYLGIDVGKSSHSACALDAGGGVAFRAELANRPDDIDRVLERAGSGALVVVDQKRNIGALVLARAHAHGNPCAYLPGYAEKQARGMFPGTAKTDAIDAEVIARTALGVPRALRPAPEEPEGTASLRILSSQREFASSARTRAKNRLRATLLEADPALEGAVDPSSRWQVSMLAEFGGAAGCSAAGWRRFSSAARRAGAPAAGARRLWEALLASSRSGRRLPAGEDVAVRILAREIASLDADIEELDSLVADSLAGDEVYECLLTVPGIGPKTAAALVTSIDISAFRGHDELASYCGVAPSDRRSGSSIRSTSPQRGGNRQLKNLLIFSCNSLIGTDNRFGRYYGECRARGMRHSKALKAVARKRLKVIYAIMRDAVPYAA

SEQ ID NO: 512976 - protein, 309 aa, unidentified
MTLNVGVDVSKDHLDWTKSAQSPVERIPNDTAGVRRLVKRLSGLEVERVVVEATGGYGRILVQALADAMLPVVVVNPWRVRRFGEGLGKLAKTDRIDAQLLALFGERANPPIRALSRGPETALIARRRQLIEMLVAERNRLGLATKAVRREIASLIRILERRIVRLDHQIDGLLQADPERRETNAILQSAPSVGPGVARTLLVDLPELGRLSPKQIASLVGLAPFARDSGRKKGQRSVRAGRAAPRTALYLAAMNGARFNPVLRSFYERLRAAGKPPKLAFIALAQKLLTILNAMVRDRAPWRPQSLRA

SEQ ID NO: 512977 - protein, 340 aa, unidentified
MKITTIGLDISKTIFHMFAVNQAGKLVKKRAIKRADLLSVFARLEPTLIVMEACGGANHWAREFIKLGHQVKLIAPQYVVPYRRKNKNDFNDAEAIAEAAQRPNMTFVPIKSVEQEDIQMVLRIRKRHVKTMVAINNQVRGFLAEYGLCAAKGKTALAARLPEFIDDESNELSAFARESFRELYADFVAAQEKVEFYTKKINVYTRNNPICKRVKSVIGVGPMTAAELYASIGDGKMFHNGRHFAAWCGLTQRQNSSGGKTMLSGITKKGNPHLRSSLIHGARAALQYVDGKDDKLSRWAYELKCRKHSNVACVALANKLARIAWSVIANEEDYRLEYAA

SEQ ID NO: 512978 - protein, 316 aa, unidentified
MIPPPLFVGIDVAKATLDVAVRPTAETWSAPNEAPGLDALVARLVPLAPTLIVLEATGGYQGPLVAALVAAALPVVVVKPRHIRAFAQAVGLLAKTARIDARVMAHFAEAVKPAPRPLPDAQTQELRALLVRRRQLVAMVSAERARLDTAPAGIQETLQAHIAWLATQIAGLDDALTQASQMHPAWQAKDDVLQSIPGVGPVLARTMLGHVPELGTLSPKPLAALIGVAPFNRDSGTLRGRRTVYGGRAEVRAVLYMGALVATRYHPVIKAFYERLLAAGKVKKVALTACMHKLLTIMNAMVRDLKPWQPQEAPIA

SEQ ID NO: 512979 - protein, 441 aa, unidentified
MSHGRALSRGDRRRNERLARLRSVVRRDFAVVAVDLASAKQAAVVTDHDSMVLGRRMFTGNTWVIDDILDWAEPIAAKAGYAGVVVGCEPTGHRWKPLLDRSRARGLELVCVNPMLVHRGREEEDFTRDRSDFKDATIIAKRVAELRCYVPYVMEGHWCRLRHLGARRADQLVAVGSARQRLRDLLECAWPAVLSAAADPLDALTWRAAMAVSTDPGRIVAMGFGAFADAVREQLPRWGGTRRNLRILRAIFDAAHAPGGVETERAAACERAAYALEDWHYALDQVTDVEHRMVEVLDALDLYELVTTITGLSVVGAAAILAETGDPARFDCARTWAKHAGLCPRANESGNFHGSTNVSRRGRPGLRLAAWRALWGALRHNPVYAARYTHLTTRADNPLCDGQARAAIAAALLRQLFVVVTRRVAWDPAIAAGTGVVPQAA

SEQ ID NO: 512980 - protein, 424 aa, unidentified
MNHPKMRFTYVGVDSHKDTHTAVFLDCFFDKLGEIVFDNLPSKFGAFLADAEKLKQDGTELLFGLEDTGEFGRTLTVFLTDSKQQVKHVNSYLVARERRNQNITQKTDSIDAECAARVLLSKFGELPVADPQDKYWILRTLVVRRNQVVYNNTRSKMSLHNLLTQHYPNYRQFFVGTFGKTALAFFKKYPSPKTLENVTVEELADFFYDESSGNIFGPGLSSIDRARLIFDTLQNTIVEFQEIRDETVRSTIRQIEFNVAELECMQVTMAVYLDGLGCTLTSMAGIDVVSACQILSCIGDVKRFPTPAKLARYSGIAPVTHASGKKDYQFANQRGNRELNSLFYNLAVRVSSPCGPNHKIINQFFYDYYHRKMSEGKTKRQALKCVQRRLVNIIWTMLTNGEEYVNPPVMDAPEKETKDETKTG

SEQ ID NO: 512981 - protein, 340 aa, unidentified
MGEQYVGIDLHRRRSVIVRMTGEGEVLETIRIDNDPVALSLELAKAGPDPEVVLEATYGWYWAADLLQACGAKVHLAHPLGVKMFGYQRVKTDARDSTNLAELLRMDRLPEAWLAPPQVRELRELVRYRAKLVALRSGLKAQVHAVLAKEGVRVPMSDLFGVAGSRLLDELHLGHAYALRVASLRSLITAYDQEIAMLGREIATALAGDVGYLAIQTIPGVGPVLAAVFVAEIGDVHRFASAPPLCSWAGLTPRHRESDTTVRRGPITKQGPRLVRWAAVEAVQRLPGGSKQAADFHRIADRRGTGIGRVAAARKLLTLVYYGLRDGQVRCLAPTQREAM

SEQ ID NO: 512982 - protein, 393 aa, unidentified
MSTGHPFVYPNEGTVQMIVLGADTHKRSHTVAAVGELTGRVIADTTVRATQRAFEQLLVWARGLDDRDRVWAIEDCRHVSGALERFLLAHGERVVRVPPKLMAGVRTSSRERGKSDVIDAVAIARAAIREEVGTLPVAQLAGPELEVRLLVDHRERLVGQRTALINDLRWGLHDLWPEFEIPPRALIGPGWQDRVARRLSRAEQTARVRIARDELRRIRELTRSTAALEAELAPLIAQLAPGLLAERGCGVLTAAKLIGEIAGISRFATDAKLARTAGSAPIPASSGRTDRHRLDRGGNRQLNCALHRLAISKARLDPETAAYLARKQAEGKTRREAIRCLKRHLARRVFRLLQPSSSPPPTASTAIRERPPVVAKAGHMIACTTTSGPFVLT

SEQ ID NO: 512983 - protein, 323 aa, unidentified
MKSTPVFVGVDVSKARLDVAATGSDQTWSVSNTSDGIAQLVERLREIEPSLVVMEATGGFEVPAAAALAAAEIPVVIANPRQVRDFAKSTGQLAKTDAIDAHILALFAQRVRPQVRPLPDEEARVLDAIVGRRRQIIGMITAEKNRLGFALPAVKKSIEQNIRWLERQLSDVDSDLDARIRKSPVWQAKHNLLRDVPGVGPNLARTLIAELPELGRLSHKQIAALVGVAPLARDSGLFRGKRMVWGGRASVRCALYMSILSATKWNPVIRVFYQRLRAQGKPPKVAMVACMRKLLTILNAMVRDGREWDPSIPLDQLRIQHSC

SEQ ID NO: 512984 - protein, 594 aa, unidentified
MLPHPTSAPQPADVQCTRIGVGIDTSRYGHYAAFLRHDLHSAAAELSFVESAAGYAQLRARLEQIALRHGPVHFCVRLDAAGPYADNLLYFLHNLGTPPSDGTALATATFSISCGDPQRNKNYRAAFFGAHKSDPIEARAAARYALQERPAPVPVLSAELRSVRQVASRLQAVVRQRTRLVNQLHHLLTLAFPELALLVKDISAGWVLELINRFPTAQRLAAAAANDLDDIPYLPHEQIAPLLTHARCSIASLQDDSMAELLRDQVRQLRDVHARQKRLENTLVAAYRRLPEPNYLDTIPGFGPVTAAILTAFILDIERFATVNQLVNYFGAMPVEASSGVERDGRPRNPRRYRMSPRGNDLVRRYLWMAALSAVRCNPAVQPLYRRVVAKHPEEKAIAIGHAMRKLLHLVFALWKTNKPFDPKHYSWDTPAHRESQVPQTPADQAAAAPTKQAAGLKRSAKPARKEVTAACTNGVPEEQPLDGRFIDFQHIKQQLPLLRLLDHLGLTARLRGTSSQRRGPCPIHRGDGRGRTFSVNLDDNVFHCFDTACQQQGDVIDLWAALHQLPLRAAAVDLVHTFALEPAPHRRTEKRHG

SEQ ID NO: 512985 - protein, 334 aa, unidentified
MLQGGDLTNAREPTSRPLQFIGVDRAQQRFEWALHGVQGTQTVDNHEAGLETLCETLKDLRVGRIVMEATGGLERPLAGFLLHHGLPVAVVNPRAAREFARSMGPLAKTDAIDAVALAHLAQTLAAKADQAGVAFRPPPAEIEQLPVMMTRRAQLIGMRTAEKNRLVSAGRVLHRSLTTVLQTLDKEIARLERDIDAHVQRHFKEQAARFRAVKGLGPMTGAVMLAFMPELGTVRSARAAKRAGLAPLNRDSGKQRGKRHIWGGRSVVRSALYMATLSATRFNPVLKTFYDRLIAAGKPRKVALTACSHKMLRILNAMARTGQPWNESLHAIAP

SEQ ID NO: 512986 - protein, 393 aa, unidentified
MALKKVVACGIDVHKQVLVACAVDDDGHAQQWLHAKNDPDGLQTLKEWLSKHQIKVVGFESTGSYWKQLYEALEEDFTVHVANARMVKHIPDCKTDKRDARWLGQLLAKGLFPSSYVPPKWQRELRELTRFRLQLVDKQTQVVNQLRALLDRYHVDVIRHFSSWHLQACYHVLQQLAQGITSWEALLASTQDGRTRKALERKKDVLEPLVHQSNRMPRSARLQLQCLLEQLQLLSEQISRVWEQICHFIDTQTPPWFRHQVTLAMTLPGMGKVSVISLLAEIGKIQRFPTGDQLVSWAGLNPYVHESAGKRYTGFITKQGNKYVRKVLYSCVKPTLRAKRSPFAAFYRRLRKRNKPGRVAAVAVMAKMLRVLHSMLRHNQPYLRDKEGTRRKS

SEQ ID NO: 512987 - protein, 438 aa, unidentified
MSNKVIFNLDELFISVGIDVGADFSWMSVALPNQQFVRKPFKILHNSMNSLTAAVSKIKEAEDLYSLESRIFLESTGIYHYPLFCYLRDKGFNCSVINPIITKNSTNINIRKVHNDRFDSKKAALVGLKPNLKVSLMPSDLALNCRNLCREYYDLMDNRSAYVNKLQGELRMAFPQYLGIFSKVTTNTSLALLETYTSPTAFLEADRQEIVDIIKSTARFGLAYALNKYNAIIQAANDANEFGYIIDSNITRIRLYISFIRKYDEEIKGILESMHELINAHEDTDFVKQVHLIETFKGAGFLSAVSLMGEIGNFSAFSKPKQLFAYFGLDPAVKQSGKFEGTKIKMSKRGSAIARRVIHTLTLQSISTSRTGEAKNPVLRDYYLGKCESKPKLVAMGAVSHKVCNMIFAILRDNKPFEIITPQEHVKQYNAAKCDMAA

SEQ ID NO: 512988 - protein, 384 aa, unidentified
MPDVSSNAPGVVRMRAALDVHKRTIVCASQPDDPRAGELRLQEIPNTERALRALIRRLGGAEGLVVCYEAGPCGYEPYRLLSEMGVACDIVAPALVPVAPGARVKTDRRDAKRLLVLHRAGALKFVHPPTPAQEGLRDLVRCREDLVCARRAARHRVAKQLLRHGHIFREGKKSWTKIHQAWLRRQRLADPLAQSALEHMLAHLDALDAQIAVLDHQLDKIAQREPWSDPVRWLSCFRGITTLTALALLAELGDFRRFGTARELMGFLGLTPSEYSSGEQRHRGHITLAGNTHARRLLIEAAWHYQHAPRVSQRIAAVQPHVPPDVAARAHSAQVRLHHRHRSLTGRGKRSTVTNVAVARELAGFIWAAMTRQPLRDPEVNAAA

SEQ ID NO: 512989 - protein, 335 aa, unidentified
MKLYCGIDLHAKNSYLAIVDEQRKRIFKRNVTNDRKLILAFLDPYRSELQGVVVESTFNWYWLVDTLMDDGYTVHLANVSAIQQYEGIKYVDDKHDAFWLADLLSLGILKEGYIYPKEQRPIRDLLRKRGHLMKLRTSLLVSLTNTLANVCGTKVPSHRIKGKEDHVSVHLDHHESLALMGQVSKAAIDMLTDQIKTIESHVEKQCKFDTPLLSLPGVGKILGLTILLETGPIGRFPAVGNYVSYCRKAESTWKSSEKVKGRGNRKNGNRYLSWAFAEAAEHARMFDTASRNFYNRKLHERNSPVAHAALANKLSRAAYYIMRDRVPYEEAKLFG

SEQ ID NO: 512990 - protein, 401 aa, unidentified
MKYVCGIDIGSQSCSGCITRPDKRVMVKPITFANTKEGWKVMEEKLAQLDAAPNQIVIGMEATSRYHENLYHELAQRGYQMRLLHPGQTHQYHQQQGLRAKTDRLDAMTIARVLLGGEARVGYIPGEQVATYRELVRLHTQLSEEAARYQNQIQILVVVLFPEFSQIFADPCGQGALAVLKAYPDARAVAQAGVEAVYQVLRTVPAAHFGRPTAKKLVAAAQVSSSSGRAVSGRASSLRILCDQLEHTQANLKRLEEELEQLITMDPSTKGLQQMPELGPKTVAVLRAELGEVDRFACTDQAVAYAGMDIQIKESGKFKGKAKLSKRGSGLLRQILYLAALRSIHLEGSAFGAYYHHLVERGLKKMSAMMAVMRKMVAVATHLMKTGEDYDPSKVWVGTTS

SEQ ID NO: 512991 - protein, 392 aa, unidentified
MACIRHMADGKVTTDVKSFQTTTPQLMDLSGWLSSQGVTHIAMEATGVYWKPVWHILSDGEFELVLANAAHVKNVPGRKTDVNDATWLADLMAHGLIRASFVPDEPTQQMRDLLRTRKQFVRERSSHTQRIQKTLEDANIKLDSVITDIVGLSGRRMIEALIGGETDPEALAALAHGRIRATKAELEAALRGRVTAHHRFMLRIHLNHLDALNTTIADIDKEVDANVEPFRAAVEMLTTIPGVSSLAAEVMVSEIGIDMSRFKTEGHLISWAGLCPKNDESAGKRRSTRMKKGAPWLKTTLIQCAWAASRKKGSYLQAQFLRIRSRRGAKKAIGAVAASMLTAAYHMLKDGILYQDLGANHFDNRDKGKQALRLVNRLQSLGFTVQITSMAA

SEQ ID NO: 512992 - protein, 334 aa, unidentified
MEKITTVGIDLAKNVFSLHGVDGAGRVVLRRTVRRDQLVATLAALPPCLIGMEACSGAHEWGRRFQGLGHTVRLMAPKFVAPYRKNGKNDSNDAEAICEAVTRPNMRFVPVKSAEQQAVLALHRVRHGFVVERTALINRLRGLMSEFGMVLPLRSVTVRRQAAAAAESLPELAKRVVGDLLEQLRLLDERIGGYDREIEAQARLSEPAQLLMKIRGIGATTALAIVATVGNAREFKNGRQFAAWIGLTPSQYSTGGKPRLGHISKRGDAYLRNLLVQGARSVLNSASRHQDRMSRWILELLPRRGHYRTLVAIANKNARIAWALLAKNETLHSA

SEQ ID NO: 512993 - protein, 424 aa, unidentified
MAGVVIGIDPHKGSHTAVALDVHEKQLGRLRVRASSRQVDGLLEWASGWPRRRWAIEGARGLGQLLAQQLIASGERVLDVPPKLAARVRLLDSGQINKNDPNDARSVAVAALRAHELPELAAEDHAMVMRVWARRYHDLARLRTQVVCRLHAVVCELVPGGVRKYLRASQATDVLDRIVADSPVAQAKLELARELVADLERIDAQRREAKRRTARAVAATRTSINDVYGVGPIVAGTVLGYVRDIRRFPTRDRFASYNGTAPIEVSSGDRKIYRLSRRGNRQLNHAIHMAAISQIRHHDSEGRAYYEKKIAEGMTGKTALRALKRKISDALYARMIDDARRLAAKDPGGHTGNDSASSAAGSHPETPALRKSHSRATANSKTGTGQRPLRLRPAPDRRRTSRRAAGVQVEPRLGPHRGRRQDRP

SEQ ID NO: 512994 - protein, 361 aa, unidentified
MAGTMTWVGLDVHARSTHAAAIDTMTGELTRVRFGAGTEGPLAWLAELPGPVHACYEAGPTGFGLYRAAVGAGIGMQVIAPGKTPRGPSERVKTDRKDAELLARLLLAGSLTRVVVPPAEVEAPREITRSHDASRRYLMNARHRVSKMLLRHGRVYPKSTTWTAEHRRWLSQQQFPEPASDLVFADLVAAVDGLTSRKAAIALRLSEVATDERWWPTVARLRAFRGIDTLTAFSLHLELGADWKRFERAPALSAWLGLTPSLSQSGESSRQGAITKTGSVLARRLLVESAWHYSRQPRLGATLANRQAGQPDHILAISNRAQQRLHRVNHSMRARGKPHNVAVVACARELSCFLWAAATVD

SEQ ID NO: 512995 - protein, 354 aa, unidentified
MIIIGMDYHPSFQQIAFVDTETGEYQESRLQHREEAEKFYRDLAARGVKVRVGMEASGQARWFERLLAELNMELWIGDAAEIRAKRVRKKKTNREDARHILRLLLEDRFPRIWVPSWENRDLRQLLWHRHRMVQMRTRIMNQLQAVALNEGLCCKKRLWRESGRKQLEGFPLAPWGSRRRRDLLELLDRLNPTIAELTQTIEQEVEKYPAAQRLMTHPGVGALTALAFVLIIGEAERFRCGKQIASYIGLVPTEESTGERQRLGHISKQGSALLRFFLVEAAQVTVRSDMEWRSKYFHLAMRRGRKIAKVAMARRLAVRLYWMWREKRDYEHLKKFGSYVGEPGTGVGARQNIA

SEQ ID NO: 512996 - protein, 358 aa, unidentified
MTDGSRATTMLTAGLDLGDKYSYLCLLDTDTGKVVEEGRLRTTPEPLRRRFDSEQPLKIAIEAGTHSPWVSRVLKECAHKVLVANPRKTRLIYGQGRKTDKLDAEKLARLARVDPKLLSPLEHRGEASQAHLALIRSREVVVRSRAQLINHVRGTVKSFGARLPKCSTASFHKKVAACIPEELQPALEPLLETIASLSTRIRHYDHELEELAQQHYPETKLLRQVQGVGTLTALTFVLTLEDPGRFEESRQVGAYLGLVPGKNQSGERDLQKRISREGDEMLRRLLVGSAHYILGPFGEDSDLRRQGLKIAGGAAKNARKRAVVAVARKLSVLLHHLWISGEVYEPLYNCRQLKGRAA

SEQ ID NO: 512997 - protein, 460 aa, unidentified
MLFVGCDWSDKWLDFAALNEAGAVIAERRIVYTDSPDPVAEYLAFLAPLERRWRSAVTGIEDTGILFARALAAAGMAVVHVDPTRAARHRSALGIAKSDRADAQMLAAMVRTGVSRPVVDSSPDAQALRTLTHAHRAAVAARVEAAHSLRAALTRIWPAAAAAWPSRLGGLRNAQARAVLATAPGPRAASRLTRAQLSQLLQQAGRTRTVNAEAERLHLLFCRPVMLLDPQVEDAESVRIRDLVGVLDRAIDRAAALEKDMHAHYARQRHYPLTAQIPGIGPVLGAYLLAEIGDRPQERFGSGRSLAAYAGVAPLTWASGATIRVAFRRASSVRLRSTLHTAAFSLAMQSPGAQHYYYRRRAAGDAHATALRKVGRRLVLCLYRCMSAGLPYDDAIAFSYDPLQAGASALQRRSPLDPNEISHAQELLAEPGATVTGVAKVLDVSTQTIYRHVLGRPRAA

SEQ ID NO: 512998 - protein, 393 aa, unidentified
MICVGIDVAKDKHDCFILSAEGEVLTDVFTIPNNRDGFETLLQRIRSCSLPADTIKVGLEATGHYSYNILGFLLDKGLATYVINPLHTNLYRKSLSLRKTKTDRIDARTIAAMLMSDVDLKSYTDTAYHNEELKSLTRYRFDKVQQRAKLKQSVARLVNILFPELEKLVPSLHMASVYALLSEFPGAQQIAAAHLTHLKALLDNASKGRYGRDKAVEIREAARRSIGSKMPAKSLELRHTIQLIRELDKEIDEIESSIEEIMNSIQSPITTIPGMGLRMGAMILAEVGNFSNFDSPDKILAYAGLSPSTYESGKLKATGAYAHMEKRGSRYLRYAIFNATKYVCHWDPTFAAYLDKKLAEGKHYNVAISHAAKKLVRLIYTLQKSGQAYRTAA

SEQ ID NO: 512999 - protein, 336 aa, unidentified
MQHYCGIDLHSNNHVVVIIDEEDKRVFEKRLSNDLSQTLKVLQPYQNTLCGIAVESTFNWYWLVDGLQAHGYEVKLVNTSAVVQYDGLKYSGDQHDAYHLAHLMRLGILPTGYIYPKEQRAVRDLLRRRLSLVRMVSAQLIGVQSQLWRSTGIRISSDTLRCRDFVVPLEENHTRQAIESGLAVYQAIQREIDALEQSAYQAVKLSKAFEILQTVRGIGKILGLTIMLETGDIHRFASAGDFASYCRCVDSTRTSNGKKKGSGNAKAGNKYLSWAFSEAAHFAVRFEPLAQRFYERKKAKTNGIIAIRAIARKLARACWMMLKHQQPYEAKLMFPG

SEQ ID NO: 513000 - protein, 452 aa, unidentified
MKHKTTPKSNPTLPVLNVNVAGLDIGSAEIWVAVPVDRDPQPVRAFGTFTPDLDALARWLKACHVETVALESTGVYWIPVYEILDAQSIQVSVVNARHVKNVPGRKTDEKDCQWLQRLHTYGLLSASFRPDAEIVALRAYLRQRASLLEHRAAHIQHMQKALLQMNVPLTQVLSDITGETGLAIIRKIVAGDRDPVALAQLRDPRCQHSTDEIAKALTGNYRPEHVFALKQALALYDFYTTQVHECDIEIEKQFSVMKPRHDQNDLAPLDPTDKRDSHSKNAPSYDARTLLYQLVGVDLVAISGLNESTVQTILSEIGTDMSKWPTGKHFCAWLGLAPHHDISGGKVLRSRILKTHNRAGQAFRLAAQSASRSPRTGYGAFYRRMCGRLGPAQAIVATAHKIARAFYHMLKQRVPFRDLSAEEYEHRAREREIINLRKKAKRLGLTLVDQPA

SEQ ID NO: 513001 - protein, 371 aa, unidentified
MNFIGIDLHTNRFTCCYRDEQSSVENPKKGREIKTFDLNAEGLTAFYETLTEDTYALVEATITTFSFVRLFKDLVKEVIIANTYELKQISMARKNTDKIDADILCRILKAQVLSGEQLISPVVSPPVEIQELHSLFTTYRLVKKQNCQIKNRIHSLLKEQLHGFTQEEIFSNKSRVNIRKLSPGTAMNKQVNLLLDMLEQSEAHTEELINEILANGAPFMREIEILTSLKGVSPFIAIAIIADIINVRRFKNSKAFTSYLRSAPKVSNSNTSESVKGINKKGRKLAATLLTQSLNHVLDASPKLLRWYDRKCESTKPGKVRTGLRRRVFAEIFQMLKKGEYHYGREKDKHETKMRQYRNFLKKRKILLEIA

SEQ ID NO: 513002 - protein, 451 aa, unidentified
MAAKKKTYQMMKVVQPNAAGIDIGAKEIYVAIPEDRSKDSVRRFDSFTDDLHNAAKWLKQNDIESVAMESTGVYWIPVYQILDLYGFSVYLVNAKHVKNVPGRKTDVKDSQWLQYLHSVGLLESSYRPAQAVCAIRSLLRHRSGMVRMASSHVQHMQKALTQMNLQLHNVISDITGETGLKILDSILDGNHNPKKLAELKSKRIRASKSTIVKSLSGDYRTEHLFTLRQSLESYRFYQDQIHTCDLEIESLLKDFESNLKSENDAGEKPQIGTKKPSTGNSPRFDIQGEMYRVFGTDLTRVDGINSSTVLTLFSEIGPDLSKFPTDKHFCSWLGLSPNNKISGGKILSSGTKKNSNKAAHAFRLAANALFRSKSYLGDYYRSKRARLGAPKAITATAHKLARIFYHLVKHRKSYDDSVFAVAEENHRKRKLRNLKKQAEAFGLQLVEGISA

SEQ ID NO: 513003 - protein, 348 aa, unidentified
MAMTMVETTRPVTGGVDTHLDVHVAAAVDASGGVLGVQPFATTTAGFVELHGWLETFGSLERVGVEGTGAYGAGLARYLRSRDLEVIEVDRPNRQLRRRAGKSDTIDAIEAARAALSGRASGIAKTADGNVEAIRVLLIAKRSARDTRIKCLNQIRHLVFTGPDELRERLRGVPRGRLAGTAAGLRPTAGSDPVVYATKLALQTLGRRVVDLETTTQRLDATLDQLVCATAPNLVAVAGVGIDTAAILLVAAGDNPERIRSEAAFAHLCGVAPIEASSGKTVRHRLNRGGNRQANHALWRIVFTRMSADARTRAYVARRLEQGRSKPEIMRILKRYVAREIYKHLPRD

SEQ ID NO: 513004 - protein, 394 aa, unidentified
MKLVGIDIGKNSHHFCVMDKETGELNVTPSSFSNNKEGFDFLINSLKPYSKKSILLGMEDTGHYHVALLKFLLSNGYTVALINPKTTDFTRKMEGGITKNDKLDTITICNVLDTPERKKQYRITKVDRFDLYEQRQLTRHHHNLKEELNIYCNRLQKSIDLVFPEFNTLFGSKYGVVYMNLLKTFGSAEAIASTDIRTIRKCFEVKGRGGRISLTPEKLKECAKNSIGISSEVETIQIKHLVSQITLIKEQIAEIDKKIEEFSITNNSPILSIPGISHFSGTSILAELGDIGNYSKPSQIIKFAGVAPYHYESSQYNAQHTGITKKGSKYLRKTLYQIILPVINNNPVFKKYYRLKISQGKGHRCAQGHCIRKLLRIIYHLLETGQSFDPALLR

SEQ ID NO: 513005 - protein, 422 aa, unidentified
MTHDPIMELQRNKVCGIDVHKRFLIATILCRDGKKDTQRFSVTLEDLLKFRDWVIENGCEQVAIESTGIYWHPVHSVLEGKIDLIVANSYKIKHTPGRKTDVSDSEWIAELCLNGMIEPSRIFPKDDRELRRLTRAREGYVKQMTQEKNKIHQSLDSACIKLASVISDIFGKSGMYLLNCVLEGREIDDIIDGIPSGRLKKKADQIKESIKSRLDVSQVILIRGSLSLMKSIQERIDELDGEISARIQYRKNDLAIAMSIPGTGFVSATAILAEIGNYTDFKKPEQLAAWCGLVPSLYQSAEKTILGGITKQGSKHIRRMLIQVAYAISRTKDSKLKKFFLRIQAKKGSKVAAVALARKVLCILHHLLINQEMYIEDRDKKNMRQKPLIPPSPIEMSIQEMIDCIVRAGYVVTKSDSIGGFG

SEQ ID NO: 513006 - protein, 334 aa, unidentified
MNSDTVHIGVDVSKEKLDIYVPAKKEGSRPMTKEVDNDIKGFRELRDLARKAKATVCVEPTGGYELELIAFLHRFEVPVAYADAMRVRQFARAEGCMSKNDSIDAALISRFADKIGVRVLEAQEVEAVELKRKAKFRQTMMDSRTAMINRLETEVDPEMKALLKEQVRLMSKVVDKAEQLCLETVEKDERMNALRERFTQVGGVGDLTAISILAGLPEIGSLPDAKLNRLVGIAPEERQSGTKEWQRRIWGGRKDVRNALYMACIASIKWNSILGKYYHKKRDEGHLHKWAMVPTMRKLLSLLNRIARDPSFVPRPEPESTRRNANVGRKRKAA

SEQ ID NO: 513007 - protein, 406 aa, unidentified
MRDYLGVDWADAEHAVWVEDEAGTKVMSRPVAQTVDGLADFGRWLDERRAAGRELWAAIEKPEGRIVDFLLDHGVVVFPINPKAVDRARDRFRMSGAKSDPFDARVLATFLRTEHGHLAPLRPSSEAAQELPGLTRDYTRQVRQQTRLLNQLTAALKAYYPRALEVVDDLKSRWGRDFLGAYPTPAALAALSERQWQRWARAHRLSGARAAELWPIVQRPQLAVPAHVVRVQVRLVGALLEQLGVTVGAVEAYREAIAYFFGRLPAAKWATSLPGGRSGTTVPRLYAELGDAPGRWQTFRHLQGQGGAVPVTDRSGKHVSVRFRFACNTHLRDAVQQFAQQSLQQSEWARAYYDRCRRRGHRHHHALRALAAKWLKIIFVLWSRDVAYDETHHLATMARQHLRQTA

SEQ ID NO: 513008 - protein, 343 aa, unidentified
MQAITTIGLDIAKSIFQIHGVDAAGNVIVRRQLKRRYVLPFFEKLPPCLIGIEACASSHHWSRELRALGHSVRLMPAAYVKPYVKRQKNDAADAEAICEAVTRANMRFVATKTLEQQSCLMLHRTRHLFIRQQTAVINAIRAHLAEYGIVAAVGRNGVEELLGVVADPSDKRVPEIARACLAALGAQLRMLKAQILEFDRMITAWHRSNETSKRLDAIPGVGPALATALVASVPDPKAFRSGRNFSAWIGLVPKQHSSGGKDKLGSISKQGDRYLRSLFTVGALAVIRYAKIHGTKHRPWLTPLLARRPAKVAAVALANKIARMAWAMMAKGERYKEPVALAV

SEQ ID NO: 513009 - protein, 366 aa, unidentified
MKKISTVQVFGNEIFKEQQLTIGVDLGDRWSFYCIVDEAGKIILEQKLPTTPEAMKQTFGKIPRSLVALETGTHSPWVSRLLTELGHQVIVAHAQKVELITKSNRKDDRHDARTLARLARIDPELLGPVRHRSAKAQIHLTVIRARAELVSARTALVNAARGLVKSFGQRLPKCGTYQVNEKLAEGLSAELRDVLVPLLREVESLSERIQEYDERMEKIAKEVYPEVSLLKQVKGVGTQIALTYVLTIEDPYRFPKSREVGCFLGLRPGRRNSGESAPQKRISKEGDRYLRTMMVQGAHYILGPFGEDSDLRRWGRKLAERGGKNAKKRAVVAVARKLAVLLHRLWVSGEVYEPLRNSQRAMRAVA

SEQ ID NO: 513010 - protein, 370 aa, unidentified
MRNRSMFVGLDVHKETIDVSIADGHRNGEVRHYGVIASDVEPLDKVVRALRAPSRRLHFVYEAGPCGFGIYRHLRKRGEECVVVSPSMVPKRSGDRVKTDRRDSQTLARLHRAGELRAIYVPDDLDEAMRDLVRAREDAVTMGTQAKYRLKAFLLRQGRRYPGREGWTLPYRRWLTDLSFPTAAQHITLQEYRDTIDETERRIERVTDQLRHLAPTWRWAPMVAALQALRGVSFITAVALVAELGDLTRFGHPRELMAYLGLVPSEYSSGPSVRRGAITKAGNPHVRRLLAEAAWAYQGIPRIGRQHAYRQEALPKVVCDIAWKAQLRLTTRFRRLVARGKARSKVATAIARELTGFVWAIAREVSPVPR

SEQ ID NO: 513011 - protein, 360 aa, unidentified
MTGTMTWAAMDVHARSTYAASLDVISGELCRQRFDTGAVEPVVGWLAGLPGPVRACYEAGPTGFGLYRAALAAGIDCQVIAPSKTPRLSGDRNKSDRRDTDLLLRQLMAGALTPITVPSATFEAARDLARAREQVRLDLMRCRHRLSKLLLRHGRVWDRTAWTQVHRQWLSAQTFAHQNTELAFIDNLAACDGLMTRKQALDERLSWVATDPEFWPVVRRLRAFRGIDTLSALILLLEVTDFARFPRAVQLGSWLGLVPSREQSGESDVHGSITKTGSKYARRILVEAAWHYARPPGVGRTLHERQEGLPDHVLQIASRAQRRLHRLHKRMRERKKPGNVIVVACARELSCFLWAAATAA

SEQ ID NO: 513012 - protein, 321 aa, unidentified
MEPAILGIDIAKRKFDVALLIADKMTVGKFDNEPTGFAKLERWLEKYGVERVHACLEATGTYGDALAEHLYHAGHVVSLVNPARIKGFGQSELSRTKTDKADAQLIARFCRVMRPEPWQPLAPEVKELQSLVRRLEALNDMLDQERNRLESAQGLVRDSIERVIAHLQQEIKATRTLIRTHIDRHPDLRGKRDLLETIPGIGPGTSAMILAEFGDVSRFQDAGQMASFCGLTPRHRQSGSSVRGRSMISKTGSSRIRKALFMPALTATRYNPVLAALRSRLKANGKHPMVIICAIMRKLIHLAYGVLKSGRPFDPSIATAA

SEQ ID NO: 513013 - protein, 343 aa, unidentified
MKHYVGLDVSMKTTFICVLNEEGQVVHEGHVQTNPHLIVDYLNKKDFKNCLLGFESGSLTHYLMTGFRERAIHAVCMDARKLSAILSMKINKTDKNDARGIAEALRSKMYSAIQCKPAEAIETGILLTARKALVQQQVQLKNTVRGLLKTFGIRLGSVGQKTFTAAVKKQIEQLSELCKNSISPLLNIFDQLVEEIETLDQQVRKMAYEDKEVQRLMTIPGIGPVTALTYKTEIFDASRFSDPRSVGAYLGMTPTQYASGETQRQGRVSKCGSIALRALLVEAGIVVLTRSKKWSKLKAWGLKIMRKKGIKKAALAVGRKLAVIMHRMMVQGTEFVYGEQKAA

SEQ ID NO: 513014 - protein, 342 aa, unidentified
MKDSIYDHYIAIDWSIKNMAIARMTKKSNKITVIDVDSDIENLQAYLKNLRGTKILTIEETTTSQWLYTELREYVDRIIICDPNRNKLLNEGPKTDKIDAGKLVQLLKAGIIKEVYHSTDKFLYLRRIVSGYEDLVKAGVRLKNQRYALLRLCGKSGNEKIGSRLDAQGEQFVLECLDRQIEAYEENKQDYEMQFAKLARSNPEIKHQKSLPGIGVINAVKIVARVVTPYRFPDKGHYLSYTGLIKLAKISGGRSYGKRNPRYSRQLKSVYKSGVLAAIGGNNPINDYYNSLIQDGYPQHNARQKACRRLAVLSLGVFKSGKRYQPYRRNHVKGGKEGTSSL

SEQ ID NO: 513015 - protein, 360 aa, unidentified
MQTKVNEKLFDGQSIYVGIDCHKKNWTVTILGEQYEHKTMSQNPDPDILASYLRRNFPGADYHAVYEAGFNGFYTCRRLKGLGIDCKVIHAADVPTRQKEKIQKMDPVDSRKLARSLRGKEFEPIHVPEPTLEADRALVRQRFRLMKDVTRTKSRVKSLLFQFNLSIPARFTAGQTRSWSMVYINWLKELPLEHPSLKQTLDNYLRIGELQREELLSVNRQVRSLSQSDAYRNNYNLLISTPGVGFLTAMTFLVQIGDIRRFKSLDDLCDYIGLVPMMHGSGDKMYTGKLINRGRKELKIMTIEAAWEAVRADPALMAKFNELTRRMNKNKAIIRIARKLISRMRYVLMAQEPYKIGISE

SEQ ID NO: 513016 - protein, 404 aa, unidentified
MKQIVSVGIDVSKGKSTVCAMIHPNTIIKESFEVLHTVEEMSMLADYIGSLDGEIRIVMESTGHYPVAQFLYQKGFFVCVENAYIIRQFSRIMLHGAKTDPLDAKKLAKYGLAYWSELKPYKFHPSCYTELSLLSKQYQTYIKLLIAAKQNVIHLMDEMLPGFKEALDTASSVQFSKVKYVDFAKEFYHVDMIKSMGKEIFRENYKQWCKEKGYRFQSEKADELFHLAEDGIPTLPTEFPSTRLCMEVATEQVSQLGYALEQILSQMQNLAKTLPEYQTIRQMGGMGEKLCVRFIADIGDVRRFHNGKALVAYAGIDAPPYQSGQYTGTKRRISKRGNSALRKTGYEVMKSLKSHPPKTDTRVYDFIIKKENEGKSKKQAKIAGLNKFLQIYYARVMEIYKNIV

SEQ ID NO: 513017 - protein, 433 aa, unidentified
MIKINYMSTLFVGIDVSSKSNVVYAMNFDEDNYINSSFSNNQPGADELAEMIAACMYKHPNLNTMIVALESTSVYSIHIANFLSSCELLMPYKPYVYCINPKMTANYRKSYVAMDKTDSLDARLIADFARVGRTKKCEPWRGSQYLALKRLTRHRLHLAECISREKTYMVSNLYLKFSELQLLEDDRRPFSNIYGATASAVLTEFLSLQEIIDATEEELLEFLADKSRNRIADISKTSELLRKAARDSYRLDQCMYEPLNVSLASSFNCIQTYQKEMKLIDQAIEKCINGMNPNAFLILKSIPGIGPVWAAGILSEIGGITAFHSSDALAKYAGLTWLKNDSGDFTSEDNRISKAGNTYLRYYIGEAANSVRRHVPEYADYYSKKYAEVTKHQHKRALALTSRKFVRLVFGLLVKNQLYTGEKLDTEFNTKTE

SEQ ID NO: 513018 - protein, 476 aa, unidentified
MGKGSGTTRGDRRRNARRERLRELLPRDGAVIGIDLGEDKQAVAVIDHDVRVLARKTVRVKAFRLGDALAWAVGQARAKGFAAVAVACEPTGPRWLQVQRLCAERGLPLVCVQPLVSHLARQQQDYTTHKTDEADCVMIARLAIELHCYIPEELDEAWAQLRHLGRRRAQLITAATASVQRVRDFLSVAWPVAPEACAHPFESVTWLAAMQVVTSRCGGQPEKLAAIGPAKFTALVRQAVAGQGGQRPAGPVGRAVFAALASTEAVVVSHRRGLLRRCADELGDLRRTRAQLRAVEAGMAAVLGELGLSRLADIPGLTAVGAAAILAETGDPRRYDSSSSLVKHAGLSPSGNASGAFEGQAHISRRGRPGLRLTVWRAIWPLLIHNSVMAAKYAAMIAAADAAAAQAVPAPPGTESRQASAAAAARARRAKARVACAASLLRWIYSMVVHDTGWDPDVASGAASCQHAPRYQAEAA

SEQ ID NO: 513019 - protein, 350 aa, unidentified
MEYIAFDAHKHDTLASVVTPDGQLVREERIEHDRGALREFLERCERGSPVAVETIGNWYWIVDEIEAAGCVPRLVHARKAKLMMGEINKTDRLDVRGLNRLQRTGTLPTVWIPPGELRDQRDLPRTRMVFVRQRTQLKNRIHATLAKYALHNLDVSDFFGVRGRALLRERFELLPPHTAYASQQLLGQVEELGRQVHAFEQRIQATFKLTPAIQQLLTLPGVGYTLAVVIALEVGDVTRFASAERLAAYAGTTPRVHASGGKSRFGPPRPDVNRYLKWAFVEAANAICLHRGRAAHRHVSRLYERVARRKGHAKAIGAVARHLAEATYWMLSKQEAYREPKGVGRFVHGG

SEQ ID NO: 513020 - protein, 315 aa, unidentified
MDEQPTIFVGIDVSKDRLDVHLRPSDEAFHVPRDAKGLEALARRFSSLPIALVVLEATGGFEASVAAALAAAGLPLCIVNPRQIRDFARAMGRLAKTDTLDAEVIALFAERIRPPARPLPEPERSHFAKLVSRRRQIIGMINMETNRRDQAVDKQLIRKLNRHIAFLERELAELDGDIGQAIKASPVWCETEALLKSVPGVGDVTARTLLAQLPELGTIGRHQLAALVGIAPINRDSGLMRGRRSIAGGRTSVRGVLYMAALTAIRRGSPFRPFYERLTQRGRPRKVALVAVMRKLLVTLNAIVRDRTPWRPLMA

SEQ ID NO: 513021 - protein, 327 aa, unidentified
MTSAPTAFIGIDVAKEMLMLATWQGRRPWQRPNTPTGWQAIIADLSAHAHPLIVLEATGPYHQGLVRALADAGQTPVVLNPVLSKRFVQSRGQKAKTDRVDAVQLAAYAAQVQPRPRPVPSRAVQTLQMLVSYRADLVKERTSLLNRRGSAPLPCIQRSLDRLLGELDRHLTQIETEMQRCVAGDAELAARHQILRSVPGIGPVIATTLLANLAELGTLGPKPLAALAGIAPYANDSGAGTKPRMIAGGRSSVRTALYQAVLVGLRHNRLVQHHCRRLQARGKPTKVAIIATAHRLLGLLNAMLREGKTWTELTAVQTLLVRSALPT

SEQ ID NO: 513022 - protein, 322 aa, unidentified
MIIVFGIDVSSRDSSVYILQNGATREYKITNDTIGFKTLLIDLKEYAEHPQIILEATGIYSRRITRFLDEYDYDYVLLNPLKAKKEINQGLRRNKTDCKDAYHLALAQDQNQHQPNRKEPEVYHQLQSLSRAYEELTHDIVSSKNRLHKYLQLTFPELETIFNNSRGVNYWYLVELFPHCQEVRNLDISTIAKQIKGFKGYGINRAQKLAIKLKHLADLAYPAVDQDDPGRDEVVYYANRLLRLTADRMLSSEAMIKLAKTLPNRDLEILMSIPGIAEITAVRILSELGDIRRFSNLNKINAFVGIDPGIYQSGKKDSLSYN

SEQ ID NO: 513023 - protein, 347 aa, unidentified
MSFIGVDLHQNSFTVCRRATDGAESFETLTLSAADLERFCLSLDADDELAVEATGNSAWFRDCVRPCVGRVVVVNPSQFKVIRKSVKKTDRNDAAALALFLAKDMLPETRVRTQGENELASLTQTRDLLVKQRTRLLNKIHALHVRKGLKLRKESLGSKRALASIDLALFSACEVIEIEVLREQALSLTASLARLDREIEGVASTFKGYAGLTSIKGVGPRSAAVLLSTIGNVHDFESADKLAAYFGIVPRVSQSNETDNRGRITKRGNKLARTTLVQCSLIAMRYSSYLKTYYDRIRQRRGTGKAIIATARKLLAIIYETLKNGWVFDDFTQFSRRDPLIPAGQTS

SEQ ID NO: 513024 - protein, 352 aa, unidentified
MAVTIVETRTETRAITGGVDTHADVHVAAALDPIGGLLGAEEFPATPAGYARLLGWLGGFGTVCLVGIEGTGSYGAGLSRHVTAAGIRVVEVDRSDRQDRRRQGKSDPLDAVSAARAAQSGRARGAPKGRDGAVEAIRALMIARRGATRERTRTINQARALILTGPDDLRTRFARHATAALVAGIASLRPRPGDVPGYATRVALRELGRRAEFLDGQLERLDELIAPLVTARAPGLLALYGIGPHTAALLLIAAGDHPGRLRSEAAWAHLCAAAPIPASSGKVTRHRLNPGGDRQANHALWRIVFTRMGSDAATRAYVERRTAEGKSKAEIIRCLKRYVAREVYPHLRPSAG

SEQ ID NO: 513025 - protein, 361 aa, unidentified
MSEYIGVDLHKQYAFVTRINERGDVLEQRRVENTEADIAAYFGAVPSDTPVVMEACGQWIAFYERVERFLSDITLAHPYKVKAIASARIKTDKIDATKLAQLLRADLIPAAYIPPREIRHLRERLRTRVSLVSLQSAIKCRVHAALEKSGVRHSYTELFGKRGLAWLQAVELAPVYRQAVDSYLAVFQIIQAQIQQINAALRHQISLTPEAQLLTTIPGISVFGALLILSEIGDIGRFPSSDHLCSYAGLVPSVYSSGGKTKHGRLTKQGSKYLRWMLVEAAIHAARKDQRFAALHRRVMIKHGKQSARIAVARQLLRIIYAMLKKNEGFRLTPIDSSSASGERPGVMPPSARGSMRRREV

SEQ ID NO: 513026 - protein, 343 aa, unidentified
MGDVITIGLDIAKSVFQIHGVDADGAVVIRKRVSRAKVLEFFAAVPRCLVGIEACPSAHYWSRKLEVLGHTVKLMPPSYVKAYLKRGKNDANDAAAICEAVTRPSMRFVSTKSEQQQSGLMLHHSRRLLVRQRTMLSNAIRGHMAELGIISAKGRNGTAELLEIIANAKDNCIPAAARFSLEVLARQYIAIATEIGVLEKRIHAWHRSCEESRRLEEIPGVGPIVATALIAEVGDWKAFASARSLAAWIGLVPKQHSTGGKERLGGISKQGNRYLRWLLVAGAMAVIRYARRHGTKRLWLTRIMERRPIKVAAVALANKIARMAWAIIVRGERFREPRLLLAA

SEQ ID NO: 513027 - protein, 384 aa, unidentified
MDTVSVVGMDLHRDFSKVAMMSEDGKVLETRNIRHDSRKEMAEFFDGLEDGTDVVMEAGFNWPWVADLAEAAGMKPHLGHAIRCRELAKGMAKNDRKDAIFLGKLWLAGGDVFPEAYLAPQEVRVMRAKFRTRSLLVKIRSQMRNSIHGILHKYGVKCDEATDLYGKKGRKILEGLELPAVAKDEMERKLAFLDDLGRHIESLERQLRAELPLDKRAVLLQTMPGIGQIIAYGMLAEIGEIGRFPDKRALASYAGVLPLDNESAGDDHGKHTNRRCNKALRWMALEAVRGAVRHSRRMRSLFERVKAKHPSTPGMAVVAVARELLEVAHLMLTRGVPYMENPPPRPGSVQTVDSCHPELLGTRGSRRASQMGRCAASERIQADH

SEQ ID NO: 513028 - protein, 417 aa, unidentified
MNYCLSFDVGKNKSCYGFFRVKDVTLGIKDGMECIIKQTYFKHTAEEAEKIEDRITSYSKNEIAVIMESTAVYHRPLQKYFKDRGYKVTVINPFLTGHDNSSLRKTKYDKGDVAKIAFVYFKGNCNIQYDETVLEKNRRILSRLSEEITDTLSKKKTELLMKLAETAPEYEKTFKKSGIYTNSVLSLIDKYPHSDLIKEANEKAIAKAMHYAKKNYHVKDYAVWTEKLKRENGRWLPGTDRDSAELKSIHYLIAKIQEETIESDEKIAELVSVCEDEKIYKVLLTFRGIGPDIAAHLTAELGNLARFQKPQSIIAYAGFDPSKEQSSQSLDVNGKITKRGNKHLRRWLFVAVQSMIMHAKEGDREFADYYASKKGDKRKGGQSHHHFYAMTACCNKLIRKIYFRYFDACKAETEKTK

SEQ ID NO: 513029 - protein, 364 aa, unidentified
MENVFLCCAGLDLHKKSVEACVRRMEPSGHVHQQTHHWGTMTRDILMLADWMAAQWVAHVAMESTGVYWKPIYNILESRFTVLLVNARHLKQVPGRKSHIRDCLWIAQLLQHGLLKGSFVRPRPQRELRDLTRHRTQLVEEKTRTSNRIEKVLEDANIKLGSVASVVLGVSGRAMIQALLQGEKGPTQIADLAQRQLRGKIPEFEKALEGNLTEHHRFMLRLLWKGLTQQEALIAELEAKIEEVPRPFASEIERLDAVPGVDRRVAEVVLAEVGAKVDPFPTHQHVTAWAGMCPDNEESAGKRRKRRITPGNRWLKRTLVQVARAATHTKNSYLASRYRRLAGRRGEKRALIAVGHSLLVILYY

SEQ ID NO: 513030 - protein, 344 aa, unidentified
MSNHDSCGIEVSAKELLVKVRRAEEGVRERSFTNTPQDHPAIVGYLRRAGRVVRVCMESTGLYGLDLALALSGQEGIELMVANPRAVRHFAHALMRRSKNDPIDAGVLEEFAARMPFQPWVRPAPAALALHALARRLRELVEMQTAEKNRQHAAGLSQAIPAAVRRDLVRSLRAQQGAIERLTREARKLIAQEASLRERFELLISVPGIAETSAVQLLGELGVLAPDLSARQWVAYAGLDPRCFDSGSSVHKKPRISKAGNKHLRHTLYMPALVAVRHDPHFRGFYQHLQAAGKLKMQALVAVMRKLLHALHAMFASHQPYDGSKLFQLRSTPTQEVASAPALA

SEQ ID NO: 513031 - protein, 454 aa, unidentified
MKKDDSPKAQGAFLSQKKFGQGLPIYNPHCAGIDVGDTAHDVAIGTDSGHEVRKYQSFTEDLVKMVQWLQSEGITTVAMESTGVYWLNLYLLLEESGIEPCLVNAKHVKNVTGRKKDDTDAIWLQKLHSCGLLQKCFQPESSIRVLRTYVRQRKNVISLSSDTVRRMQKALELMNIKLHTVISDILGKTGIQMIEAILAGERDPNALIKLKDSRIKANEEEILKSLHGIWKDEYLFMLQQAYDSYAFYQSQLRQCEEKIKDHLLLLAAKVLDGDISDLDIERKKKPQKNGFSFEAGKLLKVIVGVDLCKVECISEVTAVEVISEVGVDLKQWENVKRFSAWLNVVPNTKITGGKIISSKMQKKKNQAGRSLRMAASNLSKSKSPLGDYSRKMRSRLGKKGAVTAGANKLSRIIYHMITCQQEYNPLTLVTNQEKWKEQRIHYLEKQLFQLKNIA

SEQ ID NO: 513032 - protein, 384 aa, unidentified
MPADYRHDQTAIRIDLGAIFVSLELSRATWLITSLSPGRQKMSKHRVRGGDIAGLLACFAELRAKAQTRTGQLFPLIVIQEAGLDGFWIHRVLQSEGIESHVVDPASIATSRRRRRAKTDKIDGEALIRALLAYKRGEPRVCAMVKAPTCREEDDRRICRERSVLTAERVAHVNRIKGLLFGQGISDYEPMHRCRRARLDELKTGDGRPLPPQLKAQVSRELDRLELLIQQIEAVEAERDALLASTESADKPAPTALLLGLKGIGPEFASVLWSEGLCRSFANRRQVAAYAGLAPTPWQSGTVDREQGVSKAGNPRLRTTMIQLAWLWLRHQPDSALSRWFHERIERSRGRRKTIIVALARKLLVALWRYVTAGIVIEGATMKA

SEQ ID NO: 513033 - protein, 306 aa, unidentified
MDQIIIGVDTHKSNHVGVAISRQGARLGTITIPTTRQGYRDLEAWASKLGTIKAFGIEGTGSYGAGLSRDLLSMGHTVLDVMRPNRQLRYLHGKSDSLDAESAALSVLNGQATALAKTQAGASEMIRHLKIARDSAVKFRSQSMITLKTLIINAPAELRDTLDLIKGPITLIRHIAALRPGKITSPIASAKAAMRAIARRWLYLHEEIQAHGQELERIVSEKAPGLMRSHGISTMTAAEMLIIVGDNPERIKSEAALAKLCGVCPIPASSGKTNRMRLNRGGNRQANAALYIIAITRMRDHEATKN

SEQ ID NO: 513034 - protein, 412 aa, unidentified
MDVVYTHCCGLDIHKKLVVACLLTPGAHGQPQKEIRSFGTMTADLLELADWLRAAGCTHVAMEATGVYWQPLYNLLEEHFTLLLVNARHIKAVPGRKTDVRDCEWIADLLRHGLLRASFVPDRAQRELRALTRYRSALVRERTAEVNRLQQTLEGANVKLAAVATDVLGQSGRAMLEALVGGATDAAALAELARGKLRAKRPQLVQALTGRFGPHHRFLVAEQLGHIDELDERIARVSAEIAERLRPFAATLAQLDAIPGVGQYTAEVLVAELSTDLSRFPSAAHLASWAGMCPGNHESAGKRQSGKTRKGNPYVRAALIEAAQAAGRKKGCYLAAQYRRLAHRRGKKKAAVAVGHSILVIAYHLLTRGTPYEELGGNYFDERERQAVKRRLVQRLEDLGYEVTIQPATPAA

SEQ ID NO: 513035 - protein, 341 aa, unidentified
MKQEMHVLGIDIAKRMFHAVGMDNKGNVVYRKRLSRHDLIPFIAKLPPVLIGLEACGGAHYWARRFCAYGHEVKLMAPQFVKPYVKANKNDMRDAEAIAEAVTRPTMRFVPAKDVDQQDIQALHRVRERLMGERTALVNEVHGLMHAYGIVIPKGVAKFRQAVVEKLESEQDKLTPLSQEMFWKLVEEFVALEKQLAYYQEKLEALATTHPECQRLMTIPGIGPLSATALVAAVSDASAFKNGRQFAAWLGLVPRQHSTGGKERLLGISKRGDSYLRKLLIHGARVTLRWVGLKTDRRSQWMRQLLERRGKNRTAVAVANKNARIVWALLTSHQDYQSVPG

SEQ ID NO: 513036 - protein, 435 aa, unidentified
MDQAISPSSPVDPSPFTYVVGIDIGSQTCSFSTLKPDKSQVIKPTDFANAPAGFAVLLDKLERLGVPPSQILIGLEATSRYGENLYRLLESRGYQLCLLHPRQTHQFARQRGLRAKTDKLDAGTIARVLLSGEARRGYVPTDLIATYRELARLQTQLTEDVTRYRNEIHALLQVLFPEFSQVFADPCRPTALALLKLYPSAQAFVAAGVETLAAKLHELAPRNYGLHTAQQLVSLAQHTISSGVALPARSTSLKILCDQLEHTQANLLQLEKELETLVKTDTGAKGLQSVPEFAGKTIAVLRAELGDVERFACSSQAVAYAGLDIEVKQSGKSKGQAKLSKRGSGRIRRILYMAVVRCIRLKDSAFGAYYHHLVTRGLPRRAAMMAVMRKMLMVAYRLLKTQETYDPTKVFAQAVVHSPASEPQPVQPQLAPVGA

SEQ ID NO: 513037 - protein, 341 aa, unidentified
MKLYGGIDLHSNNSVINLIDENSQALLRKRIANSLDAIVMLLEPYRDDLVGLVVESTYNWYWLVDGLMDAGFEVHLANTAAIQQYSGLKHGDDDSDANWLANMLRLGILPEGYIYPKEERMLRDLLRKRLQLVQQKTQNLLSIQGLYDRHLNRRLNSNKIKQLTLEKLTADFADPNVCLAVNGNLAILQCLTLQVKTIEASLKQQLKLRDEFINLTSIDGIGLILALTIMLETGSISRFEKVGNYASYCRCVNGARYSNGKKKSNTNTKNGNKYLAWAFIEAANFAIRYNDTVKRYYQRKLAKTHAVVAKKAVAHKLARACFYVLRDKAEFDVNKAFGYSK

SEQ ID NO: 513038 - protein, 451 aa, unidentified
MESVPPGGWRGSRTAAGMACQLSTEPLVRRGVLGNRAGRDQEEVRVTIFVGIDWAEQHHDLCLLDTEGRILAQRQIPDGLEGVALLHGLLAEHIERPADAVVGIETDRGLLVSALLATGYQVYAINPLAASRYRERHVTSRAKSDRGDAKVLADLVRTDRHNHRPIEPDSQLLEAVKVLARTHQSLIWTRQRQLNQLRNALREFYPGALAAFDELGHPDALAVLAVAPSPELGRQLSTSRIASALRRGGRQRNLDRRAAEIHAALCAPQLAAAPLVADAYATSVAALTMLINGLSQQIAAVEAKLVDRFELHPDAAILRSQPGLGSILGARVLAEFGDAPNRYADAKARRNYAGTAPVTRASGTSRAVVARVARNRRLFDACYQWGLSALTGSPGARAYFDARNPGPRTSKAARRKLANKLVGILHGCLTHGTLYDEARAWPAAIDSDVAA

SEQ ID NO: 513039 - protein, 279 aa, unidentified
MGQASTIGLDIAKWVFQAHGADATGRVVFRKRLVRAKVLEFFAGQPPCLVALEACGGAHYWARELGKLGHTVRLIPPAYVKPFVKRQKNDVADAEAICEAAQRPGMRFVPVKDEAQQANTVVFRARDLLVRQRTQCINALRGHLAEYGHVVPQGPAHVDSLVALVEDPKSSVPESARGILQVLIRMLNALEEQLKELDGEIARRAKADPVARRLMTIPGIGPIAATAITALVPAPEGFRAGRDFAAWLGLTPLQKSTGGKHKLGAISKWTCFGKVESSR

SEQ ID NO: 513040 - protein, 429 aa, unidentified
MNYTQDEKIEQVTDTTLVVGVDIGSQTHYARAFDNRGRELTKRVFSFQNDIEGFNFFQLWTEKLKNENKKTAVLIGCEPTGHYWFAFAKYVQDHQKTLVMVNPFSVKKIKELDDNSPKKTDAKDPKTIAKLVVDGRYSIPYMPEGIYAEIRDLVYSRDRIMKQHNISANRIQRWLAIHFPEYLGLYTRFDAASGLAVLEKAPLPKDVIALGVEGIRKIWHDKKMRGRGVTEDRAKNLVEAAYNSVGLDGGIGTRSELYMLLEEHQLWTSQLEAVNKVLEETIRKVQHGEKLLAIKGVGSVTIAGFIAEVGDIRRFKSPKQIQRYAGLELVENSSGKHKGSSRISKRGRRKLRKILYQVMIPLLARNKEFRTIYDYYVTRVKNPLKRRQAMIAVSCKLIRVFYAVLTKGVDYDRFKMMSDIHHERGVIAA

SEQ ID NO: 513041 - protein, 412 aa, unidentified
MDVIHPRCAGLDISKKDAKVCVRINGAGRRKTSETVTTFGATTRQIMAMRDYLAAQQVTCVVMEATGDYWKPFYYLLEDLAGVEVMLVNARHVKNLPGRKTDVADATWLAQLGAHGLVRGSFVPPEPIRQLRDLTRTRTAVTRERTREIQRLEKLLEDAGIKLSSVAADLNGASSRAMLEALLAGETDPAAMADLAKKRLRMKIPQLTEALYGRFTSHHAFLTRMHLDLIDQHTAVIEQLTERIEVVMEPFRRFRDLICTIPGIGGHTADVVVAETGADMTRFPTAQHLASWAGTAPGNNESAGKVKSRRTRPGNPYLQGALGTAAMSISHTRDTYLAAKYRRIATRRGPLKANVAVQRALLVAIWNITTTDTGYRDPGGDYFTRLNPQKARNNAVRQLEAMGYHVTLEQAS

SEQ ID NO: 513042 - protein, 298 aa, unidentified
MSQNDFKTSETMQPQEASPVKHQMNVLGIDIAKRLFHIVGMHERGQIVLRKRLARNALMPFIAALPPVLIGLEACGGAHYWARRFREHHHDVKLMAPQFVKPSTKSNKNDMRDAEGIGEAVTRPTRRFVPTKEVAQHDIQALHRVRERLRGARTALVHERHGLLYAYGMVVPTGVSKFRQTVVGKLETDKATRTPLSQEMFGKLMDEFAAVEKQLAYDQEQLDALATMHPACQRLLTMPGIGPFTATALVAAVSDARAFKNGRQCAAWLGLVPRQHSTGGRNAYSASANAGRSISHTL

SEQ ID NO: 513043 - protein, 353 aa, unidentified
MKVYIGVDLHVRTQTVCWCDTTTGEQQERLLDHERDDVRSFYAQFVAPAVVGVEGSGYSLWFHRLMEETGHQLVVGDAQAIRQFARRRQKNDRRDAQLLLELLLRGDFPVVHVPSPASRDVLALLRYRHRLVRIRTMLRNGLQAVALSHQLRLGPRLFTARGRQQLAVLPLQGAYAAQRQHSLALLESLEERVQAIEEELEMRAQQDARVMRLRTHPGVGLLTGLAVVHALDPVQRFDRARRVAAYCGLDPKEHSSGDSQRFGHISKQGNRLLRFLLVEAAHTAIGKDEPLRRFYFRIESRKNSAVALVAVARKLVLRLYCMLREEIDYDEFRRRGRDARRARVSPSSVARRD

SEQ ID NO: 513044 - protein, 315 aa, unidentified
MNQSDESFVGIDIAKQHLDVCLLPQRQSFQLPHTEQGLKDLIGRLIPIRPTLIVVEATGGYERRLAAELLAVGLTLAVVNPARVRHLAKGHGTLAKNDRIDAFNLAQFAQIVRPTPRQKTSPKQAELNDLVDRRRQLVEMIVMEGNRLEKQPAARVRQSIERILVMLRRQRQEIDDQIAEALRSDDEWNGKIQKLQSVPGVGTVTAATLVAELPELGQLNRRQIAALAGLAPFDADSGAWHGRRFIRGGRKSVRVALHMATLTATRCNPLIKAYYQRLIGKGKSFRCAMVACARKLLILLNSLLKENRVWTPNPS

SEQ ID NO: 513045 - protein, 405 aa, unidentified
MDIQPIYRCSVGIDVHSALLCVCVIVAEPGCEPVVHRREFGGFKRDRHAMAEWIAGFKPDIVVMESTGIYWKSPYAALEKAGIQATVVNAQHVKKVPGRKTDTGDAEWLAMLARAGLLRGSFIPPEELRTLRQVSRHQQKLTGMRAMEKNRLVKILGDAGIRITAVVSDAHGVAASAMIDCLLDGGTPEQALAHAGQLHAKREDLLAALQGELSPDHVFVAKTIRDHIAFLNAQLADLESHLLDALQPHEAALQLLMTLPGVDRLSAAKLAVEIGLDMAAFGTAGRLCKWAGVCPGNDESAGKRKRGDTAPGNRYVRAVLCEIAWAATRTASQFKGRYQSLVSRRGTKKAIVAIGHQVLKIVFVLLSRKVPYKDPTVDYGALLVKRNAPRWIRALKKFGYLPQAA

SEQ ID NO: 513046 - protein, 397 aa, unidentified
MYIVGIDIAKRKHEAAVIDGEGAVIIKPFSFTNNCSGYNRLLAMLTKAKLPLDEVSFAMEATGHYWLALFTRLQKEGFRVQVINPVQTNSIRSFYIRQAKTDPRDALLIAEVIRFGHFSESTLHPENIYELRELCRGRHAIVSMQADVKRKVVALLDQVFPEYETAFTNLFGDTSMAILQACPTPKELSEMPLEELCHLIEVSSHKRFRMVKAQELQELARNSFGFAMAGDVFSTMIRLYAKHLVFLKQQVQEMDRKIAEIMDTLDTPITTITGIGPTLGAYILSEIGDISRFSSAAKLAAYAGIDPTMRQSGEYNGVRNRMSKRGSPYLRHAIWLAASSAVLHDPALKLYFQKKRDEGKPYMASVGHACRKMVSIIYAVMRDNKAYTPYIPNEISA

SEQ ID NO: 513047 - protein, 452 aa, unidentified
MPAGKDKTMHYQKVLTMLDSIPYLSVGLDVGADFSWMSIMLPNGTLTGKPFKILHSDPSSRELAVTKIKEAQETYSLESRCFLESTGIYHIPLLYFLCDKGFDCSVINPIITKNSTNMNIRKLHNDKFDSKKAAKVGLDASLKTSIIPDDDIVDLRNLVRDYYYFKDQQSAIVLKLNAELRVSFPAYLKVFSKITTQTSLKLLYAYPLASDMLEAPKDEIVKTIQSTARFGETYALAKYDSICSAAGDAAVFGRALPSNAIRIRLYIDSYQMYQKHLDSILEELHKAVDKLQGTPVYDRITLLQSLRGVGFLSAVVLIAEMGSFDLFPSPKKLYAYFGLDPAVKQSGKFNGDKVHMSKRGSSLARRILHMAALNNLKVDKGTKSPVNPVIYDYYIRKCAGKKKKVAVGAVMHKICNIIFAMLRDNKPFEIITPQEHCSRYAENHPASTKKAA

SEQ ID NO: 513048 - protein, 405 aa, unidentified
MGKVFVGHDWAEAHHDVCVIDAEGRRVGGSRLPEGVEGVARFHELVAAHATDPGDVVIATETDRGLFVGSLVAAGYEVLAVNPLSTSRYRERHSTSGAKSDPGDAFVLANLARTDGHNHRPVAGDSDLAEAVKVLARAHQGLIWTRQRQVNQLRSALREFYPGALVAFSELGHPDALAVLAVAPTPAQGRTLSRSKIAAALRRGGRQRRIDERAVEIQTALRAEQLTAPEVISDAMGTAARALVAVIGELTAQIAALEDQLADHFDQHPDAQVIRSLPGLGMILGARVLAEFGDDPNRYVDAKSRKNYAGTSPITRASGTRQVVLARYARNRRLADACYLWAFAALGASPGARAFYDHRRAAGDTHHRALRALANRLVGILHGCLRHHSPYDEHTAWAHRHDIAA

SEQ ID NO: 513049 - protein, 410 aa, unidentified
MFKVAVRVPGARRGTRKTDVLEFRTFYGVLEEMGRELRRRGVTHVVMEASGVYTDPVYYALAGLGFTEVMVINPAHAKALKGHKTDAKDAIRLLDLYECGLLSGSYIPSPDLKEVRDLARYRMKTVQARTSEIQRLQKTLETAGIKLSSVVSDVTGASATAMIEALIDGERRGAVLADLAQGRMRSRQKMADLPMALAGRFTDHHALMCRLHLDRIKVLDEAVAGLDATIAPRAARYSREAELLKTLPGFGDVVVAGWLGAIGPVPHEHFATAGRLASWATVCPGNYMSAKKSKGGRTGDGGAYIKPLLVQAAWAAARVPGRLQAKFHRLVRRFGGPKNKGAIKRAIMAIAHTLLKIAYRVLKTGTPYHDLGADFYASRESPQARQDYLIRQLHKLNPGCIITITPQEAA

SEQ ID NO: 513050 - protein, 343 aa, unidentified
MQITTVGLDLAKHIFQVHAVDGTGQAVVRKRLRRAELLSFFASLPPCLIGMEACATSHHWARELIKLGHTVKLMPPAYVKAYVKRGKTDAADAEAICEAVARPSMRFVPVKSAEQQSVLMLHRVRALLIRQRTMLVNALRGHLAEFGIIVAQGISRIRELIAILTGESPDAPLSPLARRALAPLVDQLLDLQPRIRGLEAELLAWHRQSQESRRLETIPGVGFITATAIAATVPDPSLFRSGREFAAWLGLTPRPNSSGGKERVGRISKMGDGYLRTLLVVGATAVIRYARTKTAAETAWISSLLSKKPVRLVSVALANKTARIAWALLSRGEVYRSATPAGA

SEQ ID NO: 513051 - protein, 320 aa, unidentified
MQSPSAALNIGADIAKDAIVVACSEGSFPVREVANQRPAVVAFLKSLPAGSRIGVESTGTYHELFAEAAHQLGFRVFLLNPKDTHHYAKAVGLRGKTDRVDAELIARMIAHEHTKLHAWNPPTPQQREIDRLIKRRATLISLRQAVAMSLHELGGFADELKALRTRFNQLIARIDLRIRALVEASPDRKQNFTRVCTITGVGPVIGTALVNTLERVPVNSADAFVAFTGLDPRPDDSGQHRGKRRLSKRGPAELRRLLYLAAMSAAKTKTWRPLYEHYRAKGLSSTATLVILARRIARTAWSIYTHKTEFDPSRLTNPLT

SEQ ID NO: 513052 - protein, 341 aa, unidentified
MEKEQEIQRYDWILGIDVSKQSIDACLIRNSDGQVYESKFNNNLSGFRHLKRWCKLQQSECDGRTLCCMEHTGLYTRLLVHYLISREVAIWLEGSLQIKRSQGLVRGKSDRIDAQRIARYAHMYQHRAEVVKITSLTLEKLKDLQANRKRLLTSLQSLRTSTEELKQFDPENGKLIEQSNRDAIRGLEKSLDKVDEQILRFISEDDKLKEKYDLMLSIKGVGKVLAAMLLVYTHGFDRLADGRKLACYSGVAPFVYESGTSIRGRTGVSKFANGELKRVLHMAAISSVQHNPELHEYYKRKVEEGKNKMSVINAVRNKLLHRIVAVVKRGTPYELQLKNSL

SEQ ID NO: 513053 - protein, 346 aa, unidentified
MPIVGGLDIHRKQITFDYVDTATGEVQRGQIAPADRVHLAGWLARRFPGGQDADFALEGCTGWRYVAEELAAAGIGAHVGEPAETAALRGPKKRAKTDRADSRHMRQLLADGRLPECWIPPSCILECRALLELYHDLRTAHTAWVQRIHAVLFHQGARQLGEGHLRTEEDLAQLRAIAAAQLSPAGQLQVATALDMLTALEDHRDAVRRRLLEAARHLAGAKVLQQRLYGVGPITALALTCWLGGAGRFSSARKAVRFAGLDVTVYSSAGKRSPGHLSRQGPEVLRWCVYEAGKAHARASAPDHAYYAAVKDRIDGKRAAISEARKIIRQAVHILAELGDGALAAA

SEQ ID NO: 513054 - protein, 337 aa, unidentified
MSYLGVDLHSNSFTVCCRSSQGKKRIATYELGRLGQFSKTLRKHDQLAVEATGNTAWFAEQIRDRISRVVVVDPHQFKVIRKSVKKTDKHDARTLAFFLSKDMLPEARMKSKENAQLHSLAGTRDKLVKQRTALINKIHNVLNSHGIKYRKESLSTEKHLTKVLSFDWDVIVGVELEVLVEQIRSLTQSIRKLDDEMSEHGKNLKGHKNLVSIKGIGERSATVLLSVIDDVNDFADEDKLAAYFGVVPRVSDSNETVRHGRITKNGSKIGRTTLVQCTLVAKQYSPYLRQYYERIKRHRGSGKAIIATARKFLGIIYQTLKNDWIFEDFPNFVIANT

SEQ ID NO: 513055 - protein, 396 aa, unidentified
MPQIWAGVDIGKTHHHCVVLDVEGKRLLSRRVLNDEPELLALLGDVLAIDEDAVWAVDVTEGMATLLISVLLNHGQQLLYIPGLAVNRASAGYRGTGKTDAKDANVIADQARMRRDLAVLRPDDEHAIELRVLTNRRADLGADRTRRINRLRGQLTSIFPALERSLDLGNVGPLTLLTGYQTPAALRRTGRRRLETWLRNRKVRSPEALAEAAVEAAERQHTAVPGEKITAQVILVLAKEVMGLNEQIAEIDKLIAVRFREHELAEVISSMPGIGPLLGAEFLAATAGDMSRYGSSDRLASLAGVAPVPRDSGTVSGNLHRPRRYHRGLQRVFYTSALISIRTCDASRRFYERKRTEGKRHTQAVLALARRRVNVLWALIRDGRCYQSELPVTAAA

SEQ ID NO: 513056 - protein, 366 aa, unidentified
MKKHTTINQSLSADVVACTTVAVDLAKRVFQLAGEDALGRVLFEDRIKSREAFQAFLHKLPASVTVLVETGPGAQAWGRLLQTQGNPVRILPAQLVANHRSGPKNDRNDALAILRAGRDIKISAVPLKSAAALAMQALHRARQGYVRRRTAVGNQMRGLLLEHGVALAQGETAISQLVPRILEDATQPLPDLLRELIAELLSEWSQLGERVNVLTGRLETAAKEDETARRLMTVRGVGPIIATALLAKQTQPERFANARLFAAYFGLVPSQHSTGEKVRLGKMSKHGDAYLRSLTIQGAHAVLKQLRPDSQQPDDQRLQRWISRLGRKEAAVRLANRNLRILWVLLQNDQTYRRQPGAAPEAAMSH

SEQ ID NO: 513057 - protein, 409 aa, unidentified
MRYYVGVDWADQTHAVWVVDESGTKITGRTVPHTAAGLSEWGRELDEWRAQDIERWAAIERPDGRVVDFLLDHGVVVYPVNPKALNRARDRFRQSGAKSDPFDARVLADFLRTDHSHLQALQPSSDAAQELKLLTEDCQRHIRQQTRLVNQLTTTLKAYYPRALEVAELTTALAREFLEAYPTPETLTALTQRQWQRWARGRRVSEARIGALWTVLQQPQLPVPAHVVRAKARLMQSLVEQLTPVVVTVAQYRTAIDDFFARMPTAQWARTLPIGKHGITAPTLWARLGDAPGRWESFRHLQAQAGAVPVTKRSGKQRVVHFRFACDKSLRHVVDQVAFLSLLSSDWARAYYDQQRARGHAHHRALRALGAKWLKIIFVMWHRQVPYDEQYHLATMTRQQLRQHQTTIA

SEQ ID NO: 513058 - protein, 350 aa, unidentified
METKVLIGVDPHKATNAVAVIDEHGELLERAQFSADRRGLRALEQWARRFPERRWAVEGANGLGRVLAHKLASAGEAVVDVPPKLSARVRVLSVGNGRKNDELDATFAALAAWRNGRLAQVRPDDTIDVLRLLSERREDLVSERTRVLNRLHGLLRDLIPGGVPGRLSAERASRILRSVRPRRDSRSSAESVRRQLASELLREVRALNRRISDLDARIREEVEASGSALTDIFGIGPILAAKIIALVGDVRRFPSKAHFASYAGVAPVEVSSGEVVRHRLSLGGNRRLNHALHMIAINQVRYEGKGGVYYRKKIAEGKTHREAMRCLKRRVSDAVFKKLMVDLQEVSTAV

SEQ ID NO: 513059 - protein, 310 aa, unidentified
MTRTQVFVGIDVSKAQLDMALRPEGRFSASNDEAGFAQILERLKAAPPTLVVLEATGGLEIPITGVLAAAGVPVVVVNPRQVRDFAKATGKLAKTDALDAQVLAHFAEVLRPALRPLPDAQALEALLARRRQLVEMLTAEKNRLSSAHTPVRKSLRTHIAWLERELSHTDRDLAHAIRESPVWREKDDLLQSVPGIGPVGTSTLLANLPELGTLTGKQIAALVGVAPLNRDSGTWRGKRTVWGGRAQVRAILYMSALTATRFNPVIRVFYQRLCAAGKAKKVVLTACMRKLLIILNAMMKHRTPWAQTTG

SEQ ID NO: 513060 - protein, 355 aa, unidentified
MNQEKYIGMDVHDATISAAVKNAQGKLLMECVLETKAATILEFIQGLRGTLALTFEEGILAAWLHDLLKPHVSRLVVCDPRKNALMRDGNQNDRADARNLAELLRTNQVKAVYHGKHGTRALKELGRSYLTLTKDSTRVMNRIKSVYRSWAIPCGGTSVYSRRHRAEWLAKLVEPAVRIRAEHLYQQLDSLEPVRQAARGELLRESRKHAAVNLLRQIPSIGPIRSALLVAILQTPHRFRTKRQLWAYGGFAVQTYDSGEYRMVRGKLQRNRERITVRGLNRNHNHDLKNLLKGAAISAIERPGPLQDFYAALVEKGMRTSMARLTLARKIAAITLTMWKKGVSFDPKQLQRQAA

SEQ ID NO: 513061 - protein, 354 aa, unidentified
MSNKSTATVATMGIDIGKNSFHVIGLDERGAIVLRQKWSRGQVEARLANMPPCLIGMEACVGAHHLSRKLQSYGHDARLMPAKYVRPYAKGQKNDFRDGETIAEAVQRPTMKFVATKTADQLDLQALHRVRERLVSQRTGIINQIRAFMLERGVAVRQGLRFLQRELPGILATRSDVLSPRMMHIIEDLAGDWHRLDERIEGLSTEIAALADQDPACERLMTVPGIGPIISSAMVAAIGNGSVFSKGRDVGAWLGLVPKQISTGDRTILGKISKRGNRYLRVLFVQAAWVVLIRPQSWERYGLKPWIEAAKKRLHRNVLAIALANKLARIAWAVLNKERNFECVRTRAASSQPA

SEQ ID NO: 513062 - protein, 488 aa, unidentified
MSTPRKRKEKKGSDAQRSASKRKARDSHCQQGDGNRRRSKLTITNPDAAGIDVGARIHYVAVPEGRAEVSVRSFGAYTAQLDELVQWLKDCRIKTVAMESTGVYWIPLFQKLEEAGFEVLLVDARQAKHVPGRKSDVQDCQWLQQLHSYGLLRAAFRPEDSICRLRTLQRHRKNLVESAAMWIQHMQKALNEMNLHLHHVLSDISGRSGLAILDAILAGERDPKKLASLADRRVEKSQAQIEAALTGDYRPELLFVLSQSLHNYRQMQEQIAQCDLSIEKQLAKMADCTNPNQASEPIQQSQDSAGSKPRKRKPKDALELSLAGHLKRILGVDLTTIPGLNILAVLNLLSEIGTNMAKWRNEKAFVSWLGLSPNNKISGQRVLSSRTRKVVNRAATTLRLAVMILGKTNTPLGSFYRRKRAQLGAPKAITATARKLGCLIYRLIKNGQGYKEPDLHTYELKYKDQILNSLRKRANSFGFDLVQVPKAA

SEQ ID NO: 513063 - protein, 481 aa, unidentified
MLKSKKTKKHLQKDSSWLNITKKNNKKPATNFKLSPLNSCVAGIDIGSASVFVCAGSLDGSQEVREYLTFTEDLKQMAKWLKECGIKSVAMESTGVYWIPVYDILAQEDFDVVLVNAYYLKTVPGKKTDVNDCQWIQQLHAYGLLHGSFRPDNNGVELRGYVRQRSRLVELASQQVLLMHKGLTQMNLQLNHVISDITGVTGMNIIRSIVQGERDPKILAGYRNPRCKKSKEEIAKALTGNYREEHLLAIKQALESYDLLHRQVNECEDAIEKILERWVKEKTLLDNPTEENNSETNLKAALKTAYNKSPYGFEAEQSLKRILGVDLLCVPGFDVNGIMKIIGEIGTDMTKWPTVKHFTSWLGLCPGNKVSGGKVLSSRTKPSANRAAAALRLAAFTLYRSKSALGAYYRKMRARLGAPKAITATAHKLARILYNMIKDKKSFVEIGQEAYEQAHKEKQIAALKKKAKEFGFTLAEAQLAS

SEQ ID NO: 513064 - protein, 391 aa, unidentified
MPLFFVGIDISKYKHDCCILSAADQTVVSRFVFPNNADGFHELLSRLNSLSTPEDIRIGFESTAHYALNLELFLEKAQHSFMEVNPVLISKYKESTTLRRTKTDRVDCESIARWLMTVEYKPHSRGFYHSYSLKSLTRLRDRLVRQRSFYLVKLTNILDLTFPEFKPFFGERFSKTALYLLETYGSAERMARMNSSSYEKLCSLSRGKFSPQQFLKLKQLAVNTVGVSNEILEAELTCLLSLYKSLEKQISSMEAQILTLINDIHPCYMSIPGIGPISAAVIYAEYGDISNFSSPAQMLAYAGLEPGVNDSGTESHGGRMVKRGSSQLRYALMNCALPLIHFDMTFAAYYAKKRAEEKPHRVALSHVVKKLVRVIFALKRQRTAFNVQALR

SEQ ID NO: 513065 - protein, 363 aa, unidentified
MNGGEQRMAVYVGIDVHKKYCQAAVMNDNGNVVRELRFDNTSEGATSLVNLARSVDPHVKAVVEPSANFWIRIYDRLEDEGVEVKLSNPLRTKAIAEARIKTDRIDAKTLATLLRGDLVAESYVPTRKNRERRALIRHRASLIQMRVDIKNRIHALLDKHEHTNNYSDLFGKQALEWLRNLQLPTPDHEILQSNLQIIETLNQQIRIMDIQIAKDAVTEDQAKLLMTMPGVDYYAAMVLLSEIGDVKRFSSDEKLVSWIGLAPQVHQSGETSWTGHITRKGSKRARWILGQCAQSARQHDPRMREFYERIEHKHGPSKAIVAVARKMLAIMYVMLIRNEPYHGENRELTEQKHKRLDTLANSA

SEQ ID NO: 513066 - protein, 351 aa, unidentified
MKIVAMDLGKNKTVVCVYDAISGKHCFKTIMTTPQQIHDLIVEESPGRIVLEICSVAGWVFDVAKSLGVEVQVANTNGQAWRWKNTRRKNDRQDALKLAQLSAMNQLRTVHIPVRHVRQKRALIQYRQSLVTRCVEVKNSIRSIFDKEGLPMPAGRGAWTRESMMELKAMALPVNRCNADNLWRGMLWVELQMLLKITQLLKRLEQKLNRAGEEDKRVNLLRTIPGVGPRLAEAVVAYIDNPHRFANCKQVGCYAGLTPRQYQSGDSNRVGKISGQGNNLLRALLVEVSWAGLQHNQWMRSTYQRILRGSPSRKKIAIIAVARKLLIRCWAMLRDNTPWRNDCNHMLDVAA

SEQ ID NO: 513067 - protein, 358 aa, unidentified
MNDATTSEAKMTIGLDLGDRHIQMCVLSADGEVIEESRLVCRPAALHARFLAASPTRVVIEAGTHSPWVSRLLAEIGHEVIVANPRKLRLIYENDSKSDRVDAEYLARVGRLDPVLLSPLAHREASTQADLAVIRSKDALVKMRAGLVNHVRGSVKAAGGRISKCSTDTFPKTAADKLPAELAPALAPVLDTIAHLTEQIRAYDRQIERLCEEKYPETKALVQLKGVGELTALAYVLTIEDPARFPKARSVGSYLGLRPRQAQSGAADPQLRITKAGDDMLRRLLVGSAHYILGPFGPDTDLRRWGLSIAAGGSKAAKKRAVVAVARKLSVLLLRLWVTGEVYEPLRNAARDGEMVSA

SEQ ID NO: 513068 - protein, 421 aa, unidentified
MKNGAARKLKQVPAGYLVVGIDPHKKRHAAVAITEDLMVRSKFKFANSRAGFEQALENARAEMIKASCRGVIFAIETGGHFWRNFAYFLEERGLPFRLISQLTLKRMRDGRDLNRRKNDFRDAEMAAGVLLTGDFTETKLLQGVYADLRSTHSAYFRLVKERTRVINLIKGLLDGLFPEFTEVFKDPCGRTARVVLATCPSPAAMAGMDEDVFVKLIRTARQGMLMVKKLKALHQIARISIGVRPGADAVALEVSLLVGRYRLIEQQVDKLVKSLVQLVDRTEEGKYLLSIPGINYLSTAAMLAELGPLKSYQNSKQLIKMAGTNPIEAESGGKRLGKTPMSKKGRPRLRYSAWSAVIPLFRHNPDFRAWAKRLRERAVHANPLGGKEVVGAALNRLLRLVFALAKKQEFYRSPQIVLVAD

SEQ ID NO: 513069 - protein, 352 aa, unidentified
MMIIGCDYHPSMQHIAWWDSESGHQGEQRLEHNSGEAEKFYRELKRRAIEVRVGIEAGGHTRWFERLLAELQIELWIGNPAKIAAQRVRKQKTDRGDAQHLLQLLREDRFPKLWVPSPQNRDLRQLLWHRHRLVQMRTRVKNQLQSIALNEGVQRRSRLWSKPGRTQLESFALAPWTARRRHDLLQLLDQLTPQIAELSQAVEQEARQRPEVQRLMAHPGVGPITALAFVLVLGSPQRFDGGKQVGSYLGLIPSEDSSGGKQRLGHLSKQGNTLLRFLLVEAAQAAVRCDAEWRRRFVHLALRRQRNIAIAAMARKLAVSLYWLWRNAEEHPPAAPQSGSHVGQLENHTGVS

SEQ ID NO: 513070 - protein, 373 aa, unidentified
MSHYDAYIGLDVHKDSISVAFAEAGRLGEVRLIGTIANEPDAISKLVRKLGDRHGLLEFAYEAGPCGYNVFRQIEGLGFACRVVAPSHTPVRPGNRQKNDTRDAVMLARLLRAGELTSVWVPDPVHEAMRDLVRARSVASHDARKARTLVQLFLLKHDLRYPAKSWTSRHRTWLRNRQFSHQAQQIAFQSYLNRLEQAEARKKELEEQIALVSQTWSLGHTVSNLQAFKGVGLVIAATLVAEVGMFSRFDNPRKLMAYLGLVPGEHSSGGSIRSRGITKTGNSALRALLFEAAWCYRGSVKVGNWMHKRRPEIPQPIIDIAWKAQVRLNTRYRKLVGSGKKSNVAITAIARELLGFLWDVACRTEAATASTTA

SEQ ID NO: 513071 - protein, 352 aa, unidentified
MPVLHYISMDTHSETTEICVKTRANGPARRWNVPTTIPAIREVIESIKRPRQLTFEEGPLAAWLYRNLKDAADRTLVCDPRKNAWISKGGDKDDPIDAGKLADLLAGGFLKAVHQTEDLSREVFKQLVGRYHERVARRVSESNKIIGWLRRWGVMVTARDFAEKSLRAELLGRLPADAELEPVRIGLELMFCGFDHAVRQETRLRRELIKRAKKEEFIVRLEELPGISWIRASTFFVYVDTPWRFAGKSALWKYMGIGLTRNTSGNGPQSLHVERKINRRLKSMILGAAKTVLERNGPDDPFAQQHRKWKESGLSPRNARRNVARNLAAVAWGMWKNGGVYEPKRIGMKSSE

SEQ ID NO: 513072 - protein, 452 aa, unidentified
MLDPQVKHVVGIDVAKASHTVCALEAPSGRVRQRPRSIAATAEGHSELCQWLAQWGGPEAVLVGLEATGSLWEPLYDALARAGYQVLVLNPRQTSSWSQSLGLRAKTDGIDAQTIARGLLAGYARASTLPAETVQALRELTRARRDLVQSRTAARQRLLDELVVVFPELPSHLPEHTDLANPAVLHLLGAYVSARALAEAPLADVTALLEQRSDGRWTREQAEQLQALAKHSTASTRAVRARGTVVSTFARHLLELQRHVDDLEKAIAAALRDDEVGKRLQGIPGIGPIHAATIRAELGDVARFSRVDQVVAYAGLDPRVRQSGAFVGQRKLSKREGSFDYAGVMVIWTYGGTGAWAKFGGGFRQGARPALAPRTQTPAASNLSLVCGSNALGGTQLVRHLPVGSAAKARGCPGARFHAREDPHRLHAAPGLQGSRRRDVRGRLAGLGQAES

SEQ ID NO: 513073 - protein, 308 aa, unidentified
MKHYAGLDVSVKETSLCIVDETGRICREAKLVSHPDDLLAALNDPIWRFDRIGLEAGPLSQWLFSGLAEAGLPVICIETRHAKAFLKAQVNKSDRNDARGIAQMMRVGLFRPVHVKTLISQKRRVLLAGRKLLQEKAIAIENDIRGLLRNFGLKVGIVGVIGFEQRIHELVGGQPELAELMEPLLVARRVLREQFTQLHRKVLLLARESEVCRRLMTIPGVGPVTSLAFISTIDVPARFKSSKAVGPSLGLTPVLNQSGESHRIGRISLCGDETMRALLYEAAQVMLTRVQKWSWLKAWAMQIAKRTS

SEQ ID NO: 513074 - protein, 342 aa, unidentified
MVLIGCELSPERCSKLQWWIPKREITANRLKHSDGEAEKFYRDLKLQTPQIRVGLEATGHRRWFERLLMELDCELWVGDAARIATMRVRKQKTDRQDAQLLLKLMIEDRFPRVWISSLEDRDLQQLLWHRHRTVQMRTRILNQLQSIAMNEGVQRRGGLRSVQGRKRLEQIPLGPWGTRRRSDLLVLLDHMNERVNELTAAVQQEAEKRPEAQLLMTHPGVGPVTALAFVLIIGYPERFQCGKQIGSYVGLIPSEASSGVHRRLGHISKQGNVLLRSLLVEAAQAAARFDPEWHKEFSHLAMRRERKIAKVAMARKLAVSLYWMWRRQRSSQMASKVGSYAG

SEQ ID NO: 513075 - protein, 413 aa, unidentified
MDKIYDICCGIDVHKKLIVACLNHKRKKELREFGATTRELMELAEWLQKNECEIVAMESTGSYWKPLYNIMESYGLHAIVVNPAHMKAVPGRKTDVKDAEWIAELLQHGLLQPSYIPSKDQRELRELVQYRKSLVGERTRELNRLQKMLEGANIKLSGTVTNINGKSARKILEYILSGNEIDEKKYDEMYEEKLIAHNLKASKEQILDDLKGFMSPLQRRMLKELLQHLDELNVHIENLNDEIDNFMKPEEKQASQAIQDVTGIGNTSAQTIIAVIGTDMERFPSDRHISSWAGLCPGDNVSAKKRKSGKIRKGNALLKSTLVLCAHAAVRHKSSYFHAQFKRISTHRGKKRAYVAVAHSILIAIYHILKDGVKYQDLGAEYYNQFNAERKIHAYLKKLKALGWEPPKEAVPA

SEQ ID NO: 513076 - protein, 372 aa, unidentified
MTKDTLNVGLDTDKNAIDIAIAEPLPKGEVRYYGKIANDKTALLRVVKRLQKDGRPLRVCYEAGPCGYAIHRWLTDVAGVTCEVVAPSLIPRRSGDRVKTNRRDCLSLAKLLRAEELTAVWVPDPAHEAMRDLTRARAAAVADLVRCRQRLGSLLLRQHVRYAGKPWTKKHRAWLGRLAFPAPAHRLLMVELLEALDQTQARRDRFNAHIAELAPRWSLAWLVDALQVLRGYALINATTIVAEIGDVRRFANPRQLMDYVCLTVSEHSTGERVRRGRITKAGNGRARKALVEAAWTYTHPAKGAKTTAAQATPALRAIADKARHRLSARYRKLRARGKLAPVAVTAMARESLGFIWAIAQAAAPAPAPHGRR

SEQ ID NO: 513077 - protein, 366 aa, unidentified
MKKISTVQALGNEIFKEQKLTIGVDLGDRWSFYCVLDEAGKIILEQKVPTTPEAMKQTFGRIPRSLIALETGTHSPWVSRLLTELGHEVLVAHAQKVQLITKSNRKDDRHDARTLARLVRIDPELLGPVRHRSAKAQIHLTVIRARAELVSARTALVNAARGLVKSFGERLPKCGTYQVSEKLAEGLSAELREVVVPLLTEIESLSERIQEYDERMEKIAKEVYPEVSLLKQVKGVGTQIALTYVLTIEDPYRFAKSREVGCFLGLRPGRRNSGQSEPQKHISKEGDRYLRTMMVQGAHYILGPFGEDSDLRRWGRKLAERGGKNAKKRAVVAVARKLAVLLHRLWVSGEVYEPLRNSQKAMRAVA

SEQ ID NO: 513078 - protein, 414 aa, unidentified
MDVIVERCAGLDVHRDSVVATVRVPGKGKSRRRRAQQTRTFATTIAQLEQLGDWLEGFGVTLVGMEATGVYWKPVFSVLERRFECWLINAEHLHNVPGRKSDVIDSRWCCELLELGLVRPSFVPPPEIRRLRDLTRLRSTQTEERTRVIQRLEKVLQDAGIKLTSVASGTYSVSARAMLEALLGGVSDPATLAQLAKGRLRAKIPQLTEALASRFDTAHHGVLVASLLAHIDALDQAVATLDARIETATAAHTELVQLVCTIPGVKLRTAQVLIAECGIDMSVFGSGEHLVSWAAICPGTNQSGHRRRSGKTRHGNRWLRTALTQAAHAAARTKNTYLASHYWQIRGRRGDAKAIGATRHDILIAYYHIVSERVPFRELGPDWLARRHSPEHRTRRLVKQLEALGHTVTLEAAA

SEQ ID NO: 513079 - protein, 311 aa, unidentified
MTDHNIGVDISKSYLDVFRLEDNMAKRFDNSVAGFRALIRWLSKAPVARVVFEPTGAYHKAFEVALGTTLPLVKVNPLQARRFAEAHGTRAKTDAVDARMLALMGAAFNLEPQVPQSREARDLRDLHVARAGLVKDRTRLRNRAVTQDLSVLKRQTKARLKLVEQQIAELDVEIVKLIEARESTARTCDILCSMPGVGAVSAAAMLTLMPELGTLDRKQAASLAGLAPITRKSGQWQGKSFIGSGRKPLRDALYMPALAAMRWNPDLKAKYEQMRATGKPAKVAIVAIMKKLIEVANALVKANRKWTPKTA

SEQ ID NO: 513080 - protein, 341 aa, unidentified
MMIIGCDFHPRFQQIAFLDQETGEYGERRLQHRGEAEAFYRKLSGQPVRIGMEATGNYRWFRCLAEEQGHELVLGDASKIRACCVRKQKTDKRDARHILDLLLENRFPAVWQPDAANQDLRVLMMHRVKQVRMRTRLKNQLDGLAKSEGYLSPRVWSAGRRAELEAIPLRGWLDRRRQDLLELHEELDKRIAPLDEALREAANRDTAARLLMTHPGVGPVVSLAFVLTIGDVSRFGRGKQVGSYLGLIPSEESSGQHRRLGSVSKQGNSLVRWLLVQAAVVAQRYDVSWHRQYVRLSMNKHHGVAKVAIAHKLAVRLYWMLRTGQSYEQLAVRGSHAGQSV

SEQ ID NO: 513081 - protein, 390 aa, unidentified
MTNIYLGLDVGKTNHHATALTTTGKKIWDKPLPQSEPKIRELLEKLNGQGTVLLVVDQPKTIGALPVAIAQDMGIQVAYLPGLTMRRVADLHPGEAKTDARDAFIIAETARTMPHTLHTITVTEETTAELSMLCGFDDDLAANATAISNRLRGFLTQIQPHLERSLGPRLSHSAVLKLLKKYPAPADLKTAGKTKVRNLLKKNASRLTEEIFLTLGEQTVVVAGTAIVTPIISALVVQLELLLTQRAQTEQQILALVEAHPLSAVIRSMPGMGVRTSARILTEVVGKDFKDASHLASYAGIAPVDRKSGTSIKRTQASRRGNKALKRVLFLSAFASLKVDQASRRYYDRKCAEGKRHNQAIMALDRKRLNVLFAMLRDGCFYECRVPVGT

SEQ ID NO: 513082 - protein, 354 aa, unidentified
MSQTPNTAIAVIGIDIGKNSFHVVGHDARGAVVLRQKWSRGQVEARLANIPPCLIGMEACVGAHHLSRKLASLGHDARLMPAKYVRPYSKGQKNDFNDAEAIAEAVQRPTMKFVATKTAEQLDLQALHRVRERLVSQRTGIINQIRAFMLERGIAVRQGIGFLRTELPTILATRTDALSPRMLRVIEELAGDWRRLDQRIDGLSGEIEALARQDQACSRLMTVPGIGPIISSAMVAAIGTGDVFSKGRDFGAWLGLVPKQISTGDRTILGKISRRGNRYLRVLFVQAAWVVLVRIKNWERYGLKSWIEAAKRRLHHNVLAIALANKLARIAWAVLAKGRAFELTRTDDAGVRPA

SEQ ID NO: 513083 - protein, 331 aa, unidentified
MKISDVIGIDVSKLTIDVVVHGNQEHGQFENSDKGFREMSKWALKNSLAPKKETMYVFEHTGLYSYKLAIYLDEQGVLFNIVPGLEIKRSLGISRGKDDKVDASKIARYGYRLRDEMEPYELPSEDLEKLKRLLSLRDRLVKQNAGYKASHNEWKRVLAQKGDKVLFDVQEKMVKYLSKQIKAVEVEMGTIVKNNDKLKKQYDLITGIKSIGPQTALFMIVYTAGFTKFKAWRKFASYCGTAPFPHSSGTSIKGKDKVSHLANKKIKSLLDQCAKIALIYNTEMKLYYNRRIGEGKNEKSTRNIIRNKLLARIFAVVQSGKPYVETMKFAA

SEQ ID NO: 513084 - protein, 341 aa, unidentified
MPEETIGIDLGDKMSRYCIVNREGEVIEEGSFRNQASSLAKHFSGEPRRIALEAGAQSAWISRELKGLGHEVIVANTRELKWITASDTKNDSADARKLALLARADVQLLAPVEHRTAEQQAQLAVIRARDAILRARTLLINSARGIAKGFGVRLPKSITSTFGERALADLPAMLRTALEGLLRQIDALSQHIGNYDQRIGELAEQRHPEVKRLTSIPGVGTLTALTFTLTLGRPERFAHSRDVAGFLGLRPRQNQSGARDPQLGIAKSGDPYLRKLLVQCAHHVLGHWGKDSALRRWGLTKTEGGKKATLRGIVAVARKLSVLLHRLWVSGEFYQPFPKMV

SEQ ID NO: 513085 - protein, 350 aa, unidentified
MMIIGCDLHTRYQQIAMLDTDTGELVERRLEHESGEAQAFYAGLSGEVRVGIEATGHTHWFEAMLAELGHQLWMGDAAKIRASVIRKQKTDARDAEHLLNLLREGRFPQIWRPSPAERDLRQLVWHRQKLVWMRGAVKNQLHALAMGEGVCRKKKLFTAKGRKELEGLALGPWASYRRQELLRMFDELAAATAQLDAAVEQAAKDQPLAVRLMTHPGVGPVTSLAFVLIIGPVERFEHSKQVVSYLGLNPQEHSSGGKQRLGSISKQGNPMMRSLLVEAGHTAARFDPALKRMYQRLKFRRGASVAKVAVARKLAVRMYWMLRSTADYAQLVRMQGSPWATLVENSPSLG

SEQ ID NO: 513086 - protein, 418 aa, unidentified
MSKLRKVFDQLHERVAGLDVHKAQVTAAVRVPGPDGARLQEIAEFKSTVVGLLALRDWLAAHGVTYVAMEATGVYWKPVWYVLEDAFECILCNARDVKQVPGRKTDVSDAAWIAQLTEAGLLRASFVPPKPIRTLRNLTRYRKTKIEDRQREANRLHKILEDTGIKLDCVASDILGVSGREMLDALVAGTTDPKILAEFAKGRLRSKIPDLREALHGRFDSQHALIVGSILAHLDFLDEQIKLLSDAIEEHIRPFASAVELLCTIPGVQRHTAEVIVAETGSDMSVFPTSKHLASWAGQCPGNDQSAGKRRSGRTRKGSRWLGIALTEAALAATRQKNTYLGAQYKRLRGRRGHARALGAVRHSIIVAAWHMLKNGELYNDPGADYFDRRVNPDLKVKRLVAQLEALGRTVTLQEAAA

SEQ ID NO: 513087 - protein, 399 aa, unidentified
MKVCGLDIHKDSIFCAIYNGKGNADVLEFATTAPEIKRMGKHLKAEGVARIAMESTGIYWIPVWNILESMSFELHLVNPYLIKQMPGRKSDVKDAQWIAMLLHKGLIRSSMVPDPAIRELRSYGRRYRKLMQQRTSVLQSLERTLEQASIRITSLVSDTSTKSVRRIIRSLIAGETSGEALLAHVHGRTLKRHGRERVVAALSGFVCEHHRFALEQLMEELELYERQAEACLEHMRHICRERYSRELELLMSITGICEVSALIIVAETGADMAAFESSGRFTGWVGLRPRNDESAGKYKSTAITKGNKYLRTILVQVAWAAARTKGSPLSEKFIQLSRRKPRKKALIAIARKMATVIWHVLSEQKPFDPGRLKVYDPENLLARLEYYKREQRRLELLLG

SEQ ID NO: 513088 - protein, 351 aa, unidentified
MLIIGVDYHPSFQQIAFFMEETGECGERQLNHSDGEAERFYRDLQQRGTRVRVGMEATGYSRWFERLLAELGFELWIGDPAEIQTKRVKKQKTDRKDAQLLLRLMREDNFPKIWVPSPENRDLRQLLWHRHRLVQMRTRISNQLQALAMNEGRRGKKKLWSEQGRAELEKLPLAPWASRRRQELLDLLDRLHPTIEELTAAVEQEARKRPDVVRLMTHPGVGALTALAYVLIVGTPARFPRGKQIGNYVGMIPREDSSGGKQRLGHISKQGHSLLRFLLVEAAQAAARIHPDWRRRYIHLSMRRHKSIAKVALGRKLAVRLYWMWRNGCAYSPSFEFGSYVGQPGTGHGVR

SEQ ID NO: 513089 - protein, 491 aa, unidentified
MSTPAFAGATSRIQYFYHSHGNLLAAVPKINIMSKVKHKTGNRFEKMPVVHLHAAGIDVGSRSHYVATGQRKEDVSEFGVYTEDLHDLCRHLKSHGVTETALESTGSYWQPLFVMLQQYGLNPILVNGRFTKNVKGRKTDVQDCQWIQKLHTMGMLEGSFIPGLFTETVRQYYRHRQCLVESAASYINKMQKALRLTNIRLDAVLKDVMGRSGSDIIGAILEGERDPAVLASLAQKTVQAPVAEIQAALTGDWREEYIFELRQCHDLYRYHHEKIDQCDGEIQKLLTTEIARRQREGGLAKAEGVKIKKKKARKNEARINLQQLAVDLTGGIDISAIPGVGLGFLLCLVSETGTDLEAFATSKQFAAWLRLSPNTKKTGGKVMSSRTGKGKNRLARAFMHAANAIGNMKDGDPIVHFFKRMERKKGRAVAIVATARKLAVMIWNMLVKKTPYNPELPEAYLSKIRQNQIRNIQRKIRQLDIHERELMFTTG

SEQ ID NO: 513090 - protein, 358 aa, unidentified
MPSLAELVDAVVGIDTHRDTHEAEIADATGSPIATLTISNDDAGFASLLRWITRHAPGRRVAVSVEGTRSYGIGVARALAAAGVLVLECEQPHRAQRRGKGKSDPIDAHLAVLAALRLDADLLPAVRAGGDREALRILLAARQDIVTAATAQTNRLRALLLTGDDIDRRAARSTLTDVSLTALARRRVRGEASRAEAIRQGEIRRLALALREAERELKVNRKQLQTIVDDLAPGLTAHYGIGPISAAQAIVSFSHPGRCRNEAAFAALAGTSPLPASSGRTIRHRLNRGGDRALNRALHTIALTRIRSCPRTRAYVARRTAEGKSPREIRRCIKRYIARELYRTLTRAMPPQTVPITA

SEQ ID NO: 513091 - protein, 358 aa, unidentified
MNAIHYIGLDVHKKTISYCIKTAAGQIVKEGTLAAERSVLRSWAGSLQQPWHGAMEATIFSAWIYDTLKPYAERLEMGHPAKMKAITAGKKKSDTLDARTTADLLRCNLLPSCYVFSPDLRDLRRLMRYRHMMVQQSVRMHNKTAGLLMESGVSFHKTKLQGKKYFSNLIKSLEEVPESVKDLLRMSRGAKEMFEGVQQQLLRRLLADAGLQQRVERLSSIDGVGEITALTWALEVGDPHRFVSIADAVSYCGLTAALRSSAGKQQRGPISKQRNAWLQAALIEAAKLAPRWNPQLAQLYAQQLERGHANRATLQVARKLVAYLLAVDKSGQPFQVRTPPPKTIPTRRKARRHLASAA

SEQ ID NO: 513092 - protein, 479 aa, unidentified
MAKPKKPSETPTQRKPQAGKGKRGSKRKGMCLDDRPILEPNAAGIDIGAREIFVAVPSDRDENPVRVFSTFTEDLQEMARWLVSCGITTVAMESTGVYWIPLYDVLEQHGVRPCLVNARNMKNVPGRRTDWHECQWLQFLHSVGLLRSAFRPEAEVCAVRSLTRHRDDLVQMASQHIQHMHKALTQMNVQIQHVISDITGVTGLAIVDAILGGLRDPVELAKLREPNIKASEETIRKSLVGNWRAEHLFTLKQSRQMYGFYGQQISACDQQIEKLLVAFQPRVDPTVRPLPPDRKKKRSRKRKINPKTGFDVRTESYKLFGVDLTQIPGLMGMILVLFTELGRDMSRWPTAAHFASWLGLCPDNDISGGRVLWRGTRKVHNRAGHLFRLAAHSLHHDQTPMGYYLRRMKSKVGPAAATTATAHKIAIIFYTMIKNQVEYDASLWARRDAERDKKFEAKLKRQAQQRGYKLVPMEEKPAA

SEQ ID NO: 513093 - protein, 321 aa, unidentified
MTSQNEAVCFGIDVSKHWLDIAEHPSAQVTRVDNTAAAIRGWLRTLPRGAQRIACESTGSYHCTLVKLLIKAGHQVFLIDGFKLSRYRDTVGQRAKTDRHDARLIARYLAHEGTDLRPFSLPAPAVTELRSLLRRRATVVRSLGRIRQSMEDLPGFGREVRVALARLTALIKRFEQRIASLINESGWTEPYRRILKIEGVGALTAAGLCAVFHRAAFSGADAFIAFLGMDVSVRDSGKKTGRRALSKKGDSEMRRLLYNAAMAASRSTTWQPFYQRMLQRGFSRTQALVALARKLARVAFSVMKNAADYVPKQHENACGRT

SEQ ID NO: 513094 - protein, 344 aa, unidentified
MDHFAGLDVSVKETSVCIVDDTGRIVKEVKVASEPAALLKVLRSPAYRFKRIGLEAGPLSQWLFSALAEAELPVVCVETRHMQAVLKAQINKTDRNDARGIAQMMRVGLYRPVHVKTLRSQKLRMLLTHRKLLQSKAIAIENDLRGTLRNFGLKVGMVGKVRFEVRIQELVENIPDLAVLVEPLLIVRRAVREQIVILHRRLLAIVRDDEVCRRLMTTPGVGPVVALTYRATVDVPARFRKSKSVGAVFGLTCSRYQSGEIDWSGKISRCGDEMMRTMLYEAAQSMMHSKKWSWLKAWAMQIARRRGMKKAIVALARRLAVIMHRIWVDGTEFRWTREQVAAAA

SEQ ID NO: 513095 - protein, 369 aa, unidentified
MRKIVKYIGLDVHKNSIAIAIAEDGQKRDVNFFGVIDNNMDQLYKFLRKQISQGVAPRCVYEAGPCGYSIYRSLKNKGIDCVVIAPSLIPKKSGDRVKTDRRDAESLAKLHRAEELTAVHVPPIENEALRDLVRAREDSVNSLKRAKQQLGAFLLRHHVCYTGKSKWSKAHFNWLADISMPHPAQQITLQEYIDMVQDGRKRVERITEQIRQLSEDTQLNDLNKSLQSLRGVSQIVSAVVVSELGDLTRFESPTKLMAFLGLVPTQHNSGDKKRPGKITKTGNGHVRRVLIEAAHAYRLPARKSRTIAKRNEGLAQEICKIAWQAQVRLCGRYKRLVFRGKNSNLVKTAIARELAGFMWAIAHAIPKTA

SEQ ID NO: 513096 - protein, 371 aa, unidentified
MKKCTRFVGLDDSKHSIDVAIASEGREGEVRAYGAIPNTPEAVRKLVRRLGRPKDLYFVYEAGPCGYGLYRELLALGANCMVAAPSKTPRRSGDRIKTDRRDALALARLHRAGELHPVWVPDEETEAMRDLTRAREDAKYVQTKARQRLQSFLLRHGRRYSGRSNWTKTHLKWLAEQRFAQPSQQICLDEYVEAVRQASARVQRLEAQVRELVSVWSLGPVVGAMTAHRGVSLVVAATVCAELGDLTRFDRARELMGFVGLVPSLHGTGLSHRVGAITKTGNAHVRRVLVEAAWAYRHPARRTAHLRQRLEGQPDEVQEISWKGQVRLCGRHRRMIARGKHPNKVAIAIARELLAFLWATARMVSPIRPAA

SEQ ID NO: 513097 - protein, 417 aa, unidentified
MWFAGVDWSDTHHDALVLDEAGLQIGVRRVTHSPEGFRDLINFLGSITGPDKKAAMACIIETNHGLLIAALLEAGFAVYPVNPKTVDRRRSAAGAKTDKIDAYLLAKHGRSEIADLRRLEPDSALIAELKALTRDQDSLIQSQTRLINQLTACLKAYYPVALQLFSKLQQKSTLVFLQTYPTPQVAMAATVDQVAELLKSTRHPTPDKVAAKIVAALHQPHLVADAITTRTKSRLMLVLVKQLLPLLEEIAAYDEVIDELFLTHADSTIFRSLPRAGKRLAPRLLAEIGDDRKRYTDAASLQALAGTSPVPYESGNYSKPRRRYACIKPLRNAFYQFAWQSTQTKLKAGQRSTTSASARKAKVIPSLCVPWRTCGPGSSSPCGARSSLTRPVPLRLHNSFMPTEWRRHPATRLATGS

SEQ ID NO: 513098 - protein, 346 aa, unidentified
MEHYVGLDVSLKLTAICIVDRTGKIQREGVVHSDPEAIAAFIKSNAPHVARIGLETGATSTWLWTELNKMGLPVICIDARHAKAVLKMQINKSDRNDAVGIARIMQCGWYKEVRVKDLDSHAVKALLVSRALLVKIKRDLENQVRGLLKNLGLVIGPAKMNAFALRAAELTEDRPELAAAVAPLLNARAAIELQIADLDRKVMKLARSNAQVRQFMTAPGIGPVTALCFLATIDDPGRFKRSRSVGAYVGLTTRRYASGEIDWTGRISKCGGKMLRSYLYEAANVLLTRVAKWSALKAWGIRLAKRSGLRKAKVAVARKLAVILHRMWIDGTEFKWSSKEAAQQPA

SEQ ID NO: 513099 - protein, 321 aa, unidentified
MSKGSMEPLVCAGVDIGKERLDYALAGADRAMNCANTAKGRSQMIAFLKEKGVRRMGLEASGSYEIEVVDALRAAGFEVAVLQPNQVRAYGQFKRKRAKSDPIDAILIADCTAALDQLRDPPDPRLAPLAEHLTFIEQIQEDIARLKTRRDRFRDPRVKEEIEGEIKRLAARKRQELRLLMKAVRGHADLARKLHLLLSIQGVGEPTALALLIRMPELGTLSREEAASLLGVAPFVHDSGRYKGQRRTGGGRARARTSLFAAALAARQWNPALGAFYDRLTKAGKPYHLAIIACVRKLVIFANTVLARNQPWQVRTADARR

SEQ ID NO: 513100 - protein, 317 aa, unidentified
MASHKETFIGIDVSKKQLDVAVLPDAKHKVYPNNEQGIGQLASFLKSLSPSLIVLEATGGIEVPCVGILAAEGLPVVVVNPRQIRDFAKATGRLAKTDAIDAQTIARFGETVRPEIRDLKSPEMQELAALNTRRCQIIQMITAEKNRLATATKWTREDIKRHIAWLKESLDDVNDELNKSIRNSPVWREKDDLLQSVPGIGPVASATLLSQLPELGMLNRKQIAALVGVAPLNRDSGMMRGKRCIWGGRAGIRTALYMATLVATRFNPIISAFYHRLCDAGKAHKVALTACMRKLLTILNAIMKNRTHWSPVCPANA

SEQ ID NO: 513101 - protein, 327 aa, unidentified
MEQRVLGIDVAKETLDVALSDGFYLKHDQFSNTQKGHEELELWLRKQSVSKVHVCLEATGQYGDGVAEYLFAQGFSVSVVNPARIKHYANSKLRRNKTDKADAQLIAEYCIREKPAIWTPPPLSFKDLQTLVRHLDDLQGAFRQESNRLQSGVHTSFVVNSLTSICDFLDEQIKQTKKAIQDHIDQHEELKRMQDLIVTIPGIGKLTAAKLLGEIRNILDFKSARQLAAYAGLTPRNFLSGTSVHKKTRLSKTGNANLRKALYMPAIVAIKRNPIIHSFCERLSQSGLKPMEVIAAAMRKLLHLVFGILKSGRPFDPNYLNPMQAFS

SEQ ID NO: 513102 - protein, 393 aa, unidentified
MTIQTQGSVQTQVLELVPRDYDVFAGLDVDHHSIAATFTDHQRLMQSLRLPYSARQLLNYVRKHFPQQRVAFVYEAGPTGFGLYDELDAAGYPCLVVAPPQVPRAARERVKTNRLDSRKLSTALRGGELKSIHVPSPKYRELRHLVQLRDTHVGQLTATKCRIKALLLYEGIPFPSDEGKEKQWSARVVNELLELPGSESVRFKLDQLVGTLHFNFNSAAAAQKQIRHFCQKDDELRQAVAWLKSLPGIGEIIATHLVARLGDPSLITNVRQIAGFLGLVSSEHSTGDKQNRGEITRAGDSRLRNKLIQSAWVAIRQDPELREFYQRVYQRHPRKVAARKAIVAVTRKLTTRIYAVLKEQRPFVLREVSAAPLTTEETAGHRGRLDGQQNEQS

SEQ ID NO: 513103 - protein, 488 aa, unidentified
MKARETPSVFDTQNLELRKLYEDAASPRAILCVALDYAKSKHLALCCDGNGDILKAPFPVRNNAEGIDFLVEQIEASARRRNIPKKHIFIGGEDEAPYVSNFISALRGKGYLVVRVNAYEAKHNRNGRLASTDAIDLSGIARTMVSRRARTTTPPDDVVYVELREAARFRRILVRDLTACSNRIHAVVDQLCPGFLDHSRSRLTSFTEASLDIMAERFSTMEIARRKPTAFAKFLHLRRVQNPEETAAAIIALAREALPPDPSRIPGLQRTLTGLVELHRCLKRNSIDLRAEAARLLATTPYALLTSLPGIGFVLAAGIAGELGPPERLRGIESLCAYAGIVPRSYQSGGPDKPAVQGHVSNRCNRILKDWTVQSAQKLLLYGTPEIKDRIIRWNASGQHGIYAGAKRYLRLLRALTLNGVPYLEPAARATAADPQIIAAGTTAAWSIMVNKWRTIPGGLDLITDIAHPVGFWRTTVTELHGIELHAR

SEQ ID NO: 513104 - protein, 330 aa, unidentified
MALIESVRARAARALGSVPAVVSCYEAGYDGFWLHRRLTAAGITNFVFDPSSIAVDQRARRAKTDRIDGEQTLRTLMAHCRGEPRVVRIVRAPSPEQEDARRKSRERDRLVKEQTSHINRIKGLLRLLGIYEANPYRRDWPDWLKEQRNWDGQPLPTELLAELEREHARLMLVRKQIDELSKAKVTAEAPAAVVQMAEQTKRLQQLKGLGPVFATTLAHEVFYKDFSNRRQVASYCGLTPSPWQSGRMDREQGVSKAGNGRARTAAIELAWLWLRHQPDSPLSQWFREHTVKATSRIRRIAIVAVARKLIVALWRYLTTGLVPEQALMKA

SEQ ID NO: 513105 - protein, 343 aa, unidentified
MDHFAGLDVSVKETSICIVDDTGRIVREVKVASEPEALLAVLANPTYHFKRIGLEAGPLSQWLFSALAEAGLPVICVETRHMRAVLQAQINKTDRNDARGMAQMMRAGLYRPVHVKTLRSQKLRMLLTHRKLLQSKAIAIENDLRGTLRNFGLKVGVVGKVRFEARIRELVENLPDLAVLVEPLLIVRRVLREQIGILHRRLLAIVRDDDVCRRLMTIPGVGPVVALTYRATVDVPARFKNSKAVGAVLGLTPSKYQSGEINRSGAISKCGDEMMRVMLYEAAQVMLTRTNKWSWLKAWAMKIARHRGMKKAIVALARRLAVIMHRIWVDGTEFQWTREAAAA

SEQ ID NO: 513106 - protein, 341 aa, unidentified
MTEASIIGLDLAKRVFQAHGADASGNVVFRKRLRREQVLKFFADRPVCVVAMEACSSAHYWARGIGELGHTVRLIPPAYVKPFVKRQKNDATDAEAICEAAQRPTMRFVSVKSEAAQANAVVFRARDLLVRQRTQAINALRGHLGEYGVVVAKGPSHVAKLIAHVEDPAAELPEAARTVLRVLTTSLQFLSERIDLLDREVARRAREDNEVRRLTTIPGVGPVTATALAALAPPTSAFRRGRDFAAWVGLTPSQHSSGGKQKLGATSKMGERTLRRLLIIGASSVVRRAIRHGTPSRAWLGRMLARKPRMLVIVALANKMARTVWALQATGEIYRAPVVAT

SEQ ID NO: 513107 - protein, 351 aa, unidentified
MQRYIGLDVHAASTTMAIVGPSGKRLGHEVLETTARALIERLKAVPGERYVCMEEGTQSSWLYELLSPHAADVVVVMRTEASRGPKNDEHDAYLLAEMLRTGQAKPRVFKEQGSFQRLRELARVYTMVMRDVVRVQNRIKALYRSRGVSATGKSVYSADHREAWIEKLPEMARTAASTLHTQYEVLEAVRRQAEKDLVHEAHQHPIARLLETCPGLGPIRVAQLLPVVVSPWRFRTKRQFWSYCGLGIVMRSSSDWLQRPDGGWQKAQLQQTRGLNRHHNKALKCIFKGAATTVVTQLREQPLHQDYDRIVAAGTKPNLAKLSLARKIAATALAMWKQQEVYAPSKHRSQD

SEQ ID NO: 513108 - protein, 439 aa, unidentified
MRGERAFKHGGEGLAAMAEWLVDAAGGMPPAAIGVAIETPRGPVAESLHAPGFAVHSINPKQLDRFRDRHSPAGAKDDRRDARVLASALRTDPHALRRVEPAGPAVVELREWARIATDLKRDRGRLANRLRDQLWRYYPQFIEVVDDVAAPWALALWKRAPNAAAARGERATTYAKLLKKHRIRRFDGDALKRLLDRRPPAIDAAAADAAERHVRVLAAQLRVVNDELARALAERNACLDRLGSADAADAETAPGQSGEQRDVAILLSLPGVGQTVAATLFAEAHDPLRRRDYHALRCLCGVAPVTRQSGRTRIVTRRLAVHGRLRDALYHGARVAMQHDPACRARYDALRARGHGHHRALRSVGDRLLNVACAMLRDGTMFDPEAAAAWIGRVVRPRSGRAVGSRSRTAGSTHPAVVNIFAAGLGASPQGAARGGGAA

SEQ ID NO: 513109 - protein, 354 aa, unidentified
MPKTASAQIAVIGIDIGKNSFHVVGHDSRGAIILRQKWSRGQIEARLANLPPCLIGMEACVGAHHLARKLTAFGHDARLMPAKYVRPYARGQKNDFNDAEAIAEAVQRPTMKFVAVKTTDQLDLQALHRVRERLVSQRTGIINQIRAFMLERGIAVRQGIRFLRTELPIILASRTDVLSPRMLHVIEDLAGDWRRLDERIETLSREIETIARQDAGCDRLMSVPGIGPIISSAVVAAIGSGDVFSKGRDFAAWLGLVPKQISTGDRTILGKISKRGNRYLRVLFVQAAWVVLIKPVSWERHGLKSWIESAKKRLHHNVLAIALANKLARIAWAVLAKGRGFETARTIDGSTQPA

SEQ ID NO: 513110 - protein, 355 aa, unidentified
MCAKKTGSIEDLAVIGIDIGKDTFHLVGFDRSGQLVMRKQIKRLALNATFEQLPRCIVGMEACLSAHFVSRTLRGMGFEPRIIPAIYVKPFNKGQKNDYNDAEAIAEAALRPNLRTVSEKDQDQLDLQALHRVRARLVSRRTATINQIRAFLIEQGITVRSGLRALKNSFETILEQRRDEISPWMSGILIGFYGDWLWLDKRIADVSGEIEEISRTEENCANIMTIPGIGPMISTAMVAAVGKGEAFDRGRDFAAWVGLVPRQFSTGGRTILGRITKRGSRYLRMLFVQAAKVIMMRPHRWSDFSFGPWLTAAVARMPRNKAAVALANKLARTAWSLLRHGTRFDAPKDAAMEAI

SEQ ID NO: 513111 - protein, 358 aa, unidentified
MDNQHITDPVVGGVDTHKDLHVASIVDGQDRFLASESFPTTRQGYRRMLSWMRSFGELQRVGVEATGTDGAGLLRHLQQAGIEVLEVTGPDRHDRRKRGKSDDFDAEAAAHAAFAGKRTVTPKTRDGMIEALRVLKACRKTAVQARRIALQMIGNTIVSAPDALRDTLRKMTRMKLIRTLAAWRPDMTGYREMEMAYRIALKSLARRYLELHDEIADLDAMIKPIVDDLAPDLVAQTSVGYCSAAQLLITAGDNPGQLKSEASFAALCGVSPVPASSGKTDRPRLNRGGDRAANSALHIIAICRLRCDARTQHYVARRIADGMSKLEAIRCVKRYIAREVFALIRNRYREINEAQVAA

SEQ ID NO: 513112 - protein, 352 aa, unidentified
MTRITTIGIDLAKKVFQVHGVDAEGKVVVARKLRRKEVLAFFARLAPCLVGMEACGSAHYWAREIAKFGHTVKLMPPRYVKAYVKRGKTDAIDAAAICEAVTRPSMSFVPVKGLEQQGLSMLHSARSQLIGQRTQLINGVRGHLSELGIIAERGLLGLAELAAIVRDESDRRLPATARAALMILVRQIEAVSTEIAALDSTLRKENKASELGPRLETIPSIGPVIASALRARVTDAKLFENGRHLAAWIGIVPENDSTGGKVKQKGLSKKGDRYLRSLLVNGAMAVVQQAQKRPDKHPWVAKLLGRMSAKQAAIAIANKTARIAWAIMVHGGVYEAGHRVPQYRAEACAAPG

SEQ ID NO: 513113 - protein, 389 aa, unidentified
MYFVGIDISKYKHDCFILNDSGEVIVNDFVFANTHDGFQSFLILLESIDSSQNIKIGFEATGHYTSNLKRFLENAHYSFMESNPALISKFIHSQTLRKTKNDAIDSCTIARWLMTVDYKPYPTGFYHTYSLKSLTRLRDSIVRQRSFYMVKLTNVLDHTFPEFKPFFKERFSQTALFILEKYHTPERISRMNAASYDAIRCISRGKFSMQRFIKLKELASSTVGDSNEIFETQLITILNLYRLADSEVKRLETDIISLVTELNPQSLTIPGIGPISAAIIASEYGDISRFSSPAQMLSFAGLEPGYFQSGTMEFKGKMVKRGSSQLRYTLMNCTMPLIMYNVVFAEYYHKKRNEGKSHRVALNHVAKKLLRVIYTLETQNIAFDDSKLR

SEQ ID NO: 513114 - protein, 371 aa, unidentified
MGKHKLAFVAFDSAKDKHAVAIAEDGRDGEIRYLGEIENSPDAVKKFVTKLSRQYEELHFCYEAGPTGYGLHRQLTDLGHVCDVVAPSMIPKRSGDRVKTNRRDAVMLVKLLRAGELRTIWVPDSIHEAVRDLARARETGMLDLKVKRQQLLSFLLRHGRNFPSGKNWTKMHARWLAAQKFDHPAQQIVFQDQIDAINSAQVRLAALEQQLRDIVPTWTMAPVVAAYQALRGVSFLVATTFVAEVGDVRRFSTPQQLMAFLGLVPSERTTGDTVRRGSITKTGNRRARRVLVEGAWTYRHPARVSQTLQSRINGLPLTVRTIAWKAQVRLCARYRRLVANGKNPAVAATAVAREMAAFLWAIGHQVAPNAP

SEQ ID NO: 513115 - protein, 313 aa, unidentified
MQNSFIGIDISKNTLDVHVLPENVSYSYPYETQKVKVLIRKLKKHKPVLIVMEATGGYEISIAVQLSAAGLNSAVVNPRQIRDYARAIGKLAKTDSIDAYVIARFAQDVKPEARQQLTMHELQLKELVMRRQQLIDMRTAEKNRLSRAHAPLVIKGIQKIISTLDAHIDAIAEELSTQIQSNPAWDQKVELITSVPGVGTTTAHMLLFCLPELGRLNRRQIASLVGVAPMNRDSGMLKGKRTITGGRAIVRKVLHMPILSAVTRWNKRLKKLYEHFIARGKKHKVALTACMRKLITVLNCILKNNQVYNPNCC

SEQ ID NO: 513116 - protein, 386 aa, unidentified
MPQLNDLSRSLVTLEQDATLIAVIEMGQSSWLVAGIVPGVERQPLKKLAVDESALLKLLHRWREEAEQAGHKIKRIAVAFEAGRDGFWLARWLRARDIEVHVIHASSVAVSREHRRAKTDRLDTELLKRVFLGWLRGERHHCKMVAIPTIKDEDGKRPNRERESLVGEQSRIINRIKATLVRLGIRGFNPKLKKAAERLEGLRTPEGEPIPPNTLSELHRDMERRRLVRDQIRQIESARLDHLEHEPGEAAHAMVRLLARVMGIGIETADMLVHEVLSRNLRDRRAVARYAGLTGSPDESGKKRREKGLARSGNPRVRRGMIQLAWRFLMFQKDSALAQWFRARTENARGTRKTMIVALARKLLIALWRLVRDGVVPDGVILRPAQ

SEQ ID NO: 513117 - protein, 349 aa, unidentified
MSQNLNSAIAVIGIDIGKNSFHVVGLDDRGAIVLRQKWSRGQIEARLANMPPCLIGMEACVGAHHLSRKLKSFGHDARLMPAKYVRPYSKGQKNDFRDAEAIAEAVQRPTMKFVATKTPEQLDLQALHRIRERLVSQRTGIINQIRAFLLERGVAVRQGLRFLRADLPRILATPPDVLSPRMVQVIRDLTEDWRRLDERIDGLSSEIAVFARQDAGCERLMSVPGIGPIISSAMVAAIGTGDAFTKGRDFAAWLGLVPKQISTGDRTILGKISKRGNRYLRVLFVQAAWVVLIKPMSWERHGLKSWIEAAKKRLHRNVLAIALANKLARIAWAVLAGGRTFEANKLQTA

SEQ ID NO: 513118 - protein, 386 aa, unidentified
MLLCLNPNAAGVDIGATEIYIAVPGDRDPQAVRCFATFTEDLHAAANWLKACHIETVAMESTGVYWIPLFQILEARGFKVFLVNAHHVKKVPGRKSDVSDCQWLQYLHSVGLLRGSFRPEQAVCTVRSILRHRDSLVQMASNHVQHMQKALDQMNLQLHHVISDITGVTGLAIVEAILAGERNPHTLAALRDRRIKASADTIAKSLVGDYRREHLFTLGQSLAAFRHYQELIAACDREIAQYLEGFESKVDPPSGSPSRSKDESQPKTSEPRFDLQTHLHRILGVDLTQVPGINVLTTQTLLAEIGPDLSSFDDGSALASWLGLCPDNRVSGGKVLSVKTRKVKNRAATALRMAAQSLYRSQSHLGHRAQIGAHHPPHGNHRPGLR

SEQ ID NO: 513119 - protein, 355 aa, unidentified
MSQEKYIGMDVHQATISVAVMDAAGKLLMECLLETKASTIVEFIQGLQGTLSLTFEEGTSAAWLHDLLKPHVSQLVVCDPRKAALLKEGNKSDRIDARKLAELLRTNQLKPVYHEEHGIRALRELGRSYLTITKDVTRVMNRIKALYRSWGIPCSGTNVYAPRHRAEWLAKIVEPGVRVRAEHLYQQLDSLQPLRLQARRELLRESHQHPAVKLLGQIPSIGPIRAALLVALLQTPHRFRTKRQLWAYSGFAVETHDSGEYRYVRGKLQRNRERITVRGLNDNHNKDVKNLFKSAAISASTRPGPLHDFYVARVEKGMRPTMARLTLARKIATITLTMWKKGVGFDPQNLQRQAA

SEQ ID NO: 513120 - protein, 339 aa, unidentified
MNNNGRLYVGVDVHEDESQLAVLEKEGSVLREERIRTKDLRRFLSSLPGEKHVAIEAVGFIHPVYESLSSIADCTVCVANPNKVRLISESTTKNDRNDARILADLLRTNYLPLAHMRDEETREKLFVVKDRVRYGIRRGNLRGTIRWLLKRRGIEIDRGKGAFNPEGRKRLRELHLREIDIRLDELELVQSTVKRLDAQIIDIVSRDERAKLLDTIPGVAPYTALYLACTLDDIDRFPDAKNACAYLGLVPWLDESADVTHRGHITKRGDKWIRRNMVECARVAVRDDPQIRAFYARVSYRRGGKKALIAVARKLVSYAYWMLKREMTYEELRCPCNGR

SEQ ID NO: 513121 - protein, 338 aa, unidentified
MEAYAGLDLHGDNVYCGISDENDKRLFEKRFPCDIETISKDLEPYRTCLKGVAVESTFNWYWLVDGLKERSFPVRLASPSGMEQYNGLKHGNDKSDSFFLAKMMRLGILPEGYIYPKEERAVRDLLRRRMRLVQIRSGRILSLEALWNRETGKELSSNAAKTLTEKDLEEALNDKHVRMSAKQMTEHVAFLDGQIKELEKLVLKQANLKAEFTGLLTVPGIGKILAMTIVMETGDIKRFPSPGDYASYCRTVNSELSSNGKKKGKGNTKNGNRYQAWAYVEAANFMVRHCPEAKAYFQRKMSRTLRVVAIKSLAAKIAKACYFIMRDGVAFDVKKMFG

SEQ ID NO: 513122 - protein, 315 aa, unidentified
MDAVIVGIDVAKDKLDVAVRPSGERLIVSRDEAGLAELRERLRKLQVAIVGLEATGGYETVVAASLSAAGLPVVVVNPAQVRAFAKALGKRAKTDPIDAAVIAHFIEATKPNVRPLPDEATRQLSGLVARRSQILAMIVAEQQRKKHRPNPRMLASIERLLAALQKELSDLDGQIREAIQTSPLWREKDRLMESVPGVGPAIAGRLLAEMPELGSLDRRQVASLAGLAPWTRQSGQWKGKSFIGGGRAGVRSALFMGALVAVQHNRTLKAFYERLIAAGKEKMVALIAVARKLLTILNAMLRDGEPWKEELEAHA

SEQ ID NO: 513123 - protein, 439 aa, unidentified
MVWTGRRFRTTPQDLDRLWAMLPEGTDPADLLVVMEPTRNAWVPLAAWFRRSGASVVLVPPERSADLRRYYAKHTKSDRLDSQLLARLPMLHPDGLYAEQSLGPGDALKRAAKLHSTLTHRRSQSLARLDALLEILGPAWHAAIGADLANRTPLKFLAAGYADPHVVKRLGRTRLARFCYRHSRGAWGEPHAAALLAAASETLELWSGGELDYPDLAEDIAIEARLALQLTEEIKDLDERTTLLLREADPSGILTSAPGVATITAAAILGRLGDPNRFTSLAGARAFTGLVPILDASGLNGRHGGPTKRGDAVLRQALFMAAGQARRIDPTLAAKYHRLMTEAGKHHNSALCHIATTLLTRIIACWRARQPYQLRDIDGTPVTIDQARTIIADRYTISKDLRARHRTTADTGTDRRNKRSPSAPSTGPSTTHARRAGAA

SEQ ID NO: 513124 - protein, 322 aa, unidentified
MNKYKETFGVDISKDVFDVHGSNKGHDQYKNDETGFKKFLKELPKSSLVVMEATGYYHYRLAQFLYKNGVIVSVVNPLSVKRFIQMKLAKVKTDKSDAKAICEYALVNEAPIYNALTDIQSECLQLFRLLDIYLKQRTATKNKIHGEAVLGIPSKFVYRSLIRNKKLLNKEVAAIESKILSLVKEDQQEQLTLLMSIPGIGQKTALFLIVVTDGFNKFENAAQLCSYVGITPTIRESGSSVRGRARISKVGNRKLRNLLFLCSFNACKHNRACREVYERIVNRGKSKKLALIAVANKLLKQSFAIAKSGRPYDETYVSILPR

SEQ ID NO: 513125 - protein, 390 aa, unidentified
MEARTVNNLPSAAAHDGAVRCFLAIELSKKSWVVAVNTPLSDKISLYKLKPCNWEQLLELIERIRKRVAQELKKPVEIISCYEAGYDGFWLHRLLEAQGVRNHVIDAASLQVDRRARRAKTDGIDVEKLLRSLMAYLRGEPKVWSVVRVPTVIEEDDRRLHRERSRLINERIQHVNRIKGLLAIHGIYDYEPMRPESIQRLQRLHTAAGHSLPPHLKAEILRELQRLELVLRMIETIEAERDAIALAKSKSRHTSAKKIQHLVKLKSIGPEFATVLVGEVFYRTFDNRKQIGSYVGLTPSPFQSGSTSRDQGISRAGNAKARTTMIELAWLWLRHQPVSSLSVWFRERVGERKGRIKRIAIVAMARKLLIALWRYLETGLVPEGAALKSK

SEQ ID NO: 513126 - protein, 355 aa, unidentified
MNSEKYIGMDVHQATISVAVMDSSGKLIMECILETKAATILEFIDGLSGTLSVTFEEGTSAAWLHDLLKPHVSHLVVCDPRRNALLKDGSKSDRIDARKLAALLHANKLHAVYHGEHGVRTLKELGRSYLTITKDLTRVMSRIKALYRSWAIPCGGTTVYAVRHRAEWLAKIPEPGVRLRAERLYQQLDLLQPVRQGARRDLTVESHKHHAVKLLRQIPSIGPIRAALLVALLQTPHRFRTKRQLWAYSGFAVETHDSGEYRVVRGKLRRNRERITVRGLNPNHNHDLKNLFKGAAISASTRPGPLCDFYVALVEKGMRPTMARLTLARKMAAITLTIWKKGVGFDAKQLNRQAA

SEQ ID NO: 513127 - protein, 426 aa, unidentified
MSERDYSKQVARRQRIGSTTLVVGVDIGCASNAVGFMNKEGRVLGSYPKMPNSREGFEEFVKITEGLKAKHGLSDVIIGLEPTGHYWRKFTYFAKGKGYEVRFVRTTALKHHRELDESSSAKSDKQDALTLTNITREGKYIDTVIEDGRMRHLRILVKVREKIQKRNVSAKNSLHAALDDYFPELKRIFWSMHSRGLWALLERCPFPEDVVTFKVSALKEMIGRASRRRAEASQKATALYQAAKESIGLRQIGNADRYRLKMCLEEVKRTELTIKDIEREIKRMLKDIPQAEYLLSIPGIGPISAAVFLGELGNPSSFPGARQVVKYAGYDPQESDSGYRVSRKFISKKGRWLLRKHLFLMSMRVVVLSRYFQEYYQRKLQTKNRVGQLPRKKEILCAVAIKLIKVIFALMRDQRNFVDTITDSVE

SEQ ID NO: 513128 - protein, 413 aa, unidentified
MTDKTNDSKHLTFVAIDIAKKSHDALIQFTNGRSVQMKIENTLQGYQRLWDESCKHGSAIRIGFEPTADYHRSIAHWFQQQGAQCHLVSSLSCARAREMLYQTWDKNDRKDTRVILYLLRQEMSRPFFDPLVHQTMDIQELSNTYHQVTIARTRCLNSLVNHNLTLYFPEAEQFLHNSRSEWFCDFLLKFPTPYSITRYRKATFVKRAWDVIGRKQFKQQFLEYLYDIAEKSIALPVDIKSVAVETYRMQLQRYIDLTRQRLELERKSEQFLSDRSDYQRLKTIPGVGTIIALIIIAESGNLSRFAHYRQYLNYCGFNLSALQSGQQKGSYRLSKRGNARLRYGYWLAANAAIRMKENSFRYKYERYIKINGDSADTKRKAYTAVAVKLARVAHSIVKNDMDYHGYHEVCRGT

SEQ ID NO: 513129 - protein, 384 aa, unidentified
MPRYLGLDLHKDYVHGCEWFVEDQKERHFRFANSETGWSKFISEELDQSCIVAAEVTGNAFEIYDLLLPHVNQIILANPVELKRYGSGRHTDLVDAAMLAKMLALGTLKSVWVPPLNVRDVRRLIQYRHKLAVQLHRCVNQAKAVLRRNGCQIPKQVDPRLYTNTADIKKLSGADQAILISSLRQVDSTKEEIKAIEAELAKRAIEIKEIKNLMTITGVGLITASVIWSSIGDASRFSNRKQITRYAGLDPSVHQSGEEYYHGHISKNGNHLLRSTLIEAANAVARFDNGSLGLFFRRKSIAMGRKKAIVALARKVLIVAWRMLLSGDKYIDIKDKTFKRKEQDLKSIATKSVDWTELLSETWVFGKDQSSNSSKEISLLKDSA

SEQ ID NO: 513130 - protein, 348 aa, unidentified
MENYAGIDVSLELSSVCVVDAQGKIVKEAKAASEPEALVAFFRSLGFAVKRIGLEAGPLSQWLHAGLKRAGFEVVLLETRHVKAALSAMTVKTDRKDARGIAQLIRMGWFRPVHAKSIASQEVRALLVARKQLLERLIDVELSMRGILRGFGLKVGPVTRKGFEARIRELVTGQATLERIAGAMLSARAALKAEYEKLHKAVLALVRDDAVCRRLMTVPSVGPLVAITYKSAMDDPYRITRSKSAGALFGLTPKKYQSGEKDVTGGITRAGDEMVRTALYEAANVLLSRITRFSKLKRWGMDVAKRRGSKRAKVALARKRKIAVILHRMWIDGTTYRWAAAEPTAAKA

SEQ ID NO: 513131 - protein, 267 aa, unidentified
MRIIGCDLHARQQTLAMLDTETGEVVNLTLMHEGNNVREFYSKLPPPALVGIEATGAMQWFLKLMEELGIECRVGHPAQIRAAEPRKQKQDRRDADLILKLLAENRFPAIWLPTKELLDLRALLLHGHQWVRMRTRIQNTLQAIALANGLRRGPSLWSYDGQAKIAFLPLPPHAAYRRNRLQAMYKTMESEIEKLNQQVAEQAESRSGARRLMTHPGVGPVTALATEVFLGDPQRFADSKALASYVGIIPREYSSGMEPIDPSGTCV

SEQ ID NO: 513132 - protein, 423 aa, unidentified
MMKLKYPICCGLDVHKNVIVATIVITNRDGVSEYRQKSFSTINPDIQKFHNWLIENNCYHVCMESTGKYWIPIFNYLEKDIEVCLTHPKYVKAIKGKKTDKKDSKWIADLYKFDLVRCSFIPPKDFRQLRELARYRFKLVCMKSSEKNRIQNCMTVSNVGIASVLSDPFGKTATEIMSYLLEHTADSIDEKAVRKLIKKGAKAKSDEIIEAIRGCNIETDQAKKLELALGHLEYLDGMITQTEVELYVRIKPYYEFVEFVSTMPGMTELSSTIVLAETGVDMNIFDDAKHLCSWCGLSPSNNESAGKKKSVRIAKAGAYLKPMMVQCALAAIKNKKQPYFAIKYGRIKKRRGHKKAIIAIARMMMVCIYHMVSEKKPFTPADYEELMKPQNHVERVVLNENNVFAYLESLGYDSSKLVKRNDN

SEQ ID NO: 513133 - protein, 421 aa, unidentified
MQKSLDEFAAFIGLDWADKKHDVCLSVPGNEGLEREVVPHRPAALEAWIARLRERFAGAPVAVAVELEEGPIVSALLEHDFIVVCPVRPGTVAGYRKTFVPSNAKDDPTDAELILELLLRHPEKLPPLKRESAPMRQLRRLVAERRAFVEDRVRITNRITAALKAYYPQVLGWFRDKWTDVFIDFIERWPTLQDAQRARRETVVAFFHGHNVRQKAVIDRRLEELHSERPLTTDAGAIEPARFMVQLLLPQLRAVCAAIEQFDVRIATLAQSLPDFELFDSLPGAGPALAPRLLTAFGERRERFPTAAAVQKCMGIAPVTERSGNKSWVHWRYACTKFLRQTFVEWTEQTIPRSFWAKAFYEKQRAKGSSHNAAVRSLAFKWIRIIHRCWLDRTRYDESRYLTALQKRGSPLLAFAVQQAQ

SEQ ID NO: 513134 - protein, 356 aa, unidentified
MSEVVTTEVIVGVDTHKLTHAAVAINALGARLGTMTIPVNGKGYQVLETWARSLGPVRAFGVEGTGSYGAGLHRFLCQRGHAVLEVNRPNRQLRHQKGKDDPLDAESAARAVLAGQATALPKSGTSTVEMIRHLKVARDTAVKGRTQAMQTLKAIIVSAPATLREQLDRLTGKMALLRHLVALRPGPLNSTTASAKTSLRAIARRWLALDEEIRGHDAHLEPLTQQLAPNLVRAHGMGAGTAAEMLLLVGDNPERIRSEGALAKLCGACPIPASSGKTSRHRLNRGGNRQANAALYRVVVVRMRGHQPTLDYVRRRTTEGKSKSEIIRCLKRFVAREIFGYLCRTPDVAPPAQTPA

SEQ ID NO: 513135 - protein, 356 aa, unidentified
MIVMKYYTTTTQFNCGIDLHARQMYVCVMDRDGKKLVHTNIKNNDFDYFLKLVAPYRHDLTVCAECMFGWYWLADACQAAGLHFVLAHALYLKAIHGGKNKNDRIDSEQIANLLRSNLIPPGYVYPAEKRPLRALLRQRLLYVWNRSELLARIQSHQLAHNRPTLRQNVYNREAWTGQLLASEADPVRQLALQNDLALIGHYDAQLAVLEKDLLKLTKQTAGRDFTLLQTTPGIGDYLGLTILHEIGDIGRFPTVKDFLSYCRLVKGTVASAGKIKGLRGAKLGNPYLRWAFGEAAIVAKRDGVLGPLAQRLEARLNNKFKANAVLAIKLARAVYFMLKNKTVFEPDRLVAALSRN

SEQ ID NO: 513136 - protein, 453 aa, unidentified
MQERQKRSVKQILEDLKTEIRSSQNTLLIAVDIGKMRNCACFVSSSGKVLRRRFFFANTIDGFNNLMRQTKFYQNKEKLPASLFGMEPSGYYWIHLYEYLDLQEKRVVTVSPLAVNRNRETINVSKDKLDPKDAYNISDLMRQGKFYFPIYRDKEIRQLKRFMQIYYRLITQKASLRCRLRGIVGYIFPELEHYFRNITAKSIIIILKNFPSPLQIRKLGKSRFVYFLKQKNPRLSRRRAEEIYEMARTSCGITGEEKAVFFEIKLLLSELRNLEENIARINTEVQAIVKDREDYQLLLTIPGIGAVTASSIIAQIGDITNFSSGKQLIKLAGLDLYSSESGISVHTLRHISKRGRKVLRTVLYQATVACIKCNAHLKACYLKLLANQPNKKKVKPKAIVAIACKLLRIIYRMLTEKKAFDFSYDEKLKRKFSSRETETISIEKLDLLQPLVC

SEQ ID NO: 513137 - protein, 367 aa, unidentified
MEVLYPRCSGIDVHKRFVVACLSIIQHGQRHKELRQASTMTSDILALKAWLKAAGCTHIAMESTGVYWKPIFHLLEDSFEIVLVNAQHMKAVPGRKTDVKDAEWIADLLQHGLLKASFIPGSEQQAVRDLTRTRMRLRKSRTRLVNRIQKVLEDANLKLASVVTASMGVTGQAILRALVAGEVDPERLAHLAQGSLVRKHEQLQAALAGKLTPHHHVLLAELLQLIATLDRSIAHLDREIAERLRPHDALIERIDAVTGLARRSIEVLLGELGWDMSHFPDAAHAASWVGICPGQHETAGKQHSGRTRQGNSFSQNGTHSGGSCGGAYPDLSWRTISPHQGATREQESRDGCRSQYPGDFLSHGQER

SEQ ID NO: 513138 - protein, 444 aa, unidentified
MKNKQVIALLNSSAYLSVGFDVAADFSWMSIALPNQTFVGKPFKVVHSDPQSRNLAIQKIKEAQEMYSLESRCFLESTGIYHIPLLCFLRDNGFDCHTINPIITKSSTNMNVRKLHNDRFDSKKIALVGLKADLKVSLLPEDDVVDLRNLVRDYYYFKDLQSAIVLKLTAELKMSFPEYCKVFSKVTTKCSLKLLETYPLASDILAAPRDAIIDLIHSTARFGEKYAIGKYNCLISAANDALVFGRSLSSNATRITTYVKMFKEYQTHLDEIMNSLHDCVDAMESSNRTIYDRIELLQSLRGIGFLSSVVLLAEMGSFDLFDSPKKLYAYFGMDPGVNDSGKFKGDRVHMSKRGSSLARRILHMIALNNLKVNKGSKNPVNPVIHEYYTLKCKSKKKNVAIGAVMHKICNIIFAMLRDNKPYEMITPEEHRKQFNRLNRTTKVA

SEQ ID NO: 513139 - protein, 345 aa, unidentified
MNKISVIGLDLAKNVFQLHGIDADGEVVVRKQLNRSQVRQFFARLEPCLIGMEACSGAHYWSRELTRLGHSVRMMAPAFVKPYLKSNKNDRNDAEAICEAVQRPSMRFVAAKTPEQQAILHLHHGRQLLVRQRVALSNHIRGVLSEYGIVVPQGVKVLSRQLPEILEDAENTLPMLARHLLAELKAEHDQLLERVDRCEQQLKAWHANSTVSQRLASIPGIGVLTATALAATVGEGQDFRNGRQLAAYLGLVPRQASSGGKDRLLGISKRGDGYLRSLLIHGARAVIHHIRRRMKAGRSGGNPWVEQLLLRCHVNEAAVALANKMARTAWVLLVRNETYCLTRPV

SEQ ID NO: 513140 - protein, 348 aa, unidentified
MLAELVEFVIGVDTHTDTHTAAVIATDTRAVLATLTVSADEDGYAELVALAETHGGLRGWAIEGTGGYGAGLTRHLDQLGELVIELDRPVRPARRAGAKSDAIDAERAARDALARTQLTQPKTGPERASLQILLTARRAAVAAASTAQRQLRALVITAPEPVRARFRGQTTREMLTTAARLRPATASADVHSFTALSTLRAFARRVRALENEAAEHERAIRAIVRAWRPDLLELSGVGPINAATVLTAWSHPGRCRNDAAFAMLAGAAPIPASSGKTVRYRLNRSGNRQLNRALHNIALSRLRYDPDTRAYADRRRAQGKTDRDIKRCLKRYIARQLYRQLESGAAAA

SEQ ID NO: 513141 - protein, 420 aa, unidentified
MRFIGLDVHKDFCVVAISDGGKARQAGRVKTRRDELELFAQSLAPDDKVVLEATGNAFAIARVLEPHVGEVVIANPRRVRAISHAKVKNDQFDARTLAELLAGDLLHPVWIPDEQTRVLRRLSKRRLAIVVAMGRHKAHVFAALQRNLYVEPQGTDLFGKRGREWMASLQLPRDERQTIAGDLRQFGFLASELKFVEREIAQIALAREDIKRLMTIPGVDMITAATMVAAIGDISRFPTSRHLVGYLGLDARVRQSGASAPRTGRISKEGSAQARRVLVEAAWSAKRAPGPLRAFGQRVQARRGSQIATVAVARKIAVLCWQLLTRGEDYAHHRPTLHRRKLRKLELRAGSPSQQGKHNANPIWETRTQDERERDLVAQAEASYERTVADWKASGPNGTGAAPGRALKAARQDQAPDPAL

SEQ ID NO: 513142 - protein, 367 aa, unidentified
MKKVSTAAAKATKNFSQPKLTIGLDLGDRSSWYCLLDEVGEVLLEQKLSTTPKAMREVFGSLPRCRIALETGMHSPWVSRLLSELGHEVIVAHARAVRLIGESRQKDDRLDARTLARLARIDPQLLCPVKHRSAKAQADLTLIRGRAGLVRARTALVNTARGLAKSYGERLRGCNVRNMNPEKAEGLSPELQAALEPLLNAIESLSERIGEYNERIETLAQKSYPQVALLKQVKGVGTLIALTFLLTLEDAHRFRKSRDVGCYLGLQPGRRNSGQSEAQMHISKEGDPYLRTLLVQGAQHILGPFGADSDLRRWGLKLAERGGKNGKKRAIIATARKLAVLLHHLWVSGEVYEPLHNSQQSPLAIAA

SEQ ID NO: 513143 - protein, 412 aa, unidentified
MQVLYPRCAGLDVHKDTIVACVRCVSAPLHQEVRSFDSTTSGLLALTDWLALHGCTHVAMEATGVYWKPVWHILEGNFELVLANAHHIRGVPGRKTDVNDAMWIADLLAHGLIRSSFVPPAAIQELRDLTRTRKQLVREIAQHSLRIQKVLEDANLKLGSVLSDILGHSGRAMLKAIVAGEHDPMQLAALAQGNARKKTAELREALRGHITDHHRTMLKLHLDIIAALEHTLAELDAVVGKALAPIRQRARLLTTIPGVSDLTAQVLLAEIGVDMTRFPDAGHLVSWAGLCPHNDESAGKRRSTRVRKSGTWLKTALVTAAWAAVRVKSSYLCAQFLRIKARRGAKKAILAVAASMLTAAYHMLRDGAEYADLGSDYFNRHDVSKTIRRLLKRLADLGCHVDPIAMPSSASE

SEQ ID NO: 513144 - protein, 353 aa, unidentified
MVHVGVDLHKRVSQIAVLSANGEVTQHRLENDRLQVQRFFEQVPAPARVAIEASGTWWWLVDLLEQLGHQPVLSHPKQTRAIAAARLKNDRVDAERLVQLLRGDLLPTVWIPPTAVREARELIRHRVSLVWERTGVTNRLLALLARRNLQPTSGQRWSTVRGQRELHGLPLTPIPTTIREDCLALCHLLDEQIRRLDQALVARWGDDVRVRRLVTIPGIGPVLAILVVLELADIHRFPSATHMASAIGLTPRVRASAGAVRVGPSSKEGNRLLRWALVVAATQAARRPGPLRTWVSAGPAAEGQKGRPRGPRPAARRDHRPGVEGGDRLFGGASSRWRAGVSPDDHLGLGPYS

SEQ ID NO: 513145 - protein, 321 aa, unidentified
MTYVGIDVSKLTFVVAYSSAKSSKTKTFKNTAKGIREFIKTISVDEHHCVMEATGNYSTLLVYMLSEFGFTVSLENPLKIKNFSKVMLSVIKSDEIDARLIALYGEKMQPSPYRMRSDSILVLKQKRTVLRQLKKQLVATSNLKGSMEVLPIYDSKCKKTIEKTIAFLGKQIKYMEEELASLANDEFKKQMDLLTSIKGIGVTLAAALIVATGGFTYFDNAKQLTRYLGLSPTYQQSGTSVNFKGHINRNGDPILRGQLYVAAFSSLRCNTECKACFDRLRSKGKPGKVAVVAVANKLVRQAFAVVTQDKPYVDGFISVKP

SEQ ID NO: 513146 - protein, 367 aa, unidentified
MKKVSTAATKPSKNVSQSNLTIGLDLGDRSSCYCVLDETGRIVMEQKVSTTPKALQAAFGAMPHSRIALETGMHSPWISRLLSGLGHEVIVAHARNVRLIGESRRKDDRLDAQTLARLARIDPQLLCPVKHRSARAQADLTVIRARAGLVRARTALVNTARGLAKSYGERLRGCNVRNMNPEKAEGLSPELQAALEPLLVGLESLSEQIREYNERIEKLAQESYPQVALLQQIKGVGTLIALTFLLTLEDPHRFRKSRDVGCYLGLQPGRRNSGQSEPQMHISKEGDPYLRTLLVQGAQHILGPFGADSDLRRWGLKLAERGGKNGKKRAVIATARKLAVLLHRLWVSGEVYEPLRNSNQRAMRAAA

SEQ ID NO: 513147 - protein, 448 aa, unidentified
MSESLTAASPEPEWAALAAIDWADQKHFWRLLPAGSAQAEHGEIVNTPEAVEVWAAGLQQRFAGRPIAVCLEQRRGALVYMLTKYPHLVLFPVHPTTAARYRETFAPSGAKSDPSDTASLLDLLARHRAQLRPLRPDTAETRLLQFLVEERRRTVDERTRASNRLTDCLKLFYPQILRWFDKVTSPLVGDLLERWPSLEQLQGAHPGTLKKFFQQHNCRAQELIAQRITEIRQAVPATKDPAVLEAGKIITRGLVAQLATLREQIALLDKRIAELVAAHPDGAVFASLPGAGAVLAPRLLVAFGTDRERYQSAYQMQCYSGIAPVKEASGNTVWVHSRFICPKFLRQTFHEFAEHSIGQSEWAKAYYDHLIQDEKKSHHAAVRALAFKWIRIVFRCWKDRKPYDEEIYMESQRRRRSLLGRTLGALGAATDARWNTIAGFQRFSKNNA

SEQ ID NO: 513148 - protein, 384 aa, unidentified
MQKPNDLNQSRIVLKQDSTLIAVIEMSLSSWLVAGIVPGVERQPLKKLAVDENALLKLLSRWREEAEKAGRRIGRITVAFEAGRDGFWLARWLRARGIEAHVIHASSVAVSREHRRAKTDRLDTELLKRAFLGWLRGERDHCKMVAIPTTKDEDAKRPNRERQSLVGEQTRIVNRMKAALIRLGIRGFNPKLKKAAGRLEDLRTPEGEPIPPNTLAELHRDMERRRLVSDQIRQIEEARLERMEQAPGDGPHAMVRLIARVIGVGIETADMLVHEVLSRKLRDRRAVARYAGLTGAPDESGSKRREKGLAKAGNARVRGGMIQLAWRFLLFQKDSALAQWYRTRTEAGRNRKTIIVALARKLLIALWRLVTTGEVPAGVVLRAA

SEQ ID NO: 513149 - protein, 334 aa, unidentified
MEQITTVGIDLAKSVFSLHGVDGAGHVVFRRTVRRDQLVGVVAGLSPCLIGMEACSGAHEWGRRFQEFGHTVRLMAPKFVAPYRKSGKNDGNDAEAICEAVTRPSMRFVPVKSVEQQALLAMHRVRQGFVVERTATINRLRGLLTEFGVVLPLRSITVRRQAAAAAENLPELARRAIGDLLEQLRTLDERIGGYDREIEAQARLCEPAQRLMKIRGIGPTTALAIVATVGNAREFKNGRQFAAWIGLTPSQYSTGGKARLGHISKRGDAYLRNLLVQGARSVLNSAGMHQDRMSRWILELQPRRGYYRTLVAIANKNARIAWALLAKNETLRPA

SEQ ID NO: 513150 - protein, 290 aa, unidentified
MYDGSVGAVRRVDNGPEAIEGLLAGWSSSDVFVLFEATGRYDKALRHALGAAGIAFARVNPARARDFARAAGFLAKTDAIDARMLAAMAQCLRPGADGMADPAREQLAELHKRRDQLVAFRKQERTRLKGAKDLAASLSAHIAWLDAEVRNFDRQIATLIAQQQALHNARRLMQSVPGIGPVCSATLLALMPELGSRSPKAIAALAGLAPFNTDSGKFRGTRRIHGGRRRVREALYMAAVSVTRTRSRFAQTYQALRKAGKPAKVALIAVARKLLLTLNAIIREQQPFRA

SEQ ID NO: 513151 - protein, 411 aa, unidentified
MRRVIGMDIHRTFAEVVFWESGKLRPGGRVSMTRAGLEGFGGSLDKEDEVVIEATGNAMAVVRVLAPHVARVIVANPLQVRAIAHAHVKTDKIDAGVLASLRAANFLPEIWLPDADTERLRRLVARRNQVVRHRTRIKNEVHAILHAYLIPPCPHADLFGRLGRIWLAQQVIPDDERAAIERHLRELDRLGDDLGVLDREIAQAALNDPAVKRLLTITGVNLIVAAGLVAAIGDVRRFPNHQKLVSYVGLNPRVRQSGLGLAQHGRISKRGRSHARAMLVEAAWAAAKAPGPLRAFFLRIRARRGHQIAAVAVARKLAVLCWHLLTKDADYQWARPALVANKLRAMELQAGHPVRKGNKRGPAYAYSIKELRDREIELARHAEQAYERFVSRWQRHGNKKQRTGAANEERR

SEQ ID NO: 513152 - protein, 387 aa, unidentified
MTEIRCLVTGGVDAHSDSHHAAALDERGRLLGDSAFATSAEGYQELLAWLESFGQVARVGVESTGSYAAGLARFLAARGVAVVEVNQPHAHTRRRRGKSDPLDAEAAARKVLAGEAAGVPKHTGGIVESIRQLRVAREGAVKANTAALNQLYELVITAPDELRQQLAARKTSRGKASLCLRLRPDRARLHEPLQAAKLALRSVAERVRDLDRQIGLLDQDLAPLVATAAPRTMSLLGVSTQHAGQLVVTAGQNIQRLPNDGAFARLCGASPIPASSGRTSRHRLSRGGDRKANRALHLIAVCRLRYCARTRAYANRRTAEGLSKPEIIRCLKRYIARELYHTLRADLADLNLSAASAQQAVTINCGAGPIGITLTRSTTSRRRRRRT

SEQ ID NO: 513153 - protein, 410 aa, unidentified
MEKVEKVPTRFIGLDIHKEYFVAIGVNAMREVVFGPEKSSVYQMDDWILRHLTRSDAVVLEMTANAYLFYDTLLPYVHSVIAVHPQHVSLVTNAPVKTDKKAALALAQLHAAGLLTGVWIPPQKVRDLRAIVAQREKMVRLSTMAKNRLHSVLHRNHLVLPVKPFDIEQRTWWESLHLSSTELFRLKSDLDTLAFAQKQIEQIEAFMKQDCAQDNRIPLLVQLPGVAMLTAITILAAIGDITRFPGAKELVGYAGLGTRVHNSGMTHTSGRITKTGRKDLRQAMVNAANNAVQNHKHWKKELERMELHLGRSKAIVAIARKLLVAVWHVLTKESADRFADPCDVACSFFRFAYKVGVKNLPDGQSALVFTREQLDRLGIGKDLQEIPWGSMRHKLPTSKLLPEISERCPK

SEQ ID NO: 513154 - protein, 389 aa, unidentified
MLCVGIDVAKRKHDCCIIDSDALKTVESFTFPNSREGFDMLLSKISELGIPKDKIRVGLEATGHYSSNLAHFISEHDLPLLTFNPLLTNRYKQGFSLRKTKTDKVDACAIAQMIVSGKGSQTYSSSLYHNEEMKSLSRYRSQTMQKCSKLKISVSRLVTILFPELEGLTSSIHLASIYALLKAYPGHEQIAHCSMKQLTRLLSDASQGRFDKSKALEIHQAACRSIGKVSLSASMELVHAITDIEVLKQHIAEIDEKLKEMVDQEESSIIDIPGIGYTLCASILGEVGDFKRFPDVDKLLAYAGMSPSKHDSGDYHSKHNKMEKRGSPYLRKTLYLAARLVAQNVPRFKEYLEKKLSEHKPYKIALSHVAKKLIRLIYRLGISGCPYLA

SEQ ID NO: 513155 - protein, 334 aa, unidentified
MSTSPPTSCCVQDSCGPLHVGIDVAKEKLDLARSDSDEVGVFGNDAAGITRIVELLNAAKPATIVVESTGALERPLLEALLGAGLPVALVHPGRVRYFAKGLGILAKTDRIDARVLVEFAKKAAPRLAERRSKNQTELRDLVACRRQLTAARTQQSNRRQATFSKAALRSIDAVLKAIDKQIGSLDKQIRDLIDADDDFKHMDKLLRTVPGVGPTLSATLAADLHELGEADRQQVCALAGVAPFPDDSGTTIGKRSIRGGRTDLRGVLYMATLAAIRANPVIKHFFQRLRAAGKIKKVAIVACMRKLLSLLNAMIRDDLSWDQLNVVKNLATTH

SEQ ID NO: 513156 - protein, 424 aa, unidentified
MIQNDDSRLEEFRQLKNEIRGSMQHLAVGIDIAKERHNAFFGIASGKTLLRSLVFDNTKEGFEKLCLYAETFKTQMCLTKVVFGLEPTADYHKPLGEYLIRHGHMTVLVAGTAVKKNRELLDGRWDKHDTKDAANVADLIAQGKCLFYEFPLPDIRELRNLLSLKRRLKREEQGYRVRIRNHLIAQYFPEMDHYFGYGEGPRITRWCLDPRELARLPFQEFVHMVSSRSGGEKQRRRLWEIHQKAPSSIGCTAHAAVSFEARLLLEGLQHIHLMIQEADKKIAEVCTRFPEYPCLLSIPGFGPDVSAKVLGAVSNPHRFDNARQVLKTAGLDLSAQRSGKKTDVTPVISKKGKADLRYALYQAALIASSRNDHFMRYFTKKLTGRERERGIKRKMRVKLSAKMLVIAWTLMKKKEMFDPECIGK

SEQ ID NO: 513157 - protein, 369 aa, unidentified
MDKDTTYVALDDSKRKIVAGILRPSDTQPELREIANDARQIRRLFERLKREGPVAACYEAGVSGYDLHRQITGLGVACAVIAPALTPRRPGQRIKTDRRDAAKLVRLFRAGELTAIHVLDESEEAVRDLVRCRDDIRRDVLRWRHRVLKLLARHGHAYLTGKNWSHAHWRWIREQRFDLPPLQRAVEATVFALEQALARQAELDKELEALAATAPYREPVGWLRCFRGIDTLSAIILLAEVVDFQRFRRPRELMAYLGLVPSEYSSGETQRRGALTKAGNSHARRVLVEAAWHYRHRPTIGRALANRSQGQPDEIVSHAWRAQQRLHRRYRHLLGHGKRTPVAVAAIARELVGFIWAAMTRHESRRQAA

SEQ ID NO: 513158 - protein, 412 aa, unidentified
MEVMYPCCCGLDVHKKSITACVLWAEVKGKSRKEKKRFGTFTHDLLQLADWLEQCGVTHVAMESTGVYWKPVWNILAEQFEVLLVNAQHIKAVPGRKTDQKDSEWIADLLQHGLLRGSFVPPQPIRELRDLTRYRVSLVQEINRIANRIQKVLEDANIKLASVATDALGASGRAILEAMLAGEEDAARLAEMSKGLLRNKIPELKLALEGRMTEHHRFLLRQLFAHLRFTESKRSEIEQEIDKRMRPFEDKVIRLCTIPGVDRVTAWGLLAEMGMNMNQFPSSGHLASWACLCPGSFESAGKRLSGKMRKGNVSLRRCLSQAAWAISMMKNNYLSALYRRIAARRGAKRAIMAVAHALLEIAYHMLKRKEDYRELGADHFDRIDVNRIRRSLVRRLERLGHRVTLEPLAQTA

SEQ ID NO: 513159 - protein, 387 aa, unidentified
MVQINDLSRSLAAFDPISTLVVVVEMSKASWLVSGVVPGVERQPLKKLEPDATALLRLIERWRNEAVRAGRPIRRIALAYEAGRDGFWLARWLIARGIEAHVIHSASVAVSRERKRAKTDRLDAAMLMRVFLGWLRGERGHCGMVAIPTMEEEDARRPNRERESLVNERSRIVNRMRSALARLGIRGFKPHLRKAPERLAGLRTAEGTGLPANIIEEFRRDMARLALVREQISSIEKTRAERLERAPDTGPHAMVRLLARVIGIGIETADMLVREILSRNLRDRRALARYAGLTGSPDESGLKSREKGLAKAGNARVRRGLIQLAWRFLMFQKDSALAQWYRTRTEGPSGARKTTMIVALARKLLIALWRLVTTGEVPDGVELRPAA

SEQ ID NO: 513160 - protein, 355 aa, unidentified
MHKDTITVATLLPGRDTAPDTQIFPNTPEAIRQLVKRLNPRRPLAAVYEAGGCGYDVYRQLTKLEVACAVCAPALTPVRPGDRVKTDGRDAIKLARLYRAGELAIIAVPTPSHEAARDLVRTREDMLGDRVRARHRVTTFLLRHGFPWRRKAWGTIHRNWLATLHFELLAQQETYQAYLRGVEEVDARLESVNVVLQRVAAEAPWAELVAALRCLKGVDTLGALTLAVEAQSFQRFPTARAFMAYTGLVPSEHSSGAHGYRGGITKTGNAHLRRILVECAWCNRYPSGANATVLARRKGCPPAVVAVARKAQVRLRRTYARLILRGKPHPVATVAVARELAGFVWAIGRLVVMPA

SEQ ID NO: 513161 - protein, 336 aa, unidentified
MYYVGLDVHWKQSTFCVLDENGRKMSSRTVHGSWDKVLVALSCVKKPFAICFEASTGYGYLYEKLRELAVRVVVAHPGKLRWIFRSKRKNDRIDAEKLAKLLFLGEVPPVYVPAAEVRAWRGMIEHRSGLLADRTRAKNEMRALLRGQGIVAPKGLWALKGLAWLRGLKFLSGFDAVRRDTLLERIVSLNKMIELVEAELAKVAATHPGVQLLLSVPGVGIRTAEAVMAYIDKPERFRSNQSIGEYFGIVPCQDSSAGQNRLGHITKQGPTTVRRLVTEAAWQAVRRNAQVRAKFERIMAGDNDRKKIAVVAVAHYLLRVMLAMLKSGEAWREQAA

SEQ ID NO: 513162 - protein, 363 aa, unidentified
MKIVGCDLHARQQSIAMVDTKTGVLTEKVLKHEGNAVREFYAALEGPVVVGIEATGAMQWFLELLEQLGIECRVGHPAKIRAAETRKQKHDRRDAEVILDLLLMNRFPDIWMPSSEQRDLRTLIRDRHQWVKMRTRLQHTLQAIALNHALREGRALWTAAGRRSLQDLTLPKYTAQRREELLSLYIQLNKRIQQLDKQVETEARQRPPARRLLTHPGVGPVTALATEVFLGDPHRFAGANQVASYIGMIPCEHSSGKRQRLGKLSKEGNSLLRYLWIEAILHAAVKDPELKRFYRRKLVQKGMGKARVATARKLGIRLWIMLRDEIDYEEFCRRGKLPQKGKTHAGMPDYNSGPARAVTGSTE

SEQ ID NO: 513163 - protein, 339 aa, unidentified
MQLTPVGVDIAKSVFQVHHVDPETGEIVNKAIKRAGFLEYFANRLPCLIGMEACGGAQHWARELVKLGHEVKLMPARLVKAFNIGNKSDAADAKAIWLAVQQPCKAVAVKTEDQQAVLAMHRVRQQLVKIRTMQINALRGLLTEYGEVMGASRAALNKGMPGALEKLADRLPAMLIETLRERYSELAKLDEQIGRIEQRLKVWMRRDKACQAIAEIPGVGLLTATTAVATMGDAKVFRSGREFAAYIGLVPRQSGSGGKVNLLGISKRGDTYLRTLLIHGARSVLAHAKESGAWVEQIRKRRPPNVVTVALANKMARTIWAVLAHERKYDKGYVSAAAA

SEQ ID NO: 513164 - protein, 385 aa, unidentified
MTQAAPISSIIPRDYDIFGGLDVDKKSMAVTFRDHGTMRKSLKLPYSASQLLNYTRKHFPGQRVAFVYEAGPTGFGLHDELTAASHPCLVVSPAMVPTAPGQRVKTNRLDSNKLSEGLRGGQLRSIHVPTQSYRELRHLVQLRDTQVAQLTATKCRIKSLLLYEGIPFPAANGRWSGQALRQLEALPCSAAVRFKLDRLIDALQFHFQSAAVVQKEIRRFCQNDPELKQCISFLTSLPGIGSITATHALARLGDWRQIENVRSIAGFLGLVSSEHSTGDQENRGSITRSGDSRLRNKLIQCAWVAINKDPELRAFYRRVYERHPRKVAARKAIVAVARKMTTRMYAVLKEQRPFVIRADNSIAPLTAEETVGPRERLDGAQTGQQ

SEQ ID NO: 513165 - protein, 410 aa, unidentified
MEVMHQRCAGLDVHKKTVVAAVRLVEGNKVITEVRTFATTTAGLLALADWLTQNGVTHVAMEATGVYWKPVWHVLSDGEIELVLANAAHVKNVPGRKTDVSDAVWLAELLAHGLIRASFVPDSQTQELRALLRTRKQLVRERSRHIQRIHKVLEDANIKIDAELSDILGKSGRAMLNAMVAGETDPVRLAALAHPNVKSPQAKLAEALRGRVTRHHRFLLQLHLQQIDGLDASLGMMDGEIETNLAPFRTAVELVTTHPGISELSAQAIVAEIGTDMSRFATAGHLLSWACMCPRNDESAGRRRSNRLRKGAQWLKTTVVQCAHAAKNKKGSYYQAQYLRLRSRRGPQKAICAVAASILTAIYHMLKNGTVYQDLGADHFNRRSKITQTQRLVKRLEHLGYAVEIQPLAA

SEQ ID NO: 513166 - protein, 348 aa, unidentified
MAHFVGLDVSVKETSVCVVDDVGKVILEQKVPTEPSDIIALLASLGVPFGRIGIEAGPLSQWLVNALTAAELPVICVETRHMKALLTAQQINKTDRNDARGIAQMMRVGLFKPVHVKTLAAQEQRMLLTSRKLLQRKLLDVESDLRGTLRNFGLKVGAVSRSRYEVRIRELVEGLPRLAAIVEPLLSVRRVMRQQVAVLHKMLLDTVRGDPVCRRLMTAPGVGAVVALTYRATVDQPQRFVHSRAVGAHVGLTPKRYQSGEIDYDGGVSKCGDALLRTMLYEAAQSLLIHSGKWSWLKAWGMRVAQRRGIRRAIVAVARRLAVVLHRMWVDGSEFRWGKDSAAAPTVA

SEQ ID NO: 513167 - protein, 307 aa, unidentified
MRAAGIDVGKANLDLAVEGEPTVARFANSRAGIAKLVRRLQAADVGRIVVEATGGYEESLLEACCDADLWIARVNPRQARDFARATGELAKTDVIDARLLALMASMFADRLRRYVAPPPWQRELREWVRRRGQVVVLLQAQKQQAAMAAPAVRKLATRTIAALARELAAIEKTIKELIDQQASPALRSTKGLGPVFQATVLALLPELGRLDRRQIAKLAGVAPMNRDSGQGQGKRRICGGRAQVRVALYMATLSAVRWDPVMKAHYQQLRARGKLGKVALVACMRKLLGIVNAKRRDELRIEGLALA

SEQ ID NO: 513168 - protein, 420 aa, unidentified
MQPANTTFIGIDWADKKHDFHLVDPDGKIQFGVFEQTPKAIAGVVEAWRKAAPDANIVVAIEATKGALINALLEFEDITIYPINPAAMASYRKAFAHGGGKNDVVDAKLLAQYLIHYIDQLKPLEQDQPLTREIAAMSEDRRRLVDQRADLANELTAVLKTYFPAILLLKAAKPYAAFVLTLLLKYPSLELIQKAGGHKLRKLFLALGLKKTTSEVRIEILVSAIPLTTNSTTIAVASRRVLDLCEQLLLLNKLVKRLDNSLEGLVSKHADYKVASSFPHAATATQARLIASFGDDRTRYPTASSMSTYSGIAPVTIQSGRMKVVRSRWACPKFMRQTFHEYAGQSIKGSGWAKAYYDVQINRGKSKQTARRALAYKWQRIMHKCWASGTPYSEDQYVERLRATGSPIIAMLDKSSEIAA

SEQ ID NO: 513169 - protein, 438 aa, unidentified
MSNKVIFNLDELFISVGIDVGADFSWMSIALPNQQFVGKPYKILHNSIDSLTTAVSKIKEAEELYSLESRIFLESTGIYHYPLFCYLRDKGFNCSVINPIITKNSTNINIRKVHNDRFDSKKAALVGLKPDLKVSLMPSDLALNCRNLCREYYDLMDNRSAYVNKLQGELRMVFPQYLGIFSKVTINTSLTLLETYTSPSAFLEADKQEIIDIIKSTARFGLTYAQNKYNAIIQAATDANQFGYIIDSNIKRIRLYISFIRKYDEEINNILESLHELVDANEDADFVKQIHLIETFKGAGFLSAVSIMGEIGDFSAFSKPKQFFAYFGLDPAVKQSGKFEGTKVQMSKRGSSIARRVIHTLALQSISISRNGKAKNPVLREYYLQKCDSKPKLVAMGAVSHKVCNMIFAILRDNKPFEIITPQEHIKQYNAAKCDIAA

SEQ ID NO: 513170 - protein, 413 aa, unidentified
MSIDWGDKKHAWCLQAAGSEQRESGELEHTPEAVEAWVGQLCQRFSHRPIAVALEQSRGALVFMLSKYAPLHLFPVPSTMSANMRKALYPSGSKDDPRDADLLLELLLKHRDNLRRLSPDTEATRRVQNLVEERRKLVDEKTAQTNRLTSDLKIYFPQVLDWFERLDTELVCDLLERWPTLEELQKVPLAKLRTFFRKHYCRDEELIERRLLAIRQAIPAIRDRAVIEAKSMVVRVMVQVIVSLLEGIADLDKKIEEAAAAHPDFFIFDSLPGAGAGMAPRWLAAFGSQRERYGSAGEVQTYTGIAPVLEKSGKKKWVHFRWAGPKFLRQSFHEWAGHSIAQSVWARSYYQQLRSRGNGHHAAVRALAFKWIRILFRCWKDRVAYDENKYLAALARRGSPLAVVNVAIAGKGQ

SEQ ID NO: 513171 - protein, 401 aa, unidentified
METVRDNAVRVKRFRELKATLRTDRSRLLVGIDVAQAEHVIHLRHAHTRVVVPRLTIPNTTRGFTQLWTRIQQAQRATRCREVVCALEPTGTYHQAIATFLETQGADVVFCSSSVAYWNRRTQDGTWDKSDPKDAANCVDLLEQGKVLFYSQPTGPLAELRHLVKCLRRARTELAACKARWRTTLRPALAPMGESLPQRLWAELPAMLQAWERAAPGRPAMPKGRLSLGLATACADLGAQVTAVQARIAVLEAACTPLAERLPAYPLLRSIPGVGATVAAVLLAEIGDIGWFTQFSQLRKLAGLDIVRVQSGQYAGQQRISKCGRGLLRWALYHAAVGAARTAGGRARLAALKAKRRGDRFAGFKAIVELAAKQLRVIWGVWRSGTPYDPTRAGGLRRQRR

SEQ ID NO: 513172 - protein, 426 aa, unidentified
MKEHIDYLSTLFVGIDIASRIHVISALDFNQDFFIKMKPFENTKEGAGIVEKMIADVLADNHQFKYVVIGMESTGFYGVHLANYLSTSELLAPFSVRVYCLNPKEVKNYKKSFNDIGKNDGIDSFVIADFARVGRIAIKPWRGSQYLALQRLTRHRMHITECITREKTYMLNNIYLKFSEYALLRNGEHPFSNKYGATAEAILTEFTTNEDIVNSSIEELVEFINSKSKGRIAYPEETAKIVQAAARNSYRLDKCLYEPLTISIASSFNCISSFEKELKAIDKAILQTVQGLNPEEYTVLNSIPGIGKVYSAGILAEIGSIKAFQNANQLAKYCGIVWNDNDSGDFESEDSRMSKAGNRYLRYYIIEATGSVISHCPEYKAFYQKKYAETRNHQHKRALALTSRKFIRLLFGLLDKGQLYSPEKGR

SEQ ID NO: 513173 - protein, 338 aa, unidentified
MKYKRIAIDTSKHVFTLHGVDAQERAVLRRNLKRAELETFFSKLAPTEVVMEACGGAHHWGRVLTRLGHRVRLIPAQYVKPFVKRAKNDRADAEAISEAAARPSMPSVAVKSAEQQADSMILQHREMLIAQRTAAINALRGHAAEFGVIAAKGTAQVEALLHKLANEDAVPVVAKAMFAQMGTHITSLTQQIEALEKKLLALHKADPVSQRLAAVPGIGPITAITLSLSVAPEHFTSGRHFAAWLGLTPKEHSTGGKPRLGKISKAGNERLRTLLVVGATAVIRHAQPGRKGASQWLLGLLTRKPRKLAAVALANKMARIVWAMMARSEAYRPQPVAA

SEQ ID NO: 513174 - protein, 402 aa, unidentified
MKEDIVKTIAEQTKAARVVVSHADRYAAYVGLDVHKDTIAVAVALPGRDEPLYRGEIANEPRKVGKWLDRLSAEFDGVMLQFCYEAGPCGYGLYRRLLAAGHDCQVVAPSLIPKKAGERIKTDRRDALKLARLLRAGELTAVWVPDAEQEAMRDLTRAREDMKGQERKARQQLNAFVLRHGHHWPSGKKRWAQPHFNWLESIKFEQPWLQIVLQEYIDAVKAATQRVADLTDQLMQALPSWSLAPVVDALVALRGVDKLAAIVLLAELGDISRFESPKQLMAYLGLVPSEHSSGGRRRQGAITLTGNSHARRMLVECAWSYRFPARQTMHLKRKAQNASEEARQIAWRAQKRLCGRYRQLTQAGKNTKLVCVAIARELVGFIWDIVRHEMPRVMAKSGSVAG

SEQ ID NO: 513175 - protein, 411 aa, unidentified
MLVLFIGDDWAEDHHDVEVQDATGRRLAAARLSEGVEGIAKLHTLIARHGGEELEPGQVTVGIETDRGPWVQALIAAGYRVYAVNPKQAARFKERYGTSGAKSDKGDAHALADMVRIDGAQLRTVAGDSGQAQAVRVVARAHQTLIWERTRTFQRLRSTLREYFPGALTAYAGLELTSTDALELLIKAPTPGEAAKLTKQQITAVLARHRRHHRDQKARAIQAALREPQLGVTAPVAAAYGAAAVAHAKLLITLNEQVAALEEQVSAHFRAHPDAEIYLSMPGIGEITGARVLAEFGDDPTRYTSAKARKNYAGTSPITRASGRTHSVQARFARNDRLADALQRQAFSAINTSPGARRYYDKQRARDSGYNPALRQLGNRLVGILHGCLKTRTHYDEATAWSHHATPTTAA

SEQ ID NO: 513176 - protein, 455 aa, unidentified
MYLPDWKWIPIRKGLLLMSNKVIFNLDELFISVGIDVGADFSWMSIALPNQQFVGKPYKILHNSIDSLTTAVSKIKEAEELYSLESRIFLESTGIYHYPLFCYLRDKGFNCSVINPIITKNSTNINIRKVHNDRFDSKKAALVGLKPDLKVSLMPSDLALNCRNLCREYYDLMDNRSAYVNKLQGELRMAFPQYLGIFSKVTINTSLTLLETYTSPSAFLKADKQEIIDIIKSTARFGLTYAQNKYNAIIQAATDANQFGYIIDSNIKRIRLYISFIRKYDEEINSILESLHELVDANEDSDFVKQIHLIETFKGAGFLSAVSIMGEIGDFSAFSKPKQLFAYFGLDPAVKQSGKFEGTKVQMSKRGSAIARRVIHTLTLQSISISRNREAKNPVLREYYLKKCDSKPKLVAMGAVSHKVCNMIFAILRDNKPFKIIAPQEHIKQYNSAKCDIAA

SEQ ID NO: 513177 - protein, 433 aa, unidentified
MDNEFVAYVAIDWADRKHAWALQVTDGSPRESGSLDHSPEAVDIWAAELRLRFSGRLVAVALEQSRGALVFMLSKYQHLVVFPVHPTALANYRKSFRPSGAKDDPHDAGLLLDILLRHRDKLRRLNPDTVETRTLQFLVEERRKLVHEKTRYSNRLTAHLKLYFPQVLKWFDDIGSRIAADFLLRWPDLETLQRARSATIERFFLEHNSRSMERIRERLEQIRKAMAATNDQAVVSCSSAAVVAWAGLLRQLLEAIQEYDERIDRLAHQHPDYAVMNSFPGAGPVLTPRLIAALGSQRERYQTAHEVQCYSGIAPVVATSGKQRWVHWRWACPTFLRQTFHEWALHSIAHSPWAQEYYQEQRAKGKSRHTAIRALAFKWIRILFRCWKDGKPYDELAYQRVLAARRPKPRADEAVELQWKSVAGFNKITNARA

SEQ ID NO: 513178 - protein, 317 aa, unidentified
MTKIICGVDVASKKLDARIGPEGPFETFDNDAEGVSALAAFCRKHNAWLVVMEATGGYERQAFAQLWGLGLQAAIVNPRNVRDFAKAMGRLEKTDKIDAGMIAWYGEVRKVRPAPPAPATQQRLSALVLRLGQLTSQQTAQNQQRRGVTDACVLSTISAVLAVIARQIRTLEAEIAKQIEADPLWKTLDAAFRTLKGVADRTVARIVARLPEIGLISGKAITKLVGLAPIARDSGTSKGKRPIRGGREDVRAILFVVAGLVARFDPDFASFRDRLLAAGKPKMVVRIALAHKLLVRLNAKAREARDEYARRTAALAA

SEQ ID NO: 513179 - protein, 376 aa, unidentified
MEHDSTLYVGLDVHKDSITVAYALGSGEVEVLGKIGTTKADIERLCKRLQSKASRICVVYEAGPCGYGLYRQLVQKGFDCIVCAPSLIPRKPGERVKTDRRDAVKLVRSLRAGDLSAVYVPTVDDEAFRDLARAWVSAKDDLKRARQRVKAFLLSHGVRYTGRADWGPAHRRWLSAFSFDSLWQQLAFDELRRTIEDRLAQCARLEAALREAVVNWRFYPVVLALQTMRGVQFTTAVGILAELGDLSRFAHPRQLMAWLGVTPSEHSSGDKRRQGSITKNGNSYARKLLIEAAWSYQHPARVSPEIQRRHEGIPKPIVDRAWDAQVRLCRRYRRLVARGKQKNIAVVAVARELSGFIWDISRLAMSLAIPREELTA

SEQ ID NO: 513180 - protein, 341 aa, unidentified
MEKATIIGIDLAKRVFQVHAASKDGRPLLRKKVSRAQLLGFLAKQPPTIVAMEACATAHEWGRAISSLGHDVRLVPPIYVKPFVRRQKNDAADAEAIAEAASRPTMRFVALKTEEQQAQSMVFRTRDLLVRQRTQLVNALRGHLAEHGIVAAQGLAQVKVLATAMQDTGSLHPLVRELGQRYLDHIARLDADIAELDKRLRQPSKDNETAKRLQSMPGMGPITAAAIEAFAPPMATFKRGRDFAAWLGLVPRQHTTGGKPRLGRTSKMGQRDIRRLLIIGAMTVVRWAVRKGAAKGSWLARMLAHKPRLVVAIALANKMARSAWAMLSKGEDYRGSALAPA

SEQ ID NO: 513181 - protein, 349 aa, unidentified
MKIIGCDFHPSYQQIAMLDSVSGEIVEKALSHERKEEVRTFYAGLEGSVRVGIEASGQSQWFERMLAELGHEVWIGDAAKIRASCERKQKTDRRDAELLLRLLAEDRFPRIWVPTAVERDARQLLLHRHKLVRLRTQVKNQLQAQALNQGVQRKRKLWSEAGRKQLESLPLLPWASRRRAELLQLLDQLEASISELDRAVAEQASARPAARRLMTHPGVGPVTALAFALTMGPTERFQRGKQVASYLGLIPSEHSSGGHQQRLGHISKQGNPFLRGLLVEAAQSAVRYEPEMRRAYQRLAQRKCRALAKVAMARKLAVRLYWMLRLQVNYAQLIQGSHAGQSGTFCGRS

SEQ ID NO: 513182 - protein, 329 aa, unidentified
MTNLDQHGKVHLGIDVSKRTLDACILPEDASQEGESFVVTNDQEGVEEEILSRLAKLGTSVELAVMEATGRYERLAATMLAANGISVAIVNPRQARDFAKAIGKLAKTDKIDSFVLARFARAVEPRISVIPDEEAQRLQGILARRRQLIDMLVSENNRTRMAPKALAKRIRAHIEWLEKEIERIDADLDRAIEDNAAFKANEALLRSVPGVGRVLSRTLLAELPELGTITHKRLCALVGVAPFNRDSGQRRGKREAWGGRAPVRAVLYMSALLVATRHNPHIKEFYERLVAAGKPKKVALVACMRKLLSILNALMRDRATWRCPHALTP

SEQ ID NO: 513183 - protein, 358 aa, unidentified
MAVIEGVCRIVGGVDTHKDLHVAAIVDEQDRIIGTRSFATTRQGYRQMLAWMRSFGELQRIGIESTGSYGAGLLRFMQQAKVTVLEVTTPDKQDRRRRGKNDDLDAQNAAHAAFAGQRTVTPRSRDGMIESLRVLMACRKTAVSARRVALQMIHNTIVCAPDGLRDQLRNLTRMQLVRTLASWRPDLTAYRDLDSAYRIGLKSLARRYLELHDEIADLDAMIAAIVDELAPNLVARNSIGHTGAAQLLLTAGDNPERLRSEASFASLCGASPVPASSGRTVRHRLNRGGDRAANSALHIIAIGRLRTDQRTKDYVARRLAEGHSKLDAIRALKRYLAREVFTLITQRRKEINATRIAA

SEQ ID NO: 513184 - protein, 354 aa, unidentified
MSNPNRWVGVDLHRRRSQIAAVDEHGELTLSRRIVNDRDTFRELLGDPDGTHVALEATYGWEWLAELLQEAGYDVHLAHPLRTRAIAAARVKTDAVDAKTLAHLLRTGLLPEAYIAPPELRDLRELLRHRAVLTRMRTAVKNRVHALLARQGILPEHSDLFGNSGREFLAGLELPDGSRNRLDSLMSLIGDFDREITTTTREIDARAKADDRVDVLCQIRGVGRYTAMLVIAELGELTRFPTARHLCAWAGLAPSVRSSDGKARLGHISRQGSPALRRALTEAAQKIPTGGGPLRATFERIAKRRGRNIAKVAIARQILTLCYYGLRDGEIRCLKGQQPDIDDHDHDNELAEVA

SEQ ID NO: 513185 - protein, 322 aa, unidentified
MSLPALGIDISKEKFDVVLLLQDETLRKSFTNNQKGFKQLQDWLKKKSIQTVHACMEATSHYGDELALFLYKQEHQVSVVNPARIKGHAQSKMVRNKTDASDAFLIADFCATQKPGIWTPPSEEVRHLQALLRRLETLQKMKQMEENRLESLSKEKEILCSIKRIISSLNKEIERVKKAISSHIDNNPRLKKEHELLTTIPGIATTTAAWLLGEIELHNFKSAKEVAAFAGLSPKRNQSGSSLNGKTRVCKIGNKRLRKILYMPAIVAKRFNPIVKDFCLRLEERGKQKMQIVCAAMRKLIHIAFGVVKSSKPFDPTLAFSS

SEQ ID NO: 513186 - protein, 307 aa, unidentified
MCFIGAGVDVSKAFLDVAVHGEKAVKRFTNDGAGLAQMAAWFGPWNLQQVVLEATGGYEQAALDGLYALGLPMVRINPRQVRDFAKATGQLAKTDRLDARVLAHMASVLPLIAYRPLDAKASRLKPFHQRRGHLIQMISAEKQRRRQITEPTLRAMLEENIRRLEVDRDQLDAVISEQIAGTLQHRVLGSIKGVGQGLLTAVICDMPELGYLHRKSAAKLYGMAPLSRDSGTFKGQRTTWGGRAAPRVAMYMATLSAVRYDPSLRAFYQGLLARGKLKKVALVAAMRKLLTILNARMREAIAAHPNG

SEQ ID NO: 513187 - protein, 392 aa, unidentified
MVCVGIDVAKDKHDCFVLSSEGEVLADVFTVANNREGFETLLQRIRSCTCPTDKIKVGLEATGHYSYNILGFLLDKGLATYVINPLHTNLYRKSLSLRKTKTDRIDARTIASMLMSDVDLKSYTDIAYHNEELKSLTRYRFDKVQERAKLKQSVSRLVNILFPELETLVPTLHMASIYTMLSEFPGAKQIADAHLTHFKAVLSDASKGRYDRDKAIEIREAAKRSIGSAMPAKSLELQHTIRLIRELDKEIDEIEAAIKAIVDEMAPPILTIPGISYRMGAMILAEIGDFSRFDSPDKLLAYAGLSPSIYESGKLKATGAYAHMEKRGSRYLRYALFNAAKYVCHWEPSFAAYLAKKRAEGKHYNVAISHAAKKLVRLIFALQTSGRAFQPA

SEQ ID NO: 513188 - protein, 376 aa, unidentified
MSEGISFAGLDVHKKSISVALLKPGAREPIEWQQANDAQSVKRLVRKLKREGGETVRCCYEAGPCGFGLQRTLCSAGIECEVIAPALIPLKPGERIKTDRRDARKLAELHRADLLTAVRAPTPEEESVRDLCRCRDDVREELMSARHRLGKFLLRRDLRYGEGRAWTQKHRRWLQSVQFEHRAAKATFDSYLHAIEVLEERMRAVDKELAAVAAEEPYREPVAWLRCFHGIDTVTAMTIVAELHNFRRFETPRALMAYLGLVPGEHSSGAKTSRSSITKAGNKHVRRILIETAWHYRHKPTVGANLRRRREGQPAAVIAIADRAQHRLHRRYWRLLLHNNKVPNKAVVAVARELVGFLWAALYDGDWSASGGCPTS

SEQ ID NO: 513189 - protein, 413 aa, unidentified
MKQFPSHFIAQIGLDWADQKHDFCLQSSDSDVCEYGTIRHTPESIEDWALALQKRFHNQPVAICLELKAGPVVYALLKYNFIVLFPISPKALSKYREAFTQSGAKDDPSDAFLQLDYLLKHKSALKPLIPDNKETRILQRLVEDRRALVDDKVRLTNRITAALKSYYPQALQWFDDIDTKLFCDFIEQWPTLKQAKRARPLTLTKFLKAHRCVRPVVIEMRIKAIKSALPLTLDDGVIVPLERLVRALTVQLSHLLITIHEYDLDIAQQFRQHADHEIFDSLPGAGPVFGPRLLVAFGTNRKRFDSADEMNRLAGVAPVLKRSGKSAWVHWRYSCPTFLRQTFVEWANQSIRYSFWAKEFYDKKRAMGKSHQATLRSLAFKWIRIIFSCWKNRTPYDESAYLFALKKRMSLAN

SEQ ID NO: 513190 - protein, 343 aa, unidentified
MIGLDTAKSVFQVHGVDAAGKAVIRRKIRRSDLVAFFEKQEACMVVMEACGAAHHWGRTLTGLGHNVKLIAPEAVKPFRKKGKKNDAADAAAICIAAVRPEVKFVPIKNLAKQGTLALHTARSLLVKQKTMLANTMRGLATEFGLTMPKGIQNVDDLMTQVDADESLPEEARQASKELYDHFSAANLCIEALETKIVHHARHDETARRIATIPGVGPITASLIVATVADISAFKSARHFAAWLGLVPRQYSTGGKTRLGRITKTGNSEIRKSLVVGATVMIRYAGQWNSTAGAWFRGVLERRPVRLATVALANKMARIAWALMTRKEVYQAKGRVAVAARAAA

SEQ ID NO: 513191 - protein, 345 aa, unidentified
MEYFAAIDVSLELSSVCVVEGTGKIICEKKVASEPEALVAWFNDTGLEFTRIGLEAGPLSQWLHAGLTAAGLTAILIETRHVKAALKAMTVKTDRNDARGMAQLMRMGWFRPVHVKTVPAQEIRALLTGRKLLLGKLRDVELGIRGLLRGFGLKVGRVSKGRYEARIRELTAGHPMLEPVAAAMLQSRVSLRAEYGKLHRMLLGIVRADATCCRLMTVPGVGPVVAVSYKTAVDDPARFRKSKELGPYFGLTPSKYQSGEVDWTGRISKVGDAMVRTALFEAANVMLSRVTRFSTLKAWALRVAKLRGMKRAKVALARKLAVVLHRMWVDGTDFRWRKMPAAAAA

SEQ ID NO: 513192 - protein, 379 aa, unidentified
MKSELYVGLDVDKEWIVITVAEWGRNGAVQDLGAISNDLHALEKLLARLRKRYGPEVTIRACYEAGPCGFTIARRLRQLGVECAVVAPSLTPTRAGDRLKTDKRDARKLARLLRAGELTEIYIPEPTDEAIRDLCRARSDAVDDRRRSRHRLKAFLLRHGYRYQGKSAWSAAHERYLPELVLQHPAMKVILEEYLISVQLASERIARCEAAMSDLLGKWRLEPAVRALMAMKGFQTVAAMIVVSELGALDRFTHPRQVMAYLGLVPSEKSSSDRRRQGAITKCGNAHARWLLVECAQHYAAPPKVSKELSRRQQNQSRAVRTLSWKAQNRLHQRYCRLMARRLLRNKVMVAVARELCGFIWELLRTQECYHAPCPSGIK

SEQ ID NO: 513193 - protein, 423 aa, unidentified
MEVIHPRCAGLDVHKETVMACVRLALSGKVTREVRTFETTTSGLLLLLAWLTEQGCTHVAMEATGVYWKPVWNILSDGDFELVLANAAHIKNVPGRKTDVSDAAWIADLLAHGLIRSSFVPDQEIQELRELLRTRKQLIRQQTRHIQRLQKTLEGANIKLDSVIADIVGMSGRAMIEALIAGETDPAKLAALANYRIKASPQQLREALRGRVTDHHRFLLRLHLQQIDFADAAISDIDRQVAALIARMDEEVEAGQASFQTLISLLMTIPGISLLAAQVILSEIGLDMSRFPSAGHLLSWAGLCPRNDESAGKRRSTRLRKGDPWLKTMLVQCAFAAKRKKGSYFNAQFHRLASRRGPKKAVCAVAASILTTIYHMIKDGTQFEDLGADHFDRRSKDVRAKRLVTQLAKLGFDAKLTPLAKAA

SEQ ID NO: 513194 - protein, 325 aa, unidentified
MPATFLYCGIDISGTTIDICIQTSNQTFEHHQLPNTAAGFKALLKLCPGDYWFVMEGTGAFHLPLCFYLHQKQSKYSVVNALQIKRYIQMHLERSKTDKIDAKHICMYGIERHPAQYEMPCEQYFECKTLNNAIETLTQEITSFSNKIYALQQLKVDNTVVQKTYSSIVKNLRLELKKLEQALAQKLHAWQPDLVEQVSSVKGIGKRATAILIVFTQGFKHTHTYQQLISYAGLSPKEFTSGKSIRGKVRISKIGGKQLRHTLYMCALNAKATNAGCKELYDRLVGKGKNKKLAIIAVCNKLLKQVFGVVQSGILYQDNFCKKTA

SEQ ID NO: 513195 - protein, 408 aa, unidentified
MNLLYGRCAGLDVHAKNVVACVRIEEDAKLTEEVRTFDTTTKGLLALSAWLELEGCTHVAMEATGVYWKPVWHILESRFELVLANAAHIKNVPGRKTDVKDAKWIADLLAHGLIRGSFVPPTPIQDLRALMRTRKQLVREAARNTQRIQKALEDANIKLTGVISDILGKSGRAVLDALAAGETDPEKLVDRTGSRLKATREELVEALRGNVREHHRFLIKLHLDQIDVLGRAIDDLDARVASHIDPFRKDIETLTTMPGISETAARVIVSEIGHDMSRFPTAGHLISWAGLCPRSDESAGKRRSTRIRKGAQWLKTVLVQCAWAAIRAKDTYLRSQFHRIKGRRGPMKAIIAVAASMLTSAFHMLTTGADYKDLGAAHLDKRDHAKIARRLVRRLEDLGLKVTVAPAA

SEQ ID NO: 513196 - protein, 433 aa, unidentified
MEEAEDEPLFCERAAGIDIGKQAVMVTVRVPSGTRKGGRAQETREFGTTRRQLLELAGWLRSHGVERAGMESTSDYWKPAFFLLEQQGFDCVLYQASKVKAQPGRPKTDKLDSVWLAKVTEQGSVAGSFVPPEDIRRLRTHTRYRRRLTQARTAEKQRVEKLLEDAHLKLSSVISDVHGASGRDMLRAIAAGERDPRVLAEMARGVMRRKLAALREALDCSFFTEEHAFVLSMMLDNIDHYSAQIAVLDEKIAVMCEPYGRQVAQLDQIPGFGVKNAQDLIGEIGVDMSAFPTAAHLCSWARVAPRPKESGGSRKGGSATGKGNPYIGASLGEAAVSVGRTQTFLGAKLRRLCRRMPKKKAQVAVMRTQLAAAHALLSDPSAEYAELGPGYYDERAGTARQARGHVRSLERLGWKVTLEPLDPDTGELTAQAS

SEQ ID NO: 513197 - protein, 445 aa, unidentified
MVAVMIGVDPHKASHTAVAIGVAEEPLGELRVRACAAQPEQLLEWAQAWPQRTWAVEGAGGVGHLLAQQLLAAGERVLDVPPKLAARVRLLQAGNTNKNDPNDARSVAVAALRSPGCPQARRDDHVAVLKIWSKRYKDLGRTRTQVACRLHQVLCELIPGGVPGQITAGQAARVLESIAPADAVAAARCQLAAAFTADLRGVDAAIRDTRKTLATAVAAAGTSLTGLFGVGPVIAAAVIGDVSTVSRFPGRDHFAAYNGTAPIEVSSGGRKIYRLSRRGNRRLNHAIHMAAVTQIRYRHSPGRAYYDKKLAEGKTGKEALRCLKRQISDAIFACLQADARRAAAAAAKGPGGQPGNHSASRAAGLHPEYRRFGQATPGPATHPTAPAAAFPAQPPSRANGRPGQGPRRSPAAQRRPQGVLDAAAREPTMPAAGKAGRKHGSSPTG

SEQ ID NO: 513198 - protein, 412 aa, unidentified
MKQIRDRVAGLDVHRDSVVACCRVREPDGQVEVTKRSFATTRRGLGELAAFLSEHAVQAVAMEATGVYWKPIYYALEGLFDELWLCNAQHVKNVPGRKSDLSDAEWLADVAAHGMVRPSFVPPPEIRELRELSRYRKTQADARGKEIQRLEKTLQDAGIKLTSVASATWSVSSREMIEALIAGERDPAVLARMAKGTMRKKIARLEEALAGSFGAHHALVCRRIIDHIDFLDESIAELNAEIAARLVPFEAAVRIITSIPGISQTTAEVIIAETGADMTRFPTAGHLCAWAGVAPASHESAGKRRPAGTRHGSTWLRRALIEAARAGARTKNSYYSAQYARIARRRGPNKAAVAVAHSMLDTIWHLLTTGALYQDPGADYFQRWHDPAAEAKRLTRRIEALGYTVTLDQQAA

SEQ ID NO: 513199 - protein, 338 aa, unidentified
MDHFVGIDLHSNNSYIAVIDTDDNRIFKKKARNNLKEILKILAPFEKQVKGIVVESTYNWYWLVDGLMDNGYKLHLANPSAIKQYEGLKHSDDVTDAFHLANLLRLDILPEGYIYPKHERPLRDLLRKRIHLVHKRTAFILSFQNLVSRNLGIKMHATEVSKLNEEDLEKLFDDEHLLLSAKASISIIHFLRSRIVQLEKVIAKAAKLKSEYKLLKTVPGIWNILAQMIMLETGPIERFKKVGNYASYCRCVQSNRFSNSKSKGKGNRKNGNKYLSWAYVEAANHALWNYEYVQKYHQKKTAKTNNVVAIKAIAHKLARACYYIIRDQKEFDPKKAFA

SEQ ID NO: 513200 - protein, 410 aa, unidentified
MEVMFDRVAGLDVGKDSVTVCVRTPGPRGGRRSVTRTFKTMSASLRVMRDWLVEAGVTIAAMESTSTYWKAPFYCLEEVMEVWLLNAAHMKAVPGRKSDVRDAEWIAQLLEHGLLAPSLVPPPDIRRLRMLTRYRVQLMGDRTREIVRLELMLEDASIKLSSVVSSLKTVSARAMLTAMIAGEQDPLVLADLAKGKMRRKIPDLAQALTGHFDVHHARLARSMLRRLELVEQALVELDAVIAEACRPWQHQIELLQTIPGVGPKVAQVIIAETGGDMSRFPTAAHLAAWAGLAPGMHESAGRQTPTGKRHGNKWLAAMLVEAAGSVGRMHGKNYLAAQHARLMRRRGMRRAQVAVAHSILIAAYWMLKRDEPYHDLGADWHRRRNNEAHPRRLIAQLEHLGHTVTLSPAA

SEQ ID NO: 513201 - protein, 339 aa, unidentified
MEDVYAALDVSDKTTHVCVVDGSGVNIWAGACATDPQVIARTLKTRAPGLVRVVLETGPLSAFLYHGLVERQIPAICICARHAHGVLSARVNKSDPHDAEGLAQMARTGWFKAIRIKQEATHMDRAALKIREQLIDAHQAMAGQLRGLLKLFGLRLGKVTTPGKRRERLQALFAQKPELEPIMAPLIESLEALEVQIRRSSRALAAAAAADPVAVRLMSVPGVGPICALTYKSAIEDPERFKRGEDAGAFAGLAPRRSQSGERDIKGRISKAGDPMLRSALYEAANSLLVRVKKPCALQTWGKRLAENKGGKRARVALARKLAVLLHHLWRSETEFRWA

SEQ ID NO: 513202 - protein, 340 aa, unidentified
MVNYRLISLALTKHVIQVHFINEHTGEVVDKQVRRQDFLAYFSNREPCLIGMEACGGSRHWARELTKQGHKVRLLQARFVKAFVMGNKNDVMDARAIWMAVQQPGKEIAVKTEEQQSILVLHRSRRQLVKFRTAQINALHGTLLEFGETIHKGRAAMEREFPEALERMKERLPLYLITVLENQYNRLNELDSLIDDIEKQLTSVARQNETCRRLLDIPGVGPLIATAALAIMGKASVFKSGREFAAYVGLVPRQTGSGGKIRLLGISKRGDKYLRTLFIHGARAAALLTKEPGPWITELKKRRPASVAIVAMANKLARTVWAIAAHGRKYDKNHVSIRPY

SEQ ID NO: 513203 - protein, 326 aa, unidentified
MAKRITVCAGIDTGKRKLDVALDGSAEQLQVDNTAEGYKTLLQWLRQHRVKRVGIEASGGYEQAVVAELRRKRFVVVVFQPAQVRAYAKFHLQRAKNDKIDAALIAACTAAVKEIHPAPDPRLLPFAEHLTLIDQIGEDIARLKNRLETCRNARLRALWKENIAHLVKLEKGELKTLVAAIRKHPDLAKRLDLINSIDSIGLPTAVAILVRMPEIGQITRQQAAALAGLAPYDDDSGDKVGARHIQGGRERLRRALYTAALPGAFRWNRQLIALYQRLRTAGKEHKHALIACARKLLVFANAVVARGTPWQDKPQTGAAVTSPSVA

SEQ ID NO: 513204 - protein, 459 aa, unidentified
MAQDGDTVEVEEPEELMARVAAIDVAKASGMVCTRVPHPAKPGQRATKVWQVPATTNAIIELAEQLAGQGIQRVVVESTSDYWRAWWYLLEARGLVVWLCNARDVKHLPGRPKTDKLDAVWLARLNERGMLRPSFVPPAEIRQLRDYTRLRSDLTQERGRQVQRLEKLLEDALIKLGTVATDIMGVSGRAMLEALIAGQRDPRVLAELARGRMRGKRGALVQALTGRFDDHHAELARMLLDHDDALTAQIDRLTVRIQELIGAIPAAQAAPHRAGPTGSGDGGTTGDGAHPQPAQPPLGALDRLDEVPGIGAKAAQVIIAELGLDMGQFPTPGHLVSWARLAPRTIQSGAKHRAGATGKGNPYLKGVLGEVAAAAAKTDTFLGERYRRLVRRIGKLKALVAIARSILVIVWHLLADPTARFHDLGPDYHARRIDKDRQTRNHVRQLQALGYSVTLTPAA

SEQ ID NO: 513205 - protein, 354 aa, unidentified
MPKTASAQIAVIGIDIGKNSFHVVGHDSRGAIILRQKWSRGQIETRLANLPPCLIGMEACVGAHHLSRRLKAFGHDTRLMPAKYVRPYAKGQKNDFNDAEAIAEAVQRPTMKFVATKTADQLDLQALHRVRERLVSQRTGIINQIRAFMLERGIAVRQGIRFLRTELPIIFASRTDVLSPRMLRVIEDLAGDWRRLDERIEALSREIETIARQDAGCDRLMSVPGIGPIISSAVVAAIGSGDVFSKGRDFAAWLGLVPKQISTGDRTILGKISKRGNRYLRVLFVQAAWVVLVKPMSWERHGLKSWIEAAKKRLHHNVLAIALANKLARIAWAVLAKGRGFEATRTVNGSTQSA

SEQ ID NO: 513206 - protein, 408 aa, unidentified
MLTPIVKRCAGLDVHKMGVMATVVLEQEDGSLREETREFGTFRRHRRQMVRWLDGLGVDLAVMESTGIFWKSIFACLEEAGIATYVVNARHVKKVPGRKTDVSDSEWLATLGRLGLLKPSFIPPKDLRELRLITRQRIKLRRMLAAETNRLHKVLDDAGIRLGGVVSDINGLSARALIGGLIEGKAPEEIVPYVHGRLKEKIPQLLEALDEPLSERHRFLLHSLEEHIGYLEKEMATLDHYLFAAMNPYKRQWEILQTIPGIDAISAAMLLVEIGIEMQSFGSAHRLASWAGMCPGNNESAGKQKGGRTRKGNRVVRQVLCEISNAASKSKSQFKGQYQGLVIRRGHKRAIIAVGHKVLRVVYAMLKSLQPYRDPEIDYTRLVVQRNAPRWLAALKRYGFLPAVGAAA

SEQ ID NO: 513207 - protein, 338 aa, unidentified
MTLYVGVDLHSNNNYVGIVDQDNKPLFRKKLPNDLDKVLSVLEPFRNDVAGIVVESTFNWYWFVDGLMDNGYKVHLANPAAIKQYNGLKNVDDKRSALFLADLLRLGILPTGYIYPKEERPVRDLLRKRLQLVRQRVSHILSIKNILSRSLGMRMKSDEVKKLDETHVRMLFPEEHLFLAVNASVAVMGGLAREIDRIEKTILAQAKLKEEFHGLLTLPGVGNILALTIMLEVGDINRFAQVGNYSSYCRCVRSIRSSNGKIKGQGNRKNGNKYLSWAYGEASHIAKRYYEPIGRYYRRKAAKANEAVAIKAISNKLARASYYIMRDKVPYDEVKLFR

SEQ ID NO: 513208 - protein, 422 aa, unidentified
MLGIGIDFAEEFHLVALGRPGEGVVEVVRVDHTPAALEALVTRIGVLEPDPAEVRVVLETNHGALVERLLDAGYVVVPVNPDLVARRRGPARKKDDATDARIACLLALDRHASLRPLIPHGELAAELRAIARDDERAARDERRLLNRLRTDLIATFPAALAIAGDDLGAPTMLRLLARWPTVGELTGAGRDELVAFARSAHHGWPERFADRVETALESEQFVARDYLVRAKAATIRLAADQLLLLGAQRRAWERRMGEILLGAPRRGRAHEPRADELDERFPGGEIYLSFPGLGDRLAARVAAEIGDHPEMFASPNGLQCYAGKAPVTRRSGKSESVVSTRLACNGHLRDAVQQWAFCSLLYSGWAREFYDGQLAKGKRHHAALRALGNRWLEVLWHCLIRGVRYDEATHVANRNRALQRAA

SEQ ID NO: 513209 - protein, 399 aa, unidentified
MIGVGIDISKNKSTVSAIDDTGEIIIKPQEFKHSQNELNKLIQWIKDQEDTVFVVMESTGHYHYPVLKKLYEEGIYVSVVNAYLMKKYGDIEIRKAKTDRKDAIRIAKYAIEKRFSLKKYEGEDEKYNDLKFLSRQYNQIVSIRVKAKIQFNSLLDEIMPGINKILTRTTGNSSKILYDFVEKYEHFDNIKRKGEQKFIKEYSAWSKKKGYRNGAIKALKIYELAQNSITTRSANNSTYIALKNCIKILRETEESSNSILTQMQTIAYTLPEYKIVRELKGVGDKLAPRLIAEIGDVRKFTSAKALNAYAGNDAPPHQSGQFEGTKRHISKRGSSSLRKVGYEIMMALKVTKPTEDNAVYEFMIKKESEGKAKNVAKMAALNKFLRIYYTRVMNLYKTL

SEQ ID NO: 513210 - protein, 373 aa, unidentified
MNNIAGCINQDSIIVGVDVHKYSHTAVAMNCFGQEKGRLDFSNDNLEEYVLWLSTFGRRNNLIVALEDVNGYGVHLVEKLSLSGFSMRYVPAILTERDRKKSTQHDKSDYLDAKRIAKVILTKYEETLPAKESIANREEIGVATAMDLLLCERRDLVRGKTCLKNQLHALLHQYYGDHYKDGFPKAFHKKALVFYTKDLEKAKTESQVKILLAKSIVRRIGRLRLVEEQIRIITRDLEAAGERSPQVRAIADSVHGCGMVTACAIVSEVVTIKRFGNKAKFAKYAGVAPTQRSSGSRDRLYTNPFGNRTLNRAIHTIALSQIAIKGDQRGKIYYQKKLSEGKSKLWALRCLKRQLCNRIFQALKNTGMETGRM

SEQ ID NO: 513211 - protein, 345 aa, unidentified
MKIVGCDLHTRYQQIAMLDTETGELIERRLEHANGEARAFYAGLQGPVRVGIEATGHTRWFERLLAELGHELWIGDAAQIRAAMVRKQKTDARDAAHLLQLLVEERFPRIWRPTMAERDLRQLVWHRQKLVWMRNAVGNQLHALAMGEGVCRKKQLWTKQGRAELQALNLGAWASYRRQELLEMVDQLDGSLEKLDRAVEEQSQQNEAAVLLRTHPGVGPVTSLAFVLTLGPVERFKRSKQVVSYLGLNPREHSSGGKQRLGAISKQGNPMMRSLLVEAGHSAARLDPELHKDYQRLKLRRGSGVAKVAIARKLAVRMYWMLRQQANYAQLVRMQGSPWATLVEK

SEQ ID NO: 513212 - protein, 345 aa, unidentified
MNVTAIGIDLAKNVFQVHAVDTRGKVVLRKQLRRAQVAGFFSNMPPCLIGMEACASAHHWGRTFERFGHTVRLMASQFVKPYVKTNKNDVADAEAICEAVGRHSMRFVPIKSVEQQAILSVHRVRQGFVKARTAQANQIRGLLGEFGLVIPQGIYNVAKRVPELLEDASNELPVPFRHLIERLTQHLKELDRQVKEFEKEIIEWHRSSELSRKLEAIPGIGPLAASALVASIADPHSFDNGRQVSAWLGLVPRQSSSGGKPTLLGMSKRGDAYLRTLLIHGARSAILAAKNKVDNTQGWLTNLLKRRHPNIAAVALANKNVRTVWALLAHGREFQADYMPTRMAA

SEQ ID NO: 513213 - protein, 395 aa, unidentified
MFIVGIDVAKRSHEVCMITSDGQTVQRPFSIRNNCTGYNLMLEKIRKHTNIKSQIVFAMESTAHYWLALFTRLRKDGYHVILLNPIQTSAMRDMFIRKIKTDAKDSFIIAELIRFGRYAESNVAQDRLLALKELCRNRFYLVDMAGDLKRKLIALIDRVFPEYEAQFDTIFCKSSVAVLKKYPTPQKLSNAHLDKLTELLWNSSNGHFGEWKARELKDLARNSFGVEDCDGAYSTLILLMLDQIQSLSGKADALEKEISRLFQSFDTTVTTIPGVGPIIGAVILSEVGDISRFSSADKLAAYIGVDPSVNQSGEFQAAHAHMSKRGSPYLRRCIWMASQVAVQRDPMFRAYYEKKAAEGLKYMTIIGHVTRKMTAVVFAILRDHKVYEPVLPTAA

SEQ ID NO: 513214 - protein, 385 aa, unidentified
MFYVGIDIAKNKHDLACINETGETVITNFRFANSCQGFHQLKLKLEQLSPIIQDVQIALESTGHYNYNIVTFLRDLGYNVFAYNPLIIKEFAKSQSLRKTKTDRKDALLIARKLRSDVTPERYQTDRVLDELKELTRYQNRLIQSRSRCKNLYIRLLDIIFPELHRIVNNLYNQFIYDLLTNYPSPQRIARARFSSLLKIKRLTADKAHQIQETAKQTIGNASPVLSLELVQLIESIKHYDKQINQVQEEINLLMIELNSPITSIPGIGSRLGAIILAEIKNIHNFKNPNQLQAFAGLDPAIYQSGQMDNTGHMVKRGSSYLRYALIQAAKLIAIYSPHFKAYLRLKISQGKHYNVAVTHVAKKLIRVIYHLLKTNQLFDETKLR

SEQ ID NO: 513215 - protein, 385 aa, unidentified
MDQHSRAFVGIDTSKLRNAVAVAEEGRGGDVRYFGEIDTAEAATRKLITKLAAKYRELTFCYEAGPTGYGLYRLIRKLGHDCVVAAPSLIPKKPGDRVKTNRRDAVGLAKLLRAGELTAIWVPDERHEAMRDLSRAREAARNDLKGKRQQISSFMLRLGRHFPGKKTWGPAHMNWLMLQKLEHREQRIALEELLGAVRQENERIERLEQAIRDVVPEWSLAEVVTALQAMRGIDLVAAVTVLAEIGDLSRFQNPRQLMGYLGLVPSESSTGDTVNRGGITKAGNGRVRRILVESAWSYRYPPRVSREKQMKVAAAPRAVREIAWKAQMRLCGRFRLLTRKGKRPNIIATAIARELAAFIWAINREVMGFSRNGELAHRGHGPLEL

SEQ ID NO: 513216 - protein, 359 aa, unidentified
MTVIEGRERRIVGGVDTHKDLHVAAVVDEQDRVIGTQSFATTRQGYRQMLAFMRSFGHLQRIGVESTGSYGAGLLRFMQQAGIAVLEVTTPDKQDRRRRGKNDDLDAQNAAHAAFAGQRTVTPRSRDGMIESLRVLMACRKTAVSARRVALQMIHNTIVCAPDGLRDQLRSMSRMQLIRTLAAWRPDLTAYRDVEAAYRIAFKSLARRYLELHDEIADLDAMIVAIVDELAPNLVARNSIGHTGAAQLLLTAGDNPERLRSEASFASLCGVSPVPASSGKTVRHRLNRGGDRAANSALHIIAIGRLRTDQRTKDYVARRIAEGHSKLDAIRALKRYLAREVFTLVTQRRREINATRIAA

SEQ ID NO: 513217 - protein, 340 aa, unidentified
MGEITTVGLDLAKQVFQVHGVDAEGATVVRKQLRRAQLLVFFSKLPRCLVGMEACATAHHWARELRALGHEVRLMPAQYVKAYVKRNKNDAADAEAICEAVVRPTMRFVPVKTADQQAAVLLHRGRERLVRQRTMLVNALRAHLAEFGIVAPQGLRNVGKLIAIIRDEEDARLPDLARQVLGVLAVQIEQLETAIASLEKQLMAWHKSNPVSQRLATIPGIGPIIATAIAAMVAEPSGFRSGREFAAWLGLVPRQNSTGGKTRLGGISKRGNQYLRRLLINGASANLLRSKATNADPWVIGLRRRRPSMVVAVALANKTARIAWAVMHRQENYQRTALAA

SEQ ID NO: 513218 - protein, 304 aa, unidentified
MNGIGIDVSKRQLDVGTTDGETLQVSNNLTGFSELDVWLREHPAAQIVLEATGGYEQPVLDFLHKAGHPVVRANALRARRLAQGMGHIAKTDRLDAYALAQMAALVKLPAYQPLELWQQKMREFVRARRQAMEALTIARQQQEMVGDRELRRLLQANINRQQALIERLGKHIAEQVAQQPQLAVLKSMKGVGPALQAVLASYLPELGRISGKRIASLVGVAPMSHDSGSMRGKRSIQGGRAEIRQVLYMAAMSAMRHEPRLRDFYQSLRARGKEGKVAIVAVMRKMLVILNARVRDAESGPIPA

SEQ ID NO: 513219 - protein, 339 aa, unidentified
MAIVVGLDVHREQVTFDALDDVTGEVRRGRIAPADRPGVRRFLESLPAGRVDVALEATTGWRFIVEEVVAAGAVAHLAEPAETANLRGRKARAKTDRADARHLRELLQQGRLPEAWAPPEEILELRQRVRLRKTLVDERTAWQQRIHALLFHHGVRRPRALVTSEGRVMLSKLKLSGSARQALAVALAMIDACDAQLAPLDQELRDYARRQPGCVALMGIFGVGALTSAAIVAELGDARRFSSSRHAVRFAGLDITVYSSDTRRSPGRLSRQGSSVLRWAVYEAAQTAARSGSPDHAYYLSLAARLGKSRAKLALARKLLRRAHHILSDLGDAALCPAT

SEQ ID NO: 513220 - protein, 340 aa, unidentified
MKQCNVIAIDLAKNIFQVCGLSKDHKVLFNKPLKRSQLAPFMANQPSTQVAMEACYSSHYWARCFTAMGHIVSLLPAQHVTPFVRGNKSDHNDVIGIAEAHQRPHIRPVPIKTVEQQDIQSLHRIRERLIKQRTAMTNQTRGLLSEHGVTAPQGHKAFITLLHDINQQPSLAQSPYLKIQLLENIDEYHRLTQRIDRIAQQLADIAKQNPLCQLLLTIPGVGVIISTLLYSAIGDGSQFANARELAVWLGLTPRQYSSGNTFGSGGITKRGNKHLRKQLVHGARAALSRCRTKSDKVSQWANALVARRGFNKACVAMAARIARVSWILLNRKETYKTMNV

SEQ ID NO: 513221 - protein, 660 aa, unidentified
MESRGVISCPCGFDHLGEIFSLRVSVKALVHHAARPLITRITDTEHCPEEPRGYALAFHLSQGTRVFDMSIIPESPTEHIGVGIDTARYGHRVSFLRGDKQPAAPSMNFTETRQGYSKLWQQLKNLHRKHRNAQFHVHIDAAGQYAANLEHFLRSLDLPLNISIGEPKRNKDYHKAFFPKRTSDATESQAMARFGVMEQPPQTPATPNEFYVLREIAGRLQGGSKDATRAINRLHNLIARVFPELPMIASDISAAWVLTLLKRYPTPQRIANEPLEKLRKIPYIKATQAEQIQAAAKHTVGSLHGQLAESLMIQFVEHLQQCLLAQKKLKKLLIQAYHALPRSGHVQVLTIPGIGMATAAVLVAKMISIERFKTPDNLVGYFGIFPEENTSGVDRNGNPIPPGTMHMSAKGSDLVRGYLWNAAKSAIVRNPPVRDLYARLEAKGKRGDAALGHCMRKLLHQVFGVWSSDNPFDANYRRSRKQHLPSDQNEPERSETKTAAGHKREIPQSKVVTAANPNVQPTKPTVKRSTNNRCNESIDYAYLRSQITMERILSHLGHWARLRGSGSERRGPCPLHADHRPRSRDFSVNLDKNVYQCFDPECASKGNVLDFWKSFQKLSLHQAAKHMAKTFQLSTQPEQTEKTEPVVLGTRKRNPYSENT

SEQ ID NO: 513222 - protein, 359 aa, unidentified
MDHSQSESIYIGMDLHKKTSTFVIKEKFGRVLEKKKLNTDRKEITDFLSPYHGAELVVEPVSQWYVYADLIQNLGISVHLAHPMRVKAIAFAKVKTDSIDAGVLCDLLRSDLLPEAYFSPKEVRSWKETVRFRTSLVQMQTQVKNKIHSILFKNGLICPYQSVFGSKGRKWLCELELPEPFAFHLMEHLRLLRDIGIRIGEAEKEVAMRVSSHSQAKLLCTIPGIGYISALSIIAEIGDIRRFASGKKLMGYAGLVPSTYASGETIRHGKITRQGSMWLRTALIECAHRQARSEKSGSLKEFHDRIKDGKDVKTAAVATARKLCAVIWRMLTDNRPFEKFPPKRDSEKLTRLDSSPQSR

SEQ ID NO: 513223 - protein, 473 aa, unidentified
MKVFTGIDVSKGYADFCIVSESGEDVVEPFQLDDTERGYSAMWEVFNELVEKGHDEIVCAVESTAGYENNWLHVLVQMSDRLPLKVARLNPFPVKKFSEAVMGRNKTDKTSSYHIANYLRKCPEQIRYEEDNPYSAMRKYWSYISLQMKVLRQLSNNLQSIVYSANPELLSQCKFGFSGRILNVLKEYPTAKKLARAKVKKLSMINGINDVDASDMIAAAKTSVASLQDDLIGEMISSSARQIEQISSSIDRAIDTILKERRPKEIDLLMSIPGIGERTALILFMEIGCIHRFRSSRELASYAGIHPMVRESGDGSKRPKMSKRGRKMLRTALFLPAMVAARRDEYIGSIYDKQIEKGKSKMSAYGIIMHKLLRIAYGVLKTGKTYNSEIDKINRTDMKPPENKDETSQTPLRRFQSYEEKAPISKHAAKKRKQSVSHSVSAKICAGSKTAGNENMEILQTVNTEVKNETISS

SEQ ID NO: 513224 - protein, 404 aa, unidentified
MPELWAGTDAGKGEHHCTVIDADGNKALSRRVPNNEDELLQLLGDVLDLADGAPVTWAVDLNAGGAALWIALLVNHGQRLFYIPGRTVHHASGSYRGDGKSDAKDAFVIADQARMRRDLQPLKETSEIAVDLKILTGRRMHLSADRTRAINRLRAQILEYFPALERAFDYSTSKTALILLTGYQTPAALRRIGRARPATWLKNHGVRTLNVAKSAADAAVTAAEAQFTVVPGEKTAAKMVHTLAREVMALDEEIAQTNALVEGRFREHPDAEVITSMPGIGDMLGAEFIAATGGDMAAFGSPDRLAGVAGLAPVPRDSGKISGNLRRPRRYSRRLLRMFYLSAQAATVHCPLSKAFYQRKRAEGKSHKQAVLALARRRLNVLWALIRDHRTFEAVTSQPAAAAA

SEQ ID NO: 513225 - protein, 321 aa, unidentified
MNESERLTIGIDVGKDHLDFAILPTGTLHRVTNDAAGHAELMALLQAAGEGVGIARVVLEATGGYERAPALALADAGLPVVIANPRQSRDFARASGLLAKTDRLDAVALAQFARALQPVVRDMPTREQRRLEDLVHRRRQLVVMIGSEKQRLSTSHEPRVRTSIRSLLDVLERERRAIERELLHAIEQDPGWRDRMHLLRSVPGVGPIAAVTLLAELPELGTLSEKSIAALVGVAPMNRDSGRKRGKRRTSGGRSSVRKVLYMAALTATRYNPVIRAFYQRLRRAEKLAKVALTACMRKLLLILNAIMKTGRSWQPRPIPT

SEQ ID NO: 513226 - protein, 402 aa, unidentified
MNAVGIDVSKGKSMVAIMRPFGEIVSAPFEIKHTASGINSLVELINSVEGESRIVMEHTGRYYEVLAHQLSEANLFVSAINPKLIKDFDNDSLRKVKSDKADAVKIARYTLDKWQNLKQYNVMDELRNQLKTMNRQFGFYMKHKTAMKNNLIGILDQTYPGVNTYFDSPARSDGSQKWVDFASTYWHVDCVRKMSLNSFIDHYQNWCKRKKYNFSQSKAEEIYGKAKELVPVLPKDAITKLIIKQAVDQLNSASTTVESLRTLMNETASKLPEYPVVMAMKGVGTSLGPQLIAEIGDVSRFTHKSAITAFAGVDPGVNESGSYEQKSVPTSKRGSSDLRKTLFQVMDVLIKTHPQDDPVYQFIDKKRAQGKPYYVYMTAGANKFLRIYYGRVKEYLSSLPES

SEQ ID NO: 513227 - protein, 362 aa, unidentified
MSFFMNQTILQKLQEQKLYAGIDLHKKYAYVTVMDQLGYVQHQGRFENKERKLVPFLLERTSTLSLEAIIESTYGWYWLGEELESAKIPYVLAHPKKVHDLVKGRKTDKKDSQALADLYRTNLLPEAYIPTPDERNFRELLRFRFSLVRQKTGMQRRLRDILAKQNIECTYKDILGKRAKGWLRTQQFPFPYQQEVETILSLCEYLEKDIAKYTESVESQSINNPTAKLLESIPGIGKLLALLLAVEIGNIKRFPNDRAFASYAGLVPSVSSSGDKTHLGETSQKSNPYIRWALAEAVSHVVKKDPIYKAFYDKLEGKKGKSKARVAIMHKLIRAIFVMLTKKVKFKIQQLPMDTNDSRIQT

SEQ ID NO: 513228 - protein, 464 aa, unidentified
MGHARARKIPAQLVEDEEYQLRHERVAGIDIAKAKADVCTRLPPQRDGGRRASRVEEVPATAKAILALAVRLIADGAELVVMESTSDYWRMWYYLLEGAGLNVQLVNPAHARQLAGRPKTDRLDAQWLARLAEMGLLRPSFVPPPEIRALRDLTRTRLQLVRDRSREWQRLEKLLEGALVKLSSVVHSLAKVQSARAILEAIAAGERDPKALAALAHPNVKGGRAAVEEALGGMALGDHHPMLIRVHLDHITLLDRSAAEVEDEIEAALDAIPAAWGTDPGGETGPDAGRGPDPAVLPAAERLAEIPGVSPALARAIIAETGLDMTRFQTADHLVSWAGLAPVARQSGPRSRKPKKGQGDAYLRGYCTQAANGAARTDTFLGERLRRLSRRLDGNRARCAVARSILVIVWHLLASPDDRFADLGPGWHQRKTDTDRRTRSLMNQLRALHPDADVNITIVPGTAA

SEQ ID NO: 513229 - protein, 425 aa, unidentified
MRLARECGPPHINYGLVKSMYYVGVDIAKRNHQACLLDEQGSQLLMMSFANTAAGGKKLLEAVSAVTKPAVTETEFCMEATGHYWLPLYCFLRDQGFEVHVINPIQSDSARNLYIRKSKTDKKDAFILADLLRMNRVTSTKLAEEPVLKLQTLSRTRSEFVSQVGALKSRVLGILDRIFPEYERFFSNVFIKTSRELLKSFTTPDELATIDLSELTEFLAKHSRGRIGYDRAQKIQSYAQASFGISIGTDAFALQLRLLLAQVEFIEEQIAEIEEAIEQVMEELRACQDQPYRHVIETVPGIGPVLAAAIIGEIGDIERFPNARKLVAYAGIDATTRQSGQFEGTRNRMSKRGSPYLRHALWLAAVSARRFNPQLREYFQEKLAEGKHPYVATGAVARKLLHLIYALWSQNRPYETDYTWHPPEH

SEQ ID NO: 513230 - protein, 367 aa, unidentified
MRENNIYWAGMDVHADKINVAVYRGNETMPCEQYESQTEARAKVRLLKRLKDLPGEVRCVYEAGPCGYDIQRYLTDNGINCEIAAPALIPRKAGDRVKTDRRDARNLGRLYRSGELTVIHIPDEDQEAVRDLTRTREDTVEDVTRKRHQLSKFLLRHGYRYHNGNQWTQGHSKWMKGIKFENAVLRVVFEEYQLALEQAEERLKRLTQLIEELSQTAEYKRPVSALMTLRGVKAITAMTIVSEIGDMRRFVKAKEFMAALGLVPSEYSSGKSICRGSITKTGNAHVRRVLIESAWHYRHRPSVGKAIKARRTDQPLEIVNVAQKADVRLSRKYRRLLDRGKRATIAAVATARELAGFIWAIGQKAHP

SEQ ID NO: 513231 - protein, 338 aa, unidentified
METYAGIDLHSSNNYIGIMDQDHKRLFGRRLPNSLDKILMVLQPFKDDLKGVVVESTYNWYWLVDGLQEHGHRVHLANPSAIKQYEGIKHTDDKWDSFWLAHMKHLNILPEGYIYPKEQRAVRDLLRRRLFFVRHRTANILSLQSTITRNLGIKMSSNEIKKLGMDDACDLFDSANLVFMAQNNISTIKHLAKIIKGIEKQVKAQVQLRKEFVMLTTIAGIGLILGLTIMLEVGDIRRFCKVGNYASYCRCVDSKRLSNGKKKGENNKKNGNKYLAWAYVEAAHFAKRYIPKAQRFYQQKMAKANGAVATKALANKLARASYFIMRDQVPFDEDMLFR

SEQ ID NO: 513232 - protein, 352 aa, unidentified
MAEKFNSVITVIGIDIGKNSFHVVGLDERGAIVLRQKWSRGQVEARFANMPACLIGMEACVGAHHLSRRLRALGHDARLMPAKYVRPYSKGQKNDFRDAEAIAEAVQRPTMKFVATKTADQLDLQALHRVRERLVGQRTGISNQIRAFLLERGVAVRQGLRFLRAALPGILATRCDVLSPRMVRLIEDLAGDWRRLDERIDGLSGEVDALARQDAGCERLMSVPGIGPIISSAMVAAIGAGDAFDKGRDFAAWLGLVPKQISTGDRTILGKISKRGNRYLRVLFVQASWVVLIRPKSWERYGLKPWIEAAKRRLHHNVLAIALANKLARIAWSVLARGRGFEARSIATAQPI

SEQ ID NO: 513233 - protein, 433 aa, unidentified
MQDVQDEPLFCERVAGLDIAKAEVEVTIRVPSDTTAGRRQQETRTFGTTRRELESLGDWLACWGVTRIGMEATGDYWKPVFFLLESRGFDCHLYNAAQVKALPGRPKTDRADSIWLARITERGSVCSSFVPPEPIRALRTHTRYRRHLTQARTAEKQRVEKLLEDGHLKLSSIISDIHGVSGREMLNAIAAGQRDPRVLAQLARGTMRAKIKRLEEALDCAFFTGEHAAVLAMMLATIDHYTTQIDNLTAKIEVLAEPYLHQIRQLDEIDGVGPVCAQDIIAEIGTDMTVFPTAPHLVSWAKWSPQVKQSAGKRKGSNATGRGNPYLSAALGEVSISAGRTQSFLGAKYRRLARRMPKKKALVATGNSALTIIHALLSDPAARYTDLGADYYEQRMHVRRQARNHVRSLERLGYKVTIQAINPDTGELLAAAG

SEQ ID NO: 513234 - protein, 349 aa, unidentified
MAAIMVSEQRVVVVGVDTHSEVHVAVALSELGERLSAISVPTTPGGFERLVRWAESLGEVRAFGIEGPGSFGATLARHLRDRGHGVLEVARPDRRIRREEGKSDTIDAEAAARTLLSGTDVGEPKSADGCVEMIRSLRVARRSAMKARTQAANQLHALVITCPEPLRSRLHRLPVGALAELAAGFRPGPMDSPQAASKLALRHLARRHVALGAEIADLDRELDVLVTKAAPGLVGMMGIGTDVAGALLVAAGDNPDRLGKEAAFARLCGAAPLPASSGKTNRHRLSRGGDRIANNALWRIVLVRMRYEERTRTYVERRTKEGLSKKEIIRCLIGRVSGGGLQEGGRAPR

SEQ ID NO: 513235 - protein, 424 aa, unidentified
MQIVYRRCGGMDVHKKSVVVCLLLIDESTGEERKQRRTFGTTTRALMELAAWLKQWGVEVVAMESTGVYWKPVWNVLEEELGADCKLMLVNARHFKQVPGRKTDQKDAEWLAELLQHGLVRASFVPPPETRQLRDLTRSRASLMEDHTAVANRLQKLLEEANIKLSSVASNVLGVSGRRMLKELAKGNRNAAELADLALQRLREKIPQLREALEGRMSAHQQQMLSDYLKQLEFLEQQVEQLDRRTEEHLEATGQMTQVELLDTMPGVNFVVAAEILAELGPDMKQYPTADHVSSWAGMCPGNHVSAGKRYSGRTNKGNVWLRRGLCQAAWAASKSKKTYLAAQYQRWRVRRGKKRAIVALGHQMLVIAYTMLKNGTSYREMKPEECKSQDSRPRNAEAVMRRNVRQLNALGYQVTLTSATPPS

SEQ ID NO: 513236 - protein, 418 aa, unidentified
MSEENTARPSCRYVALDIHKHYCVVAAVNREGQVVLAPVRVEHQDLEGWLKKNLCESDHVVIESTTNAWHVYDLLEPLAERVLVANPIKVKQIALARVKTDIRDTLILARLLAANLVPVVWVPPQHIRQMRQLLSQRRQMVETHTQIINRMHSAAHRHHLKHERGKRFNEKTTAWQKDESLSQIEQFQLALEMENRAYIEQQIGRITEKVSKMSHQKPWAQSMTYVMQLPGFGVITAMTVLAAIGDIGRFESPNKLGSYAGLTPGLEQSGTKNRGKGITKEGRRELRWALVEAAQMAVKSDPHLKQRFQQLQHRMHRNQAIVAIAHRLLELVWYVLRRRQPYRHFSHERIAYKYVTWASRMSEDARDGLTRQQFARYYLMRLGIGHDLTRVALDPKYPRKLASEAELLELRPELQHIE

SEQ ID NO: 513237 - protein, 352 aa, unidentified
MIIIGVDFHPEFQQIASVDTDTGEFQEKRLAHREEAEKFYRALTSKKVRVGMEASGHARWFERLLSELRFELNVGDAAEIRSKRVRKQKTDRQDARLILQLLIEDRFPRIWVPSWENRDLRQLLWHRHRMVQARTRIMNQLQAVALNEGLRCKKRLWRDAGREQLESFALAPWASRRRRDLLELLDRLTPTIAELTEAIEGEVEKCPEARRLQTHPGVGALTALAFVLIIGRAERFQCGKQIASYLGLVPLEESSGNRRRLGHITKQGNSLLRFLLVEAAQVTVRSDQEWRNKYFHLALRRGRKIAKVAMARRLAVRMYWMWRKGWNYEQLKKIGSHAGEPGNRDGVMSNTE

SEQ ID NO: 513238 - protein, 327 aa, unidentified
MVNALGIDVAKDKLDVVLLNEAQQTHSGVFANNPQGFEQLQRWLSKRLDGDVHACLEATGRYSQAVAEYLRQTGYTVSVVNPARIKAFAASRLSRQKTDQTDAKLIALFCQSQRPEAWTPPAAEQRALQAMVRHLHDLKAMRQQEHNRLTAGVSAEAVIHALQQPIAFLDQQITDLERQIHDHLNQFPHLKQQRDLLDTIPGLGELTIATLLAEVPDILAFETAAQLAAYAGVTPRQFHSGTSVHRPTHISKCGNARLRAALYFPAMVALRHNPLVRALGERLKATGHSGKSIVVAAMRKLLHLVYGVLKSGRPFDPNYVTNTVLVS

SEQ ID NO: 513239 - protein, 350 aa, unidentified
MNEHITIGMDLGDRNHILVIFDDQGNEIACKRIANTKLALQRYFQAYLGATVALEAGTHSPWISRELQQLGLRVYVGNPRKLRLIWDSHDKSDERDARILAMVCRVEPRLLWPVKHRNAQAYNDLEVIKARDMLVQTRTKLINHVRCVVKSHGERLPGCSAQSFARRVAGLLPAPLSDALSYLIKTIADITQRIADLERKIEQLSNQRYPETQQLRQVAGVGPTTALTYVLTIEDPSRFRKSRMVGAYLGLTPRRDQSGASDKQLCISKAGNGYLRRLLVNCAHYILGRFGPDCDLRRFGLAIAAHGGKNAKKRAAVAVARKLAVLLHQLWASQQSYEPFYAVVSNRKAA

SEQ ID NO: 513240 - protein, 392 aa, unidentified
MIYVGIDVAKSKHDCCILNEKGETLSSFIFANDKQGFEKLMTEIGMYSAASDLSDARIGLESTGHYSINLQNYLLQKRLCVRIYNPLSVNLLRKAQTLRKTKTDKSDAKFLATLLFSDENKSYSQAVLPVSELRNLTRSRYRLISMRSKLKLSLSRLITILFPELPDVVWSVNQKSSYALLSEFPTAKDIADANIIRLTNVLSDNSHGKYGREKAEQIRNLARNSIGLDSRATGFELQQTIRLIQNLQCEIDLLDKEIRKIMREIDSPVLSIPGVGYVLGAIIISEIGNINNFSSPSKLQAFAGLDPSVYQSGNYNASSTPLVKRGSTYLRWAFMQAARLVAYRDGTFAAYQEKKLAEGKHYFVALTHVAKKLIRVVYHLLKTNQNYQLKIG

SEQ ID NO: 513241 - protein, 347 aa, unidentified
MFPFYLGIDLHLKRSYLVLMDAEGEVIDKRRLKNTEIETYISRNVPKETYAVMEATRNWPYFYDLLAKHVDRVELAHAKGVRMIAAAAVKTDQIDASVLAHLARLNFLPIAYAAPKEIRDLRQHLRYREWLIDERRRAKNRIHAVLAGYNLASPVTDLFGRAGREWLQEVAEKELRPTSRRVVLETLTMIDQLDDQIKELAKDIPLPEDLKPKAEILMSMPGIGKLLSAVILAEIGDISRFNSPKALCNWAGLTPRVHKSDTVVRHGRISKQGSRYLRTAMVCAAMTACRISPRWYGVYEHLARKIGRRAAKVAVGRRLLTVVYYMLKRNQPYEEDYEQRRAIEQGA

SEQ ID NO: 513242 - protein, 342 aa, unidentified
MKQYAGIDVSLECSSVCVVDANGKILREAKVASEPEALIGWFHSLGFGLERIGLEAGPLSQWLFAAMKSAGLAVELLETRHVRKAFEAMPVKSDRNDARGIAQLMRLGWFRPVHCKSMGAQETRSLLTARKLVQSKLRDVENSLRGILRGFGLKVGKTTERKFAGRIQELVAGHPHLQMIADALLAVHAVLRKEFAAFEKQVRKMARSETRARLLMSTPGVGPIVALTYASAIDDPGRFKSSKQVGAHFGLTPKKHQSGETDYTGRISKIGDGSVRTALYEAAHTMLTKPLKGCSQLKSWAMKIARRAGMNKAKVALARRLAVIMHRMLADGTPFNAAAAAR

SEQ ID NO: 513243 - protein, 357 aa, unidentified
MVTGLKHQMEKRSMEHFAGLDVSVNETSVCIVDDAGRIVREAKVASEPEALLSILKSGVYHFKRIGLEAGPLSQWLYSAFAEAHLPVICVETRHMRAVLKAQINKTDRNDARGMAQMMRAGLYRPVHVKTLRSQKLRMLLTHRKLLQSKAIAIENDLRGTLRNFGLKVGVAGAVRFEARIRELVKDLPDIAILVEPLLVVRRTLREQLGILHRHLLTIARDDEVCRRLMTIPGVGPVVALTYRATVDVPARFRNSRAVGAVVGLTPCKYQSGESDRTGAISKCGDEMMRVMLYEAAQILLMRSTQWSWLKAWAVQIARRRGVKKAIVALARRLAVVMHRIWVDGTTFRWTREEATAA

SEQ ID NO: 513244 - protein, 462 aa, unidentified
MSRLSNRQVSSEIIVRPFDGLARIHPNAAGMDIGAHEIMVCVPGPDSTQAIRAFGTYTVDLYAIADWLQQYGIRTVAMESTGVYWIPVFETLEARGLKCCLISATAIKRYPGRKTDVLDCQWIQTLHSYGLLADSFRTEADLVALRTLLRHREQLIAHRSPHILHMQKSLLQMNIQLTQVLSDVTGVTGQQIIRAIVAGERDPHKLAEMHNYRCKKDEQEIAKALTGTWRAEHLFVLEQSLAFFDFYTQQIEACDAEIERTYTAIRPDWGDPDDQAPLPPQKAKSHSRNAPKGVQVRLHLKRIAGVDLIAVHGISVSLAQTIIAEIGTDMSKFPTEKNFCSWLGLAPHNEITGGRVIRSYTLKTHNRAGQAFRQAAASVMRADCAFGAFYRRLKSRLGPAQATVATAHKIARTVYHMLKFQLEYQAISATEYEQHFREREIKYLQRKAAQFGFSLLPSTVST

SEQ ID NO: 513245 - protein, 344 aa, unidentified
MTIIRVGLDTSKSVFQVHGADEQERPVLRRQLRRGQIEKFFAKLPPTRVGLEACGASHHWGRVLRDLGHEVMLIPPQYIKPYVKRGKNDVIDAEAICEAMSRPVMRFVPIKSREEQAALMLLKVRDLLTKQSTMLSNAIRGHAAEFGVIGAKGPQKIKELLERIAGEANMPEPARELLNDLASQLAAVEVRLAALEAKLMAHHKADPRSQLLATIPGVGPVTAVNITLKVPDATVFRSGRHFAAWLGITPREHSTAGRQRLGKISREGDEGLRRLLVLGATAVIQQVERRRKAKKTSGNDSPWLLQLLARKPRKLAAIALANKMARTIRAMLVSGELYRRPQAA

SEQ ID NO: 513246 - protein, 346 aa, unidentified
MKKIFIGIDFSKEKFDATVIKAEGVEERAERQHEVFDNKVSGFRRLLRWVKSVVDEQDTGLWLFCGENTGGYSRALCNYLYGSGYDMWLENALSIKRSSALQRTKSDKADAGIIAEYAMRNYDQMRLYKPLDKNLERLREVFLYRHNLVKLKASMTVRKGEKKQTQEKSDISRFMAMSSKHLISEFNKKIAECDMRIEKIICEDEELRRNFEIITSVPGVGTQNAVCLMVYTDNFSRFDYDSRKIACYYGVAPFGRQSGTSVNTPPHVSPFANKLIKALLTQAALASIQFCTQMAIYYHRLVEAGKKKPVAVNNVKNKLLHTITAMVRKQEMYNPNHDYHAALKAA

SEQ ID NO: 513247 - protein, 297 aa, unidentified
MALRPSGERWAVPNEVRGGTMRVDRLQALHPALMVLEATGGLERLVTSAFATAGLPVVVVHPRQARDCARAPGQLAKTAAVDARALAHVADVSRPTPRPLPDAQTPALRGLLGRRQQLIGRRTAEQNRLAGTSRRLQTDMAAHSTWLTARLAMLDDDLEPVLRGHPLWRAHDDLVQSAPGRGPVCARTLLWELPALGTLTRQQSAALGGVAPLHGARGTLRGRGIRWGGRAQVRTVLSLGTLVATRDNPRITAFSQRLLAAGKGKKVALTACLHKFLPLLNAMLKHRTPWHAQEVQG

SEQ ID NO: 513248 - protein, 402 aa, unidentified
MFDITYKVMKKVCGLDVHKDTIFLCILAENGQTLLKEFSTLTPDIEEMRDLIKEQQVSEVAMESTGIYWMPIWRILQGHVEMKLVNPYFIKQLPGRKTDVKDSQWIATVLQKKLIKGSYIPGKHIQELRQYERRYVHICEQVTRVEQALDRQLHRCNIRITNFTSKVGSASVMGVVRGLVKGETAPEALIKHIHGRITNKHKEKIAASLKGIISDSDRFIFRQNYEELELLSRQQQECVKEMEKICDTLYKEELNLLCTVPGIQKWSAMTIIAELGVDLKTFITAASLVGWAGLRPRNDESAKKIKSRKITNGNKYLRRILVQCAWGITRSKGCWLSDKFNELAKRRSQKKALIAIARKLLVIIWHILSKHESYKEYKPKLSKEQKQKRIARLEKQILELQA

SEQ ID NO: 513249 - protein, 383 aa, unidentified
MENRPLKFGARRIFGLDLSKKTLKACRLDEDSGFEKQNIFDEKMTDDGRHHLASRLRKGDYVAMEGGSSTSFLARYLMENTEAEIFVLNPCKLHIIFESACKTDKQDCIKIAKYIRDTNPSNWCLIPVPTYEETSLRSLINSHISTRQERTRAINQLHAFFNLNGISFLKKSDLGNSARRHDLVEHYFSRNDLRGMQARLMLQDIDNIELSADCYEELIRQALVSRPRESLIWMSIPGVGPLTALACVAYIGDGKRFSTPDQLRNYVGLVPRIDQSGIREAIYGVNHYGCMPVRRNIIQAAWSVDRLLSDCNLKRRWVLLKAAGKNKQRIAVKVANDILTIGWTLLKKGELYNGLGDFSYLQEKLHRYKMTAIDSSCFGECLK

SEQ ID NO: 513250 - protein, 388 aa, unidentified
MEARTVNNLPPAASHDETVRCLLAIELSKKSWITAVNTPLSDKISRHRLEGCDCKGLLELIERIRTRVARELNRPVEVISCYEAGYDGFWLHRLLEAHGVRNLVIDPASLQVDRRARRAKTDKIDAERLLRSLMAYLRGEPKVWSVVRVPSVAEEDDRRLHRERDRLINERVQHVNRIKGLCAVHGIYDYEPLRSNRLARLKQLRTGDGRELPQRLKAEVVRELQRLELVLKMIKTIEAERDAIAASKMSTHTHAKKIQDLVKLKSIGPEIATALVGEVFYRRFNGRHQVASYVGLTPSPFQSGSLNHDQGISKAGNPKARTIMIELAWLWLRHQRNSPLSVWFRERVGTARGRIRRISIVAVARKLLIALWRYLETGMVPTDAVLKG

SEQ ID NO: 513251 - protein, 337 aa, unidentified
MKYCGIDLHSNNSVVIVSDEEDRVVLSKRLPNDLGQIRAALEPHREDLAGVVIESTYNWYWLVDGLMDTGYQVHLAHPSAIKKYEGLKHSGDFADAAYLAHLLRLGLLAEGYVYPREQRGVRDLARKRMQLVRYRTAQILAIEGILMRQTGARLKGEAVKRLTAEQVDQFAFAPDVSLAVQANRAVSQTLSQQIEALEKRLQQRVILRPEYRLLKTVPGIGEILATTIMLETGTISRFTRVGNFSSYCRCVDSLKESNGKRKGEGNTRNGNKYLAWAFVEAANFALRCSPQARSFYERKKSRSNRILALKALAHKLARACYHMLRDQKPFDVHLCFG

SEQ ID NO: 513252 - protein, 436 aa, unidentified
MRGCRCSMIMGFTKPIEHFNLQRKKVITMNTLYVGIDVSSKSNVVYLMLPNGDKHSNFSVANSHEGSTLLVKKIYSALTSHSLDTVLIGLEATSVYGDNLVYFLREDATLAPFNRKIHVLNPKQVKKFHDTYNDLPKNDYVDSFVIADCLRFGRINKEVYLGDYHYKALQNLTRARFFAVQNLVKEKQRFMNVLFKKYSTMTQEKVFSDAFSTTALAVYDEFESAEALANMDLHELTDFIIEKGKNRFPDPVAVAKAIQKAARSSYRLPKTVNDSVNQVLSISITSMKALESQIKEFDKAIKAQMELLPNVLISIPGIGPVYSAGIMAEIGDINRFNSQAALAKYAGLAWKQHQSGGFEAEVTRLIPSGNRFLKYYLCEAAFSLVRCDKEYSDFYHLKYKEVNRCQHKRALALTARKFVRLVFRLLKDNRLYCPAK

SEQ ID NO: 513253 - protein, 335 aa, unidentified
MGTVAVFVGLDYHDEAVQVCVLDPQGRPLANRSCANDCGVIAALVAQHGERVQAALESCAGAADLAEELVSRAGWSVDLAHPGFVARMKQNPDKTDYQDAHLLADLERVGYLPRVWLAPEPVRELRQLVRYRQQLAGRRRNAKLRIRAVLREQRCPAPAELNPWTRGWCRWLVERAPLSVQARWVVERHLRELGRLADDLREVEERLRQVTADDPEVTRLLGQRGIGPVTAWTLRAEIGRFDRFRTGKQLARFCGLSPRNASSGQRQADAGLIRAANPQLRAVLIEAAHRLGRLDRRWRAFAQRLRTAGKPGSVVAAAVANRWVRWLFHQMRPAA

SEQ ID NO: 513254 - protein, 339 aa, unidentified
MNKLPKIDNFFNNVNLTADDDLFVGIDVHKKSYHVALFLNDAPATDFVMPSKKQQLIEKLKPAARALRNIAYETGPCGYALARHLKKADMPVCVAATSKIPRPAGQEDKTDRIDSKKLAQYAAKGLLKSVAIPTIKQEADRQLYRMRHRQVRNLAKVKTQIKSFLMMHDINEPEKLSYWSKKAVERLRILPLTKTLRLSLDELLGDLDYYTCRVKALDKSIAEHLDKGLLARRMALLKTHPGVGIVVSCQFATELYHYRDFNSTRQVYKYLGLSPRIHQSGEHSERGSINKVSNSRLRSNLVQAAWRWVSVDVQAKKSYHRLLNNCGQIKQKAIGRNSP

SEQ ID NO: 513255 - protein, 356 aa, unidentified
MVTLGVDAHKRMHVAIALDEAGRELAQWRGQNSALGWQGLLEWAIGLDHGPRQWGIEGAWNYGRGLGQHLVEAGETVYEVNARWTAAGRRRARQTAKTDRLDAKAVADCVRQEAPKLPRVWGDDETAVLDLLTSEREAVLGEATRLRNQLHALLLQLDPEYHEQLASLDSLEGLAVLDGYQAPTIGALADERAAAVKRLAQRLRLALGHAAELAQRVKALTVEAGFTPLTEIFGVGFIIAGTLAGILGPGSRFDSDAELAAYAGVAPVEASSAGLVRHRLNRGGNRRLNSLLHMIAVTQLRSWAPARAYVSRRTTEGKTRREGTRALKRFLVRAVWHAWRRCLEERETRRECRSAA

SEQ ID NO: 513256 - protein, 369 aa, unidentified
MKKHITFVGLDVHKNSINVALADGDRNGDVRYYGAIGGTLDDLDRVVKRLASPSRELRFVYEAGPCGYDIFRSLTDKGYDCAVASPSHIGKKPADRIKTDRRDATMLARLHRAGELTYVFVPRAEDEAMRDLTRAREDALKAQRVSRQQLGGFLLRLGFRYQGRTAWGPAHFRWLADQKMPTPSQQIVFQEYINAIDETTKRVGRHTRQIEVLVPFWRLAPVVRALHSLRGVSLIVASTIIAEIGDLTRFENPGKLMAFLGLVPSEHTSGQKRRLGAITKCGNSHARRVLIEAGQAYSYQARISPLLLKRQEGVSKEVKDISWKCQVRLCARFRRLTATGKNRNTVVTAIARELAAFMWSIAKQVPISA

SEQ ID NO: 513257 - protein, 358 aa, unidentified
MKKILRQSVGIDIGKDELVSKFARLDDSFQQEIVSSQVLKNDRKGFEKLLLWVNRLKLNDIEVRFVLEATGVYYEGLACYLVDKGQKLSVVLPNRAKAFSKTLAIKTINDMTASESLALMGLEKQLDDWQKPGEEINHLKQLNREREQLIQERSMIKNQLHAEQHSAWSVERSLQRMKDRIKYINKQIKQVEQEMQQILQGNIKLKERIDKICTIIGVGHTTALAVVAETNGFNLIRNKKQLTSYAGYDIVEKTSGTSVRGKPHISHKGNKNLRKAMHYPSLAAIKHDPKLKQLYVRLLSKHGIKMKALVAVQRKMLVLIYILWKNDKAYDPEYETKIKYLGQPSKETALTELDHVRS

SEQ ID NO: 513258 - protein, 375 aa, unidentified
MKEKLRFLGLDVHGESIAVAIAEPDGEVRSLGTIPNRAESIRKLIRKLGTAEKLRVCYEAGPTGYVVYWQLAELGVQCEVVAPTLVPVKAGDRVKTDRRDAEKLARCYRSGDLTAVWVPDEGSEALRDLVRAREAAKQDQMRARHRLSKFLLRSGQRPPTGVRPWTRPYLVWVAQLRFTQIAQEATRQDYLHEVEHMRERVARLEQAITEAVKLASPALQQVINDLQALRGIADISAVTIAAELGQVSRFGSARQLMGYCGAVPSEDSSGKRTRRGGITKTGNAHLRRIVVEAAWSYRRPPGIWYGLRRRQESISEEAKEIAWKAQHRLHKRYMKLGAAGKDQRKIVTAVARELLGFIWAIGTRAETISKQQAAA

SEQ ID NO: 513259 - protein, 452 aa, unidentified
MKVMHERVAGIDVHKDMVKVAIRSPGDKRWARKTEVLTFGTFYGVLREMARELRRRGVTHVAMEASGVYTEPVYYALMEEDFDEVLVVNPAHVKAIKGQKTDAKDCARIAELLECGLLQGSYLPPPELKEMRDLTRYRIKKVQARTSEIQRLGKTLESAGIKLGSVASDITGTGPLEMIESLVNGERDGVVMAGLARGTARTPQKMASLSMALEGRFTSHHAAMCRLIIDQIHALRAAVAGVEMQITAKAAAWEREIALLKTIRGFGDATAWTWIAEIGPAPHQWFATHEKLACWAGLAPGNHVSAGKRRYGRVSDAGTYIKPALVQAAWSAVRVKGRLQARYNKLVRRMGGPKNPAARKKAIVAIAHTLLKIAYSVLKSGRPYQDPGADFYTRRESPARQQAYHQRQIQKLYPGCTVTVTITPPPGASTHAPPDAGQPGAPPPPGHVPEAV

SEQ ID NO: 513260 - protein, 272 aa, unidentified
MVEQVVVGIDISKAKLDVAILPGGEQFTVSNEPHGVAQLLQRLQPLGPSRVVLEATGKLERLAVSELAAAGLPVVVVNPGQVRHYAKARAQRAKTDNIDARLIAAFGRDLQPEFHPLPDTETQALAALCQRRNQLMGLAQMESNRLERAPHSSQKSIKTVLRFLQRQIEEIEREIEQSIKHSPIWQAKRKLLESMPGIGHVSCSILLARLPELGLFPRQRISALVGIAPYPDDNGDRHGRRRVAGDRAGGRRVLYMATLTAVRYNPILRTYL

SEQ ID NO: 513261 - protein, 388 aa, unidentified
MFKVGGWSLARWRGQGRLLKLILAPRRLMSKQIVSIVRPVLSDNKLTDSRQASVFCGIDVSAETLAAAVIEAGRPMEQREFSNTASGHKRLIAWLGRSKALARVSMEATGIYSMDLALALDAAEGIEVAVLNPKRAHDFAKSMMRRSKTDRADAAVLAEFSLRMEFVAWQRPSLSALSLRSVTRYTEALSREHTRGLNRLHTAQGSRGTPRCVVEDLKRALATLKRRIVKQRRAARRMIDSDAQTREQFRLLLGMPGVGEISALQILGELVLLAPDLKARQWVARSGLDPVHEDSGSSVHKPAHISRAGSRHLRRALFMPALAAVRCDPHLKAFYETLLARHKSKLQALIAVARKMLHAIYGVFKSGQPYEGKLLFPNIRLEVESIAG

SEQ ID NO: 513262 - protein, 355 aa, unidentified
MTSTKYIGMDVHKESISIAVRNSAGKVVMECVIETKASMILQFIDGLRGDLQVTFEEGTSAAWLYDLLKPHVTKLVVCDPRKNKSMREGNQNDKIDARRLAELLRLDHLTPVYHGEHGLRTLKELVRSYLTITKDLARVMSRVKAIYRSWAIPCTGKQVYAARHRAEWLGKINEPGVHRRAEFYYQQLDALRVLRQEVRRDLLAESKKQKAWKRLCEIPSIGPIRAAVLLGILQTPHRFRTKRPLWNYGGLAIEMHSSADHRRVHGQLERSTKNILVRGLNRNCNHDLKNLFKGAAAVASSKPGPFQEFYAGLVAKGMRPEMARLTLARKIATIVLIVWKKGVCFDASHLKPQTA

SEQ ID NO: 513263 - protein, 388 aa, unidentified
MNVGADKSEPLTAIQTNLGAIFVSLELSRSSWLITSLSPGGGEKMSKHSVPGGDFAGLMERFAQLQEKARRRTGQSFRIIVVQEAGLDGFWIHRALQNEGIESHVVDAASIATSRRRRRAKTDKIDGETLVRALLAYKRGEPRVCAMVKAPTPGEEDRRHLCRERKALIAERVRHVNRIKGFLFSQGVSGYQPLRRDRRQRLEELQTGDGRAFPQHLKALINRELDRLELLLKQIKTVEAARDALLAVKQTAKPAPAAMLLDIKGIGPEFAAILWSEGLFRHFENRRQIAAYAGLAPTPWQSGAVDREQGVSKAGNPRLRTTLIQLAWLWLRNQPRSALSVWFHERVSRNGGRLRKTTIVALARKLLVALWKYVTAGVVIEGVTMKVA

SEQ ID NO: 513264 - protein, 399 aa, unidentified
MFVGIDWAKESHDICVVDPAGKIRGRATIAHSQEGFDELTKHLGRWAEQGEILVGIERPEGRLVDRILEAGHPIVLIPTFAMKDLRRRYAVGGAKSDPGDAYVIADVTRTDGHRLRHLEPLSEETRALRSVVRARGDLVDQRVALGNQLRACLQAYWPGAAVIFADVCSEIALAFLERYPTPDAAARLGEVRLASFLKKAGYSGRRSAIELLERLRSAPEGIGGVEAEARADSVRAMLRVMRSLNRSIKDLDRAVVAHLGEHPDAEVFTSLPRSGRINAAQMLAEWGDCREAYPCPDAVSMLGGLCPVTHASGKHRDVAFRWACNKRLREAITTFADNSRHASPWAADIYRRAVGRGCDHPHAVRILARAWVRVIWRCWQDRRPYDPALHGAAVLLEAA

SEQ ID NO: 513265 - protein, 401 aa, unidentified
MISVGIDVSKGKSTVCILKPYGEIVASPFEVMHTESELENLTQMLQRLDGEVRVVIEATGIYHLPVLSALQEQEVYVAVINPFEMKKYASRGLRRVKTDKKDAITIANYGIDNWYRLKNHQGSDGVYSELKLLGRQYCHYMELHVKALHELTHMLDYTMPGVKKEFHSWNEGNGKDKLSDFVERYWHFDNITAMTKEDFIEDYISWAAEKKYHQNRSKAAELYDLASDGISTLSANTPSTKMLVLEAVRVLREIDSTLLKIITRMKELAKTLPEYKTVRAMGGVGDVLAPKLIAEIGDIRRFRSGKALIAFAGIDAPPYESGQFVGTNRKISKRGSKVLRKIGYETMRVLKTHKAPEDDAVYRFILKKEAEGKSKRQAKIAGLNKFLRIYYARVSEVYKAL

SEQ ID NO: 513266 - protein, 399 aa, unidentified
MLAVGIDISKSKSVAAILNQDGSMHTSPFEFHHTQPELDAFVKYILNSKQSATILMENTGHYHYPVLKAFQEAGLPVCMVNAYQIKKFGDMDLRKAKTDKKDAVRIARYALEKSYSLVPYTSMEQKYEDLRFLARQYNQRMLTLKTNKVFLLNLLDETMPGITNILPLTTRTPETSLSVLFINRFKSYDRIKKMGKSRFLDAFEKIARKSRNRQTKTYGLAIYEAALRNITTRGENEYTLAAQDQCLELVCESQKAADSIILKMKTLAETLPEYAVLRSMAGVGNRLGPLILAEIGDIRRFHSGKALNAYAGNDAPPYQSGTFESHNRHISKRGNAALRKYCFEVMQALKLTRPQNDPVYLFLLKKEQEGKPYNVAKMAGVNKFLRIYYARAMETLKQQ

SEQ ID NO: 513267 - protein, 396 aa, unidentified
MSTVGIDIGGSTHVVARCRTGESRADHEVLRVAQSRAGFDGLDAWLDRQPDPVTLVVMGSSGHYWMPLASHLAHRAVPVALVNPLAAKYFARSRLGRTKSDPADARSLAEMAMRDAPAVRDPFAGVELRQAARFAMTLVEEQAKVCQRLHRLVELGFPELGEVFEDPTCLTAREVLRLAPTAAAARRRRTSTLADANGSPGHRRLGPAKAQRLHDLAGDSIAVPELEAEVTFEIGLLLDRFDLLERQIEAADAHVASLLDGELARRLRTIPGVGPATCAALIAEIGDIGRFETFDQLLAYAGVHPAERSSGHKGASPETSWHMSKAGNAHLRAAAYRIAVVGTTHNPVIAAVYRRKREAGKSKMNALGHCMRKALSIVWGVWRNGADFDPSWGARP

SEQ ID NO: 513268 - protein, 337 aa, unidentified
METYVGLDVSQKATAVCVVDRDGGVVWRGTVALNPDAIADTIKQQAPEPKRVGMETGPLAVWFYHGLRERNVPVDCIHARHVHAALATQLNKTDSNDAHGIAQLTRSGWYRAVEIKSIASHEVRLLLGARSQLISMRTSLYNQIRGVLKTFGVVLPPGTRSTFERLVEERTPSTSLIRGVIGILLDSWRHIDGQVRETDRALQRIARASDVCRRLMTVPGVGVTTAVAFAAAVDNPERFRRVGDIGPYLGLTPKKYQSGEVDHNGGISKTGCRLTRHMLFEAASALILRHKRDCALRRWAQSLIPRIGLRKALVATARKLATLLLSMWRSGKEFNPG

SEQ ID NO: 513269 - protein, 433 aa, unidentified
MKVKYEDRLKQKLLAITPDTLVVGVDIAKNYQWARFVDFRGIEHSRALKFKNRKGGFEIILARIQEICKKENFAKVVVGMEPTGHYWKVFANCLEKQVGITVVLVNPYATKQAKELDDNSQTKSDKKDALTIAKLVKDGRYFELYLPHDIYAELRGLSTTRTGLNKRKNALKNTITAILDEFFPEYEEVFKHPLTGKASRHILKTCPFPKSILELGEEGVTAEIKKAVKKTVGRKKAGQLVEAAKGSVGVDYGEEAARLKLRLMLEELELLEKQTEELESQMESALEKTGYAEFLLSIKGIGVVTLAACLGELGDPTRFESPRQMSRMAGYNLVEDSSGKNKSGTKISKRGRKNLRSVLYQMSLTMVATNDEMKQLYHYLKTREKSPLRKMQALIVVSKKILTLIHTLAKKKESYDPEKVFGTVRREQFKAAA

SEQ ID NO: 513270 - protein, 513 aa, unidentified
MEEPLEKLATTAGEQRRRAPVARLAKLREFGSGFDTNNKYNSPDELRTRFRSELEPGLGYAHSGADDQRLVYTACDPRLQPNERIMSTNSHSNIETAAADTTLVSPQAWIGLDWGHRTHAFALHDLTGFAEVGTIKHSPESLHHWLRELAQRYGGRPVALAIEANRGAVVDGLRQYPWLIIYPINPVTSARYRRAFTPSCAKDDIPDARVLLDLVRHHAHKLRPLQTQDEQTQKLARLVVARRDMVDRRTQLLNQLTSLLKSYFPQALELIGELNSTLAIDFLTRWPDLISLKASPASAIKRFYCAHNLRRPELLTTRVKQIQEAVALSTDDSLIDIAGLQLRLLLDQLRAFRKHLPIVEAEIKTAFAAHPEAHLFRDLPGAGAQLAPRLCVAFGTLRHLYPDPASLQKFAGVAPVREKSGSQLWTHWRWLAPTFLRQSFVEWAGQTVVFSTWAKVYYQRMIAKGSKHHSILRALAFKWIRVLWKCWQTRTPYVESRYLKQLLHRKSPNAIPA

SEQ ID NO: 513271 - protein, 456 aa, unidentified
MGYRSRLSRGDARRNARLTRLRGIVRPELAVLAIDLADDKQAVVVADHDSRVLARRTARCRVWQLDQVLSWGQEIARAHGFAGIVVACEPTGHRWRIVAELTAALGLELVCVQPLLVSRAREAEDFTRDKSDAKDATIIARLASELRCYLPERPDATWARLRQLGARRAELTTRATAASQQLRDLLEAVWPAVVAAAAQPLDSLTWRAAVRVAVSHAGGDPASLARLGRARFARAVAAELGRWGGQRRCHRILAAVWAAASDPTGVAAQRPGALERAGLVMDDWHGALTALANLETRMLAVLDALDLTGLVTSIQGLSAVGAAAILAETGDPARFDTARALVKHAGLCPRDNASGAAAGKTPSRARPPAAAGGGLAGGVGRVAPQPGPCRPLRPLDRPPGQPAHRRPGPYRAGRGPAAPVVGRGHQARALGSGHRRRRPWQAGRQGGDRPRRVRPG

SEQ ID NO: 513272 - protein, 318 aa, unidentified
MARTMTIVGIDVAKDKVDAAIRSADAAQSFAATAAGRQQLLNWLHDHAVTRAVMEATGGYERAWAKVLREAGFEVWVVDPKRVRYFARSAGRLAKSDPIDADMIARFGEAFTEARAAQHDPERQELDQLVSFRMALTALKAQLGNQEEHEPPEMVRKACRTLQKALHTQLCGIEAAIADKIERTERFAERAEIIQSVPGLAAASTAGLIALLPELGLASNRAAAALVGVAPYDDDTGKHRGRRFIKGGRHKLRKLLFIPIVGAPTRHNPVLKAYYQRLIAKGKAAKVALIACMRKLIVILNTMLARNEKWDPAKQALA

SEQ ID NO: 513273 - protein, 343 aa, unidentified
MDQYIGLDVSLKETAISIREDGKRTWRGKCPSDPKLLAEMIRKHAPHAKRVVFETGPLSTWFYHALTAEGVPSICIEARHAQKILNETLNKTDANDADGLAHLAEAGFYKAVRVKSFDAMLIRTLVGARNQLLGISTQLSNQIRGLMKTFGLIVPKGTGRVFDGNVRELLDENVGLARIILPLLEAWHDIRTRAADLGRQLLIAAQESRATRQLMTIPGVGAVTAVSYVAAIEDPDNFRTSRSVGAWLGLTTRRYQSGEVDYGGHISRKGDNHLRGLLYEAATVILTRTSARNESSLRSWGIKVRERLGFKRAAVAVARKLAVIMHSMLKTGEVFNRSAGAIA

SEQ ID NO: 513274 - protein, 361 aa, unidentified
MNTKEKVVFVGLDASKATLAVSVADDGRDGEIRDWGTVSTDPISVERLLKKLAARFDRVEVCYEAGPTGYGLYRQITAFGFTCYVIAPSLIPMRPGERIKTDRRDAERLARLLRAGELTPIWVPDETHEAMRDLVRARDSAAQDQRHKRQLISAFLLRHGRIYHRPKNWTMRYRRWLQRQSFGHPAQQIALQEMVLAERHAVERVARLTIGIEELVLSWKLGPVVEALQALRGVALISAVTFMAEIGDVRRFENPRKLMAYLGLVPSEYSTGQTTKRGGITKAGNSRVRRTLVEGAWTYRFPAKIGERKLYVLQKLPPEIQDIAWKAQSRLTARYRRLSQRGKKKTVITTAIARELSGYCP

SEQ ID NO: 513275 - protein, 339 aa, unidentified
MQLYAGLDLHSRNTYIGIMDQEFKHVFGKRVPNKLPLILKTLNPFQDQLKGIVVESTFNWYWLIDGLMDAGYQCVQLANPSAIQQYEGIKHTDDQHDAFFLAQMLILGILPQGYIYPKEDRPVRDLARKRLFLVRNRTDHILSLQSLIMRCSAQRFSANEIKKFTVDDLQHLLQQEYIVLSAQANLDTIGFLSQQILRLEKAIKKKVKLKKAFQQLLTVPGIGLILAMTIMLEVGDIGRFPQVGNFASYTRSVSSNRLSNGKSKGHGNRKNGNRYLSWAFTEAAHLSRRYNEHFRSYYNRKVAEANTSLATKALSNKLARICYYIMRDQVPFRKELQSH

SEQ ID NO: 513276 - protein, 340 aa, unidentified
MQPYFVGLDVHKQVIAFCAKMAEGGIVAEGTIAATRSALDEWVQTVPRPWQGAMEATMFSHWIYWHLKPHAERLHMGHPARMKAISAGKNKNDKIDARTIADLLRCNLLPECFVISPELGALRQQLRFRRLMIEQEVMFKNKTAGLLMEAGVEYERRRLHGKRYFAELLRQNEWIGSQMRPLLEYNREQIESLQAMDRRLLRMLEGHPRLKARIECLQQIDGVGPVTALTWALEVGTPERFGSLKKAMSYCGLTSALRESAGKQKRGPISKQRNRHLQCLLIEAAKIAPLYNEKLQETHRKAMEKGVHKNRATLAGARKLVAYLLAADRAFFLQSAAMPA

SEQ ID NO: 513277 - protein, 343 aa, unidentified
MTIIRIGLDTSKHVFHVGVDEHEQPVLRRRLQRSQVEKFFAKLPPTRIGLEACGASHHWARVLRSLGHEVVLIPPQYIKPYVKRGKNDAIDAEAICEAMSRPGMHFVPIKSRDEQAALMLLKVRDLLMKQRTMLTNAIRGHAAEFGVIATKGPQNLAELLERLGEDANVPAPARELLNSLAGQIAALEVRLEALEAKLKAHHKADPRSRLLATIPGVGPITALSLTLKVPDATVFRSGRHFAAWLGITPREHSTAGRQRLGKISRQGDEGLRQSLVLGATAVIQQVKRRFKAQRVSRTDSPWLLQLLARKPEKVAAVALANKMARIIWAMLVSGELYRQPQAV

SEQ ID NO: 513278 - protein, 342 aa, unidentified
MKQYVGLDVSQRETSVCVVDEAGRVLFEGKAKSDPGALAALLRKRAPQAERIGFETGAMASWLWHELRRVDLPVVCIDARHAHAALSVRMNKSDQNDARGLAELVRVGWYREVKVKSEESQKIRAILVARFRLVAMRRDIENQVRSLIKEYGLLLPRAIGLQFRNQVCELLGEDHQLLGVIAPLLLIHEQICKQQSKFDDEVRQLAKSDDTTRRLMTVPGVGVVTALTFRHTIDDPSRFRSASSVGAYLGLTPRRNQSGETDINGKISRWGDRLLRTYLYEAATVLLYRTKKWSSLKAWGMKLAKRIGMRKAKVAIARKIAIVLHCIWVDGTSFDWGQAKEA

SEQ ID NO: 513279 - protein, 392 aa, unidentified
MLFVGIDVAKSKHDCCIIDSDGVIITDSLRISNTKEGFDTLYTSIISALDSSDFSNVKIGLESTGHYSTNITNYLYSKGFSITVLNPLVTNAFRKAGTLRKTKTDKCDAKVIATMLFSDESKSYSPSSYQIQELKSLTRHRYRMIGYRSKLKLSVTRLIDIIFPELPDFVWSIHQASCYQLLLGLPSPEVISTCHLTHLINVLSKASRGKYGREKALQLRELAANSIGSANRSLTFELQQTIRLIQAVQSEIDTLDKQIKLVVDELNTPLITIPGIGYTIAAIILAEIGDINNFSSPAKLLAFAGMEPSTYQSGKYNASKTPMVKRGSTYLRWAIMQAARLVSMRDSTFATYMAKKRSEGKHFNVAQSHVGKKLIRVIYSLLKNNTAFVPQM

SEQ ID NO: 513280 - protein, 385 aa, unidentified
MNQTSCFATSTHALHCALELSKKSWLLAIQFPDREQPSVYSIKGGDTEKLMAKLTAARDCWAKVSGSLPVITLCYEVGYDAFWLARFLKARGIECLVIDPGSLQVNRRGRRVKTDRVDVKMLLRTLIAWCRGERHVWSPVRIPSVEEEDLRRSHRERSRLVRERTAHINRIKGLLFAQGIRDVNVKSQYKTLAVDKLLTADGHRLQPRLASEIARELQRLAMVQEQIAKIERERDTAPTPCEATERKRQLLLQLKSIGPAISALLSREVYYRQFANRRQVGSFLGLTPSPYSSGEEERCQGISRAGSGQVRAIMIETAWLWIRHQPKSALTRWFVERTAGQSTRMRKIMIVAVARKLAIALWRYVEQGLVPQGAILNPPTTGRAR

SEQ ID NO: 513281 - protein, 421 aa, unidentified
MRAFGLDVHRDFCEVAVAEEGRVRSAGRIPTRVPSLELFAESLVPGDVVAVEATGGTDKIVSVLEGHGVRVVVANTRKLKSITEAKAKTDRLDARTLARLLVSGLLDEVWTPDERTRTLRRLTNRRERLVRARTRAKNEAHGVLARNLCERPPVTDCFGKGGRRWLARLELPVDERLTLDGCLRQVDFLDDEITALDSEIARSALAWPEVLRLMTVPGVNVQTAATFMAAIGDIGRFSSPGKLVSYLGLDPRVRQSGSTPARHGRISKAGASEPRHMLGEVAWKVMLTPGPLRAFFERIRARRGPQVAATATARKLAVLFWHLLSREQDYAFARPAMTRHKIRRLELLAGAPPQKGRKGIAGGKSKAVFEAERELSRQAEAAYRRLVSDWRSAGPAKTGAGATPGRASSRPSKGKAARQTP

SEQ ID NO: 513282 - protein, 375 aa, unidentified
MTITTATTEETAITSISQNPAPDRHCTIGVDTHKDVHVAVALDQLGARLEELHMPATAAGYAQLEGWATGLGPVKVFGVEGTGSYGAGLARFLSTRGHLVVEVNRPDRATRHRIGKSDPIDAEMAARSVLSGVATGTPKHGDGEVEMVRMLKMAKDSGVKARTQALNQIKALLVTAPAELRETLDGLPVGKLLDRCAALRPGELSCPTAVAKHTLRLLARRNLELRVEVKGLEEQIRLLAAVAAPKLLDVFGIGPDGAARFLVTAGDNPHRLRSEAAFAALCGSNPIPASSGKTQRHRLNRGGDRQANAALHRVVVVRLRWHEPTQAYMTRRLAEGKTKAEIIRCLKRYVAREIYAILCPPLAAASTGKNLARAA

SEQ ID NO: 513283 - protein, 349 aa, unidentified
MDKITSVGLDLAKQIIQVHAVDGAGRVVLRKAVRRERLLALLAQFPCSMVGMEACSGAHHWARELSKLGHEPRIMAAEFVRPFRKSLAAKNDANDAEAVCTAMRQPNMRFVAVKTVEQQGLLCLHRVRQGWMEERTALINRLRGLLAEFGVVVPQSATALQRALPTLIADHETRLPSPAQRCVQELADHLRALTARIASFDREIGQHAHGNDAAQRVTALTGIGPITASAIVATVGNASDYRNGRQFAAGLGVVPRQFSSGGKTRLGRITKRGDAYLRTLLIQGARSTMQAALRQPPTQRDRISAWIVQLAQRVGYHKALVAIANKHARIVWALLARGELFDRKHGGAH

SEQ ID NO: 513284 - protein, 382 aa, unidentified
MKGNVCGLDVHKDNVFVCILKENGEKILQRVGILTPELDALRDMLVSHGVGEVCMESTSIYWMPVWRVLESDFHLWLVNPLAIKQLPGRKSDVKDAEWIATCLKKDLVRGSYVPEEVIQQLRQYNRRVFDINKETVFLHNKLDAALQRCNIRLSNYVSNVDTKAYREVVEDLSKGVTDPGTLLGHIHKRTKNKWGEDVLRSALTGVVSEVDTELIGMYREELELLRTQKAKCLSRMREICQKHFPKQMKDLQTMPGVREQSATQIIAEIGVDMRTFLTAAMLVGWAGFKPRNDESNKKLKSRSITHGNKYLKKLMVECAWGGTRTQGCFYSQFSYHQTQVRKKNAMKVRVAVARKQLVGIWHILSEGCTYKEYSEKKEEGES

SEQ ID NO: 513285 - protein, 406 aa, unidentified
MFSCDVSMGFSFPAHGQERKKTFSTPSGLRPRLDRIPIHVALKQEARRIFLFNSNNCQRRKSDLASARMSNQETTLMRTQTEKNVNSPIYIGVDVGKATLDAHRFPDHASRQFANSSEGWKEFLLWIKDDPPKLVLCEATGGYEKNFVIALADADVPFRVVNPARVRDFAKSYGILAKTDKLDAKILAKFAAERQLEPQKIQDETQQKLKELTGWRRQLVKAKTMHRNQLEHASYETVVKGTKSLIEQINKQIEMVEAELSQLIESDPQLSNLNDILQSIPGIGQEVARTLIVELPDLGRGDPAKLCSLAGVVPLNCDSGLFRGKRRIYGGRGTLRTVLYMAALTAVKCVKADNVFKQLYLRITATKPHKVGMVAVIHKMLIIAHALVKNNEKWENKLLENTPGPH

SEQ ID NO: 513286 - protein, 337 aa, unidentified
MNYSGIDLHSNNSVVTVIDETDRVVAEKRLPNDLTKILAFLAPWQAELAGVVVESTYNWYWLVDGLQAAGLSVHLANTTAIKQYDGLKHSGDETDARHLAHLLRLGILPTGTILPPEARSVRDLARKRMQLVRSRTSHLLAVENITARHQGARLSSAQVQRLTPEAIDQMGLPAEVALAMQANLAVIQTLSAQIGLLEKRLAEKLGPRAEYVLLKTVPGIGPILASIILLEVGSIERFASVGNFASYARCVDSQHMSNGKKKGEGNIRNGNKYLSWAFIEAANFALRFCAEARRFYERKKAKTNPILARKALAHKLARACFHILKECKPFDMTRCFA

SEQ ID NO: 513287 - protein, 400 aa, unidentified
MMTPDDIDVWVGLDVGKSAHHAHALDHDGNTLYDKPLKQDEKAIRTMLGKLSKHGRVLLVVDQPNTIGSLPLTVARNMGIAVAYLPGTAMRRTAQLLPGDAKTDRRDAHVIAWAALKLPETLRDAGPDDETLAALKLLAGHDEDLAHESTRHVNRLRSLLLQTHPAFERALKGERITRDATLALLERYGGPMGVKRAGIEDVKDWAKSNGLRAGRIIDDMFKAIGEQTVTVPGTLMAETIIPSIAHDIKTIKDRRREVGRQVEKLLEDHPLLTVLTSMPGIGVRTASNILLGIGGDIANFKSSAHLAAYAGISPVTGQSGTSIKGERPSRRGNKRLKNALWQTAFVASTKHPPSVAYYKRKREQGKHHNAAIICLARRRCDVIYSMLKNGTLYQEPALAA

SEQ ID NO: 513288 - protein, 350 aa, unidentified
MLHAGLDLSRKRLDVCLLSEHGELVEEFAVPPDADGLRGLVRHVAQHGAPVRGVIESMTGARFVHDTLEHLGWEVLIADAQKVKGLAPLACKTDKIDARVLAVLSERELVPAIWLPDPRVRGEREQARFRLHLVKHKSMLKHRIHSTMLSFGHPCPVSDLFGAAGRELLERLEIPDPWRQTVDASLLLIDDLERQIAQINHDLKASGAEHPYVPLLLTVPGIGWVLAFTIASEIGDITRFPTAKKLCGYTGLCPRVNQSGEKDRRGPLTKQGPKYLRWAMLESTMHALRHPAYAERYERNKKRLGKQRGARVAQIDIARKLTEAIWHMLTNNQPFAPTPASGGATNRLAA

SEQ ID NO: 513289 - protein, 427 aa, unidentified
MKYTQNEKILQVTEETLIVGVDIASEIHYARAFDHRGVEVGRLLKFSNDAEGFGQFTTWVGAIEEKCSKTKVMVGMEPTGHYWFNIAQQLKDHSMKIVLVNPFHVKRSKELDDNNPTKNDRKDPKTIAMLVKDGRYMEPYIPEGIYSELRIAMETRWQIVKQLNGIRNRMKRWLSIYFPEFNQVFGDWEGKAALIVLQDFPTPVRILEKGVEGIVGRWKQDKLRAVGRKRAMCLIEAARQSVGVREGLMAAENDLINMLENYKLQMQQYERTMNMVEQLVKQIPGLDEMVKIKGVGLITAAGFIAEVGDISRFEHPRQIQKLAGLNIKENSSGKHKGKSSISKRGRRRLRSLLFQAIMPLVANNKGFQELHSYYTTRSQNPLKKKQSLVLLSCKLIRVFFALLTKGTAYDQDKMMNDIKRPLLQEAA

SEQ ID NO: 513290 - protein, 354 aa, unidentified
MFQTPNTAIAVIGIDIGKNSFHVVGHDARGAIVLRQKWSRGQVEARLANIPPCLIGMEACVGAHHLSRKLASLGHDARLMPAKYVRPYSKGQKNDFNDAEAIAEAVQRPTMKFVATKTAEQLDLQALHRVRERLVSQRTGIINQIRAFMLERGIAVRQGIGFLRTELPTILATRTDALSPRMLRVIEELAGDWRRLDQRIDGLSGEIEALARQDQACSRLMTVPGIGPIISSAMVAAIGTGDVFSKGRDFGAWLGLVPKQISTGDRTILGKISRRGNRYLRVLFVQAARVVLARIKHLERYGLKSWIEAAKKRLHPNVLAIALANKLARIAWAVLAKGRAFELTRTDDAGVRPA

SEQ ID NO: 513291 - protein, 352 aa, unidentified
MRWIGVDAHKRVHQAVALDEGGNPTAQTAPNTPAGWAALLQWAQAGAERAWAVEGAGSFGRGLAQFLAERGERVYEVNPRRTAQRRRSARRPGKRDRLDALAVARLLREEAATLPVVLPEDPATATVQLWSRLRDDLVADMTRLRNRLHALLLLCDPQYPRHVPRLTTQKGLAACLAYTAPGDGPLPRARERAVHQAAAQLALLARQERELRAELEALVAARFAPLQAIEGVGALTAAGLIAELGQARRGLTEAQLAALAGVAPLEASTAGGVRHRLNRGGNRRLNRLLHVIALIQARCYPPAQAYLARRQQAGRTAREARRALKRHLVRRVWRQWQACWSRPPEAALPLAA

SEQ ID NO: 513292 - protein, 331 aa, unidentified
MSNIIGIDVSKASLDCAYLRDADQKRTQRFRCDNVVSCFASLVAWAEARSGLPVESFAFVIEPTHVYHEQLARFLYNTGATVYLVNPGRVRKFAEGIGILSKNDLVDAELLVRYGLLARNLIAYEPVAQEVTDLRSLLNRLDVLERNLRSELNRQEKVGKTMVFHRLERQSIARAVKRLKAEVITFKRAIRECIKSTPSLQQSFNLLCTIPGVGAKTAWIMIVILASRPFISAPEVASFLGLNPIEKRSGNSQYRRPRLSKSGSGHYRQKLYFPAMVATRKNPDIKALYERLLAADKTKMCALGAAMRKLVHICYGVMKNQTPYQVQTTPS

SEQ ID NO: 513293 - protein, 411 aa, unidentified
MDTLYPRCAGIDVHKKTAVVCVRLADGSGKPRQQVRTFTTLTGDLLTLADWLAEQGVSHVAMESTGVYWKPVYHLLEGRFEVLLVNAQHIKQVPGRKTDVKDCSWIAELLQHGLLKASFVPPPAIRDLRDLTRQRTQLVGEKTAVANRIQEVLEDANIKLASVASDVLGASGRDMLEALCAGETDPGKLAQLARKRLREKIPQLRLALAGRMTDHHRFLLRLHLDHLNHLEKLIGQLGVRVEEVLAPFAGAAGRLMTIPGISQRVAEVVVAEIGTKMEQFPSAAHLASWAGLCPGNHQSAGKRKGGRTTKGDRWLRTILVQAAWAASRTKGTYFQAQYQQLARRRGRKRALVAVAHTLLVVIYHLLKDGTTYVELGPDHLGRQDPERLTQRLIKRLERLGHKVILEPRPAA

SEQ ID NO: 513294 - protein, 457 aa, unidentified
MKRKQQQKPRKRTEPIEIVHPNAAGLDIGAREIWACVPPDREGETVRVFATFTPDLHQLADWLVSHQVDTVAMESTGVYWIATFEILEARGLEVYLVNARHMKGVPGRKSDVADCQWIQKLHALGLLTASFRPDSEMRALRTYLRHRAELIKDRVPQVQHMQKALQQMNILLPQVLTDTTGETGMAIIRAIVAGERNSVTLAQLRDPKCRFPEETFAKALSGDWQAEHLFVLHQALALYDFYTAQLLRCDEQIQQLYSTLKPRWDGPVEPAPPPKPKRRNKNEPASDVAAEIIRLTGVDLAAVGGIGPSLAQTILSEIGTDMSKWPTDKQFTSWLGLAPHNDISGGKILRSRLLPTHNRAGQAFRQAATAVSRGATEFGAYYRRKRAQGGPMFAQVATAHKIARTVYYLLKHHVQYADAGAEVYEAKQRERELAYLKKKAAKLGFTLTRPEPMPLPA

SEQ ID NO: 513295 - protein, 388 aa, unidentified
MQFAADRLEAPTAIRTDLGAIFISLELSRSSWVITSLSPGGGEKMSKHTVRGGDVAGLLKRFAQLREKALGRTGKVFPLIVIQEAGLDGFWIDRVLQNEGIESHVVDPASVATSRRRRRAKTDGIDGEALVRALLAYKRGEPRVCSMVRLPTPEDEDRRRLCRERKVLTMERVQHVNRIKGLLFSQGVSGYEPLRRDRRERLDALQTGDGRPLPPHLKAQVRRELDRLELLLAQIKAVEAERDVLLAAEQTKAPVAPAMLLGVKGIGPEFAAVLWSEGLSRPFENRRQVAAYAGLAPTPWQSGSVDREQGISQSGNPRLRTTMIQLAWLWLRHQPDSALALWFHDRVKRNGGRLRKITIVALARKLLVALWKYVTAGLVIEGVVTKTA

SEQ ID NO: 513296 - protein, 405 aa, unidentified
MNHPAPKQSITSSIEPAPGLGANGRAVGLDLHPDSFAAAILEGRDPLRARILQSVTRQPLEALGAWAARQTRAEDVLILEASANSFAIAERLMALGRQVFILESHRAGQIGQSYLANDKVDAVKIARIYLSGLAIKVWPPDAETRARRELLSTYQRCVKDSTRAQQHLRSFLNEHTLRLRKGFRLCRPEALSRLLTLKEWSPRQKLLLGEMHGSLIAARERRTRLRRMMALEIEETPDFLRLYKLAGLNLVTTYALVAIIGDVTRFATSKKLVSYLGLNPSVVESGNYEGGGALHSHGRGSLRALLIQASKRLLTTVNPLQKWGLSVALRRGQNKAAVAVARKLTVAIWHVLQGHWNKTLEETTTLLTKLMKLATELGVPTLKELGYASKLAFQEQKLEVLRTHP

SEQ ID NO: 513297 - protein, 313 aa, unidentified
MKKTICGVDVSKARLDVCIEPGHWFTSFDNDTAGIAKLAALCREHAVELVVMEASGGYERKPFVELWERGISCALTNPRSVRRYAEAMGILEKTDRIDSSVIARFADAKNLAPTPLPSGAQQRLKALVARLRQVTDDLIVQKQRRASLFDNTEMRESIDEVIALLKRQSRKLEGEIASMIDDDPLWAKLAETWREVKGVAGRTVARLHAELPEIGILSNKAIAKLTGLAPIANDSGKRKGKRPTRGGREGVRSILFLVAATAARYDKSLADFRARLVAAGKEKMVIRIALARKLLVRLNAKARDARVAYANAT

SEQ ID NO: 513298 - protein, 459 aa, unidentified
MGHARARKISAQLVEDEDYQLRYERVAGIDVAKAKADVCTRLPPAREGGRRASRVEEVPATAREVLALAGRLLADGVQLAVMEATSDYWRLWYYLLEGAGLRVQLVNPASARQLAGRPKTDRLDAQWIARLAEMGLLRPSFVPPPEIRALRDLARTRLQLVRDRTREWQRLEKLLEGALVKLSSAVWSLARTQTARLILEALADGERDPRALAALASGHVKGGRAAIEAALDGMMPGRHHPGLIRIHLDHITFLDRSVRAVEEQIEAALDAVPAAWGTDPSGETGPQAGRGEDAAALPAAERLAEIPGVSPQLARAIIAETGLDMTRFPTAAHLASWAGLAPIARQSGPRTRKPGNGQGDAYLKGYCTQAANGAARTQTFLGERLRRLSKRLGGNRARCAVARSVLVIIWHLLSDPAARYTDLGPGWHARKTDRDRKIRAHLRQLQALGLDVTITPATA

SEQ ID NO: 513299 - protein, 341 aa, unidentified
MGIVTVGIDLAKNVFALHGVDQIGKAVFIKPKVVRGQLLEMVAQLPPCLIGMEACSGAHHWAREFCRFGHTVKLMAPKFVAPYRMSGKRGKNDAADAAAICEAVTRPNMRFVPVKDVDQQAILCLHRTRQGFIEERTALYNRLRGLISEFGIVLPQKVERLRREIGAHLEELPGWANRCVGDLLAYADRLNERIEEYDRAIAEAARQDARSRQLMQLPGIGPTTASALVASLGGGHDFKNGRQLAAWVGLVPGQYSSGGKARLGRITKAGDAYLRSLLVMGARSVIAGLGEKQDRFSRWARSLVERRGYWKAAVAIAAKNLRLSWAVMKYGDDFRLTAALA

SEQ ID NO: 513300 - protein, 357 aa, unidentified
MTQSKGFSFKGQNIYVGIDVHLRSWSVTILSETSVLKRMSQGADPDALHRFLTSHYPEAEYYSVYEAGFCGFWIHDRLTELGIHNIVVNPADVPTMSSEKLRKTDAVDSKKLAVSLRAKQLKGIYTPDSEALEIRSLIRLKNSITKDMTRQKNRIKSQLRYLGIEIPVEYLEPYSNWSKRFLNWLKQVAMRTPSGRQAMDILIMQFNALRMQKAEMTRKLRALSHTERFEETLELLMTVPGIGQTTGLALMAEIVDITRFANAEQLAAYVGMIPMCHSSGDHEGVGDITLRKHAILRSNIIEAAWVAIRKDESMQLCYLNNCKRMVPSKAIVKVARKLVNRIYFVLKRHQPYVNAVA

SEQ ID NO: 513301 - protein, 355 aa, unidentified
MNDAKYIGLDVHQATISATVLDSTGKLVMESILETKAATIPQFIHGLRGSLHVTFEEGTCAAWLHDLLKPHVTKLVVCDPRKNASMREGNQSDKIDARGLAELLRLNHLNPIYHGEHGLRSLKELVRSYLTITKDLGRVMSRVKAIYRSWAIPCSGKQVYAPRHRAEWLAKINEPGVRRRAEFYYQQLDALRMVRQQVRRELLAEGKKHQAWKRLCQIPSIGPIRAAVLLGILQTPHRFRTKRQLWSFSGFGIETQSSADYRSVDGQLQRARKQISIRGLNRNCNHDLKNLFKGAAIVASSKPGPFQEFYTELLSKGIRPEMARLTLPRKIATIVLIVWKRGACFDAQHLKPQTA

SEQ ID NO: 513302 - protein, 347 aa, unidentified
MRFYTRQHRHYCGVDLHARTMYVCVLDAEGNVLVSKDIASAPEPFLELIAPYREDLAVAAECMFTWYWLADLCAREGLVFVLGHALYMRAIHGGKAKNDRIDAHKIAALLRGGMMPQAYVYPQAMRATRDLMRRRNYLMRQRAELLAHITNTNHQYNLPALGVRPARPAERAGLAEHFAEVAVRKSIEVDLSVIEHYDRELPALERYLESNAQAHDPVALAIVRSIHGMGKVLGLSILYEIHDIARFSRVQQFLSYGRLVKPTKESGGKILGHSGRKIGNAHLKWAFSEAAVCFLRANQPAQALRARLMAKHGKGKSLAIIAAKLARAVYFMLRRGEAFDTERFFAR

SEQ ID NO: 513303 - protein, 401 aa, unidentified
MRCVFGIDVSKSTMNIAIIVERTTIKETKLIMNKEGFNTLSGLLGSFNNPEVVFEATGVYSRRLERFLSSEKVNYVCLNPLVAKKQLDNLRPNKTDKNDALGLASTQFIIHRLFSYQESPVYRKLADYSNFYQEVSKDLATHRNRLHRALQLVFPEIEDVLSNTKNDLYYFLVENFCQPKYVLTYSNSIYKLAELIKKGTRKQISIQRATKVAEKLISAAKNVYSAVDDDSPVFEQIDYIISKIQAESDEKKIVISKMVNLAQSLKEFDELLSIPGLGKTTVVQLIGELGDIRRFRNSNALNAFIGIDLRHYESGKYVANDHISKRGNTVARKILFKSVQSIAVVSHYHPSHINDFYQRKKKQSSERGTKKIAIATMHRLIRTMYHLVKFDQTYDYSLATR

SEQ ID NO: 513304 - protein, 363 aa, unidentified
MATKRRQHEVQIVGGVDTHGKVHYAAALNAATGKLLGDREFPATAKGYQQLLDWLRDFGTVLKVGVEGTGSFGAGLFRHLDSGGIVVIEVARPNRQARRLQGKSDPIDAINAARAVLAEVATTIPKPRDGKVEAIRLIRTTRRSAVKARRAAIGQLHGILFSAPEELRIKLAGYDRAALVERCARLRPDPDGSLADAGHVAKAMLRRLARRIHDLDSEIAEANEQLIELVTTTAPTLLKVFGAGPEVAGQLLTTAGENPHRLHSESALARLCGVAPIPASSGNTTRHRLHRGGDRAANSAIHMIVINRLRWHEPTKAYLARRTAEGKTKKEIIRCLKRAVVRELYIALKTDLPELPDRAREAS

SEQ ID NO: 513305 - protein, 407 aa, unidentified
MICVGIDVSKRKSTVCFMAPGDKIIRRPFDVKYTKEELQPLVDEIRVQAKYDEIKVVMESTGVYHLSIAYFLQQNGIFVSVVNALKVANFNKAENFRHTKTDSIDSTNIARYGIAYWAKLPQFDLNGDKYFLLKRLCDAYLNFSEERSRILLQLQSQLEQTMPGIFDLFGGFDINSGKDKLLDFLERYCHIEDIIAKSEAEFVASYCGWAKEKGYRSNESKAATIYAQAKNGIPSIPNNPIVRETIMWYVGLLRRADETLMASLTRMEDIAKDLPEYELVGEMGGVGRVTRVALIAQIGDVRRFKNKHSLICFAGLTPSIHESGKFRASQNHIVKKGPARLRKVLYQVMMSLVMHKIPKDDAVYRFIKKKEAEGKYKKVAKVAGMAKFLRIYYGRVMHLYRDLGLAA

SEQ ID NO: 513306 - protein, 360 aa, unidentified
MNEITRVGVDLAKRVIQVHAVNATGRVVAAKALPADKFAAWCVQLPAGCLVAMEACGGAHHWARKLRGYGLDARLIAGHFVTPYRMAGKGGKNDANDAAAICEAAGRPHMRFVPVKTPAQQALLAIHRLREGYKEERTACINRIRGLLTEFGIVFAQSPDALRLGLADVLEDASNELPGIARLALQEARLHWIELECHIASCDERITAHVRSDAQAKAAAQLSGIGPVTASALVATVGDFKQFKNGVQFGSWLGLVPRQNSSGGKTVLGRITKRGDDYLRTLLIQGAKSAVMTAHKRSDKISQWLVQLLARVGWQKAVVALANKNARIVWALLAKGREFDPNYVSVKPGEVPPTPVLAQT

SEQ ID NO: 513307 - protein, 348 aa, unidentified
MLAGVDADTGQVLSGRQIAADDGGHLQAVRWARNLSSERVWAIEDCRHVSRRLEEALLAAGERVIRVPPKMMGASRRGEREAGKSDEIDALAVARAVVKDGVERFPAAYLDERAMEIRLLSDHRDDLVRERTRIQNRLRWHLLQLCPELEARLPKGGLDRHVVLARIAKRLRAFAGDQRARVAREQLSAIRTLTREAGQLERELHRLVQAHRPALLAEQGCGTLTAAALIGRTAGAERFPTDAHFARQAGVAPIPASSGRVVRHRLHRGGDRQLNRALYMIAITRARIDPQTKAYLERKRAEGKTKREALRCLKRHLAVTSTVSSQCQLSIPTSRLRLSSTPQFRGGA

SEQ ID NO: 513308 - protein, 421 aa, unidentified
MDQTEDKEEIIARVAALDIGKAELVCCVRLPAPRERRKRLQEVSTHSTMTASLTELANHLVELGVQRVVMEATSDYWKPVFYLLEAHGLDPWLVNARDVKHLPGRPKTDVIDAVWLCKLAERQMLRPSFVPPLPIRRLRDLTRYRVDLVAARTAEKNRVEKLLEDACIKLSVVASDIFGVSGRAMMAALIAGERDPKVLAQLARKRMRTKIAQLEEAFNGHFDDHHRFLLARMLGRIDSIDADIAAVDEQIEAHLAPSAKAAARLDEIPGIGPTAAAAIIAEIGLDMSRFPTAGHLCSWAKFSPGINSSAGKTKGNGSTGHGNRYLARTLGEAAVVAGRTDTFLGERYRRIAKRRAKKRAMVAVGRSILVIVWHLLANDDARFTDLGPDHFTKHLNPDRQKRNHIRQLEALGYTVTLTPAA

SEQ ID NO: 513309 - protein, 401 aa, unidentified
MPDGIRWVGLDVHARESTVAVFDQATGEVVTRRVVGRPHELLPVLREIPRPARMVYEAGPTGYGLARRARAAGIELGVCAPSKTERPPADRIKTDKRDAIHLARLLAAGELVLVTIPSVEREQLRDLVRCREDIRIDLQRARHRLGNFLLRREIYWEGPGEAWTRKHRSWLTSIRFADHASQATMADYLHAHDVLIARRDQVEADLAQLAVSAPCAQAVARLRCLRGIDTLSALGLCSEIGEWGRFDHPDQLAAYVGIVPSERTTGQQRRLGSITKAGSTHARRLLIEAACHYRRGPVVGEHLERRQRGQAPEIINISWRAQRRLHARWRQLKDARRKPNGIVAVAIARELTAYCWEIATWTPHPDELPPASLPAGDTLTHTASVPPKHTPTTRRRLTNSR

SEQ ID NO: 513310 - protein, 417 aa, unidentified
MNENRKRYIGLDVHKHYLIALGVDERLEVVMPARRVELSYLESWMKKNLTRQDEVVLEMTTNTWQLYDELSAYVGSITVVHPPHVALITRSQVMNDKIAASILARLLAKGLLVGIWVPPQEIRELRGLVAQRQKMTRLSTQAKNRLHAVIQRHHLKPPAGNPFAKTNNGWWQALPLGRLEKMNLQSDLETLQFAEKQQSRLQAEMTSIVAENEEMGHLLHLAGFGVITAVTVYAAIGDIRRFVESKKLVGYAGLGSRVHDSGMTTRTGKITKAGRRDLRVALVEAAHVAANTHPHWKAELARLEPRLGYNKAIVAIARKLLISVWHILSEKTADRFAEPEKVAQKLLRFAYEVGKENRPGRQTAASFARDRMDALHLGSELTSIPWGAKKPIPLPPSALLKKESERRPKQMKSVNSG

SEQ ID NO: 513311 - protein, 334 aa, unidentified
MQSKNMEIIDVIGIDVSKLTLDCCVHSNGLQRKFANHPKGIAKMVKWGLAKSNADRGNLLFILEHTGLYSDRLVQMLAGDGCLMKVVSGLEIKRSLGITRGKDDKADARRIALYGYRTKEEGRPTKLPSATLVRLKRLMSLRRKLVGQRAGYMATLREQKKVLEADALLFWVQEDIINLLTWRINDLEREMNHLMQEDTELREMLRLLGGIKGIGKVTARFLIVYTSGFTSFDSWRKFASYCGIAPFPHTSGTSVKGRTKVSRLANLEGKSLLHQCALSAVKSSPEMKAYYERRLEMGKSKMSTLNIIRNKLVARAFAVIARGTPYVNTMRYAS

SEQ ID NO: 513312 - protein, 468 aa, unidentified
MFGSWSISGSGPAVSPEAQAPPASEPEPTALGYLGLDVGQCAVTACLLLADGREAVRRWSVPNTRPGAEALVGRVVELADQHGLGRLRIGLEATGLYWWPLACLLNDTPLLQGLQPEVYALNPNLVHGLKKVYADTGKTDPRDAFLIAERLRIGRLPAPFQLDMVYAPLQRLTRYRTHLSQTLAREKGYFLNFLFVQFSGFSQEKPFSDTFGPTSQALLEQFSTEEIAQASLEDLAAFIQEHGRGGFTDPEVVAANLRRAARESYQLNSALQPPLGLVLGMTRATIRILQAQLVTVDQTIARELRALPAHARTIDSVPGLGPVWTAGLVAEIGNIQRFTDDAAVAKYAGLVWPAHESGDFQAQDSRLSKAGNAYLRYYLVEAANSVRQHCPEYRHYYLTKFAQTPKHSHQRALVLTARKLVRLVDALLRTGSVYRSPTCDQNQEEVRTTPHAARPRPQRRARLVTSAS

SEQ ID NO: 513313 - protein, 344 aa, unidentified
MKILKQVAGIDVAQKELVVSLGRMHEDLTTEIYGFKTFRNTDKGFTELVAWATRFTTAEVAVSYVMEATGVYHESLAYYLTDNGNKVSIVMPNKMSNYQKTLQIKTITDKTASQAIASFGLEKKLDIWQKPKQIFRELRQLTRERDQLIDQRTVLKNQLKAERTEAFPNQRSIERMEAHIKLIVKQEKEIMKEIRDIIKQDKEVCKSVSLLCSIPGIGLLTAAIIIAETHCFNLIRNKKQIVSFAGLDVREKDSGTSVKKKPKISKKGNRHLRKAMYFPALTAIRHDERYKAIFERLVSKHGIKMKAAVAVQRKLLELVYIVYKTNKPYDKEYLKNQVINKEAA

SEQ ID NO: 513314 - protein, 340 aa, unidentified
MSNPAVIGLDIAKNVFQVHGADIDGRCVLRRRLRRSEVFMFFARLPKALIGIEACPGGHHWARELRSLGHDVRLIPPQYVRPFVKTNKNDAADAEGICEAVVRPNMRFVPIKSVEQQAAMMLHRTRALLLRQRTQLINAVRGHLAEFGLVARRGARNIRELADLVSNTSSEYLPDAARAMLVLLLEQVREAQVRVRQTEHALEAWAKQSDSCRRLMSIPGVGTISATALVLAMDDPKRFRSGRHFAAWLGLVPKQSSSGDRQVLGGISKRGDGYVRTLLIHGARSLTRWRRKSWQWLAELLMRRPTNVAAVAIANKTARTAWALLARGHQFQTMKTAEAT

SEQ ID NO: 513315 - protein, 370 aa, unidentified
MTKLATLFVGLDVHKESISVAHVPDDRRAEVTYVGRIGTRPADIDRLVRRLQEKADRLVVAYEAGPCGYVLYRHLTRHGITCLVVAPSLIPKKPGDRVKTDRRDAVQLARLLRSGDLESVYVPSVEDEALRDLCRAREAAVVTLKAAKFRLKSFLLRLDLHYTGRANWNDAHLRYLAKVVCPTPAQQIVFQESLRAVDEQVQRLKRLEAELTDLVPTWRLAPVVRSLQALRGVQDIVAVTMLAEIGDLTRFDNPRQLAAFLGLTPSEDSTGDSRRLGPITKAGNGHARRALVEGAWAYQYPAKVSPAIRKRLEGLPQSVQDIAWKAQVRLCKRFRRLVTRGKHPNVVVTAIARELAAFMWAIAKEVPLTA

SEQ ID NO: 513316 - protein, 313 aa, unidentified
MNRIICGVDVSKDWLDAHVRPVGVTGRFGNDAAGIAELAAFCGRHAVELVAMEASGGYERLAYLLLSELGQPCAPPLNARNVRRFAEAMGFLEKTDTIDAGVIAHYAEVRKVQPAAPPSPAQQRLKALVSRLSQVTGDLVANRQRRAAASSAETLDSIDEVIALLKRQQRSLAGEIASLIDDDPLWARLDVALRAVKGVAGRTVAVLMATVPEIGLISNKAVAKVVGLAPIANDSGGRQGHRPVRGGRSGPRAILFLIARIAARYDPHLKAFHDRLQKAGKPKMVIRIALARKLLVILNAKARDARNEFANAT

SEQ ID NO: 513317 - protein, 339 aa, unidentified
MKYIPVGVDIAKHLMQVHFVDEHTGEIIDKQVKREKFLEYFSNREPCLIGMEACGGSHHWARELQKLGHKVRLLKGRFVKAFVMGNKNDVMDARAIWLAVQQPVKSVAVKSEEQQATLGLHRMRQQLVKFRTAQINALHSLLLEFGETTHKGRAALAKEVPEALERLKERLPLYLINMLDEQYQRITELDEHLDHIEKQLQAIARQNETCQRLLNIPGVGPLIATAAVATMGDASAFKSGREFAAFIGLVPRQTGSGGKIRLLGISKRGDKYLRTLFIHGARAAALLTKEPGPWITELKKRRPASVAIVAMANKLARTAWAIAAHGRKYDKNHVSIRPD

SEQ ID NO: 513318 - protein, 377 aa, unidentified
MTKIRFVGLDVHAETIAVAVAERDGEVRSLGIIPNKLESIRKVIGKLGAAKDLKCCYEAGPTGYVLYWQLTQLGVACEVIAPTLVPTKAGDRVKTDRRDAEKLARCYRAGELTPVWVPDAEHEALRDLVRAREAAKKDQLRARHRLGKFLLRHGKRPTDAGKAWTKKYLEWIKTHVRFAQAALEATLQDYLDEVDHVAERIVKLEKAIDEAVSQAGPEIRAVIEALQALRGVAQISAATIVCELGSLSRFEGPRQLMGYSGLVSREHSSGGKIQRGAITKTGNAHLRRVLVEAAWAYQHRPNVTGYLLRRQKSLELADETKQMAWKAQHRLHKRYKALAARGKNKNQIVTALGRELLGFVWAIAVHTEAQYRQAKAA

SEQ ID NO: 513319 - protein, 347 aa, unidentified
MLADELDYVIGVDTHRDTHALAVVEVRSGGVVFEATALADGEGYGRVLRLADQHAPGRRAFAVEGTGSFGAGLTRFLVSHDERVLEVGRLRRERRSGKSDALDAIRAARSVLSQTRPARPRAGGEREALRALSAAREGAVTARRAGLCQLRGLLVSAPEPLRTELRSLSRAQLLRRLAAARPEHRQDPELRGTLLALRALARRLKALTAEERELAREIETLTRRLAPQLLEQPGVGPLAAAQILISWSHRGRITSEAAFARLAGVAPIPASSGLTVRYRLDRSGDRRLNRALHMILVTRRRAHAPTIAYINRRIQEGKSRREATRCLKRYLARNLYRLLENGPPLTT

SEQ ID NO: 513320 - protein, 414 aa, unidentified
MSKRYTTLEAAILVAVDIAKDHNEVLIELRHNQRRRFRVANTLEEYERLVAYVRQFDTPALVGFEATGNYHRPLAYFLHARGFELRLIPTMALARTREAMHNSWDKNDPKDAQVILHMLKTGLSQTWHDPLVSGTNDAQELSKTHHQVTLARTRVWHRLRNHYFPLYFPEIEHFIRSDHSDWLIQLLLRFPTPGSITSLAAENFAAQAWSLVGRKVHKAALLAEIYAAAQRSIALPVPPDGAAVAMLRLVLEEYLMLGRMRESIAQQAEIILASNADRRRLMTVPGVGPLTALTILAEAGDLRRFEHYRQFLKFCGMSLSTQQSGRFRGISRLSKYGNARLRTAFWMAAKTAVRMRENSLRRKFDRYVRANPLDADLRRKGYSAVAAKLARIVYGLIKNGTDYRPFFEEAIPGG

SEQ ID NO: 513321 - protein, 404 aa, unidentified
MNDSTIGYAGVDWAIDAHAVCVVDEHGTVIVEFDVDHSREGLAVMCRRVSAAGARRVAIERPDGPVIDALLDADLEVVVVSSRSVKALRQRYGTSGNKSDRFDAYVLADCLRTDGHRWTSLEPDSPATVTLRAHVRARKDLVETRVAVANQLRAHLRIMFPGAVGLFRDIDSPISLQFLQRFPSAAHAGWLSEKRLGTWLRGAHYSGGKAVEELYTHLVTAPNGVTGEQGILRGPIALAYVQILITLRAQIDELNTRIEQLLDSHPDAHIFRSLPRCATIRAAMLLAEIGDCRARFPDAESLACLAGVAPSTRTSGRHRAVTFRFSSDTKLRDALCDFAGDSWRGNDWAEHRYRELRAAGKTHPHTERILARTWTHIIWRCWQDRTPYDPTKHGGHQRLTNHTG

SEQ ID NO: 513322 - protein, 344 aa, unidentified
MDHFGGLDVSVKETSICIVDDTGRIVREVKVASEPEALLKVLGNPAYRFKRIGLEAGPLSQWLFSALAEAGLPVVCVETRHMQAVLKAQINKTDRNDARGIAQMMRAGLYRPVHVKTLRSQKLRMLLTHRKLLLSKAIAIENDLRGTLRNFGLKVGMVGKVRFEARIQELVENIPDMAVLVESLLIVRRALREQIVILHRRLLAIVRDDEVCRRLMTIPGVGPVVALTYRATVDVPARFRKSKSVGAVFGLTCARYQSGEIDWSGKISRCGDEMMRAMLYEAAQSMLRSKKWSWLKAWAMQIARRRGMKKAIVALARRLAVIMHRIWIDGTEFRWTREQAAAAA

SEQ ID NO: 513323 - protein, 403 aa, unidentified
MGAVAGLDWAAEKHDVLIADERGALLDARVVEHSEHGVRELVCLLVDHRVQRVALERPDGLLVARLLDAGIEVLAIHPNQVKAARERFRPAGGKSDPFDAFVLCELARTDHHRLPRLAPSGDETVALRALSRSREDLVAMRVELANRLRAELDAFWPGARAIFADVDSKIALAFLERYPSPLEAKALGPKRLGGFLARNGYCGRRSAQELLERLRRAPVGCAGEAELEARRAIVLALVAALRPLVEQIGLLTAQIRGALAAHPDAAIFGALFCDPKSAVTAAGLVAEIGDNRARYPSADALAADAGMSPVAVESGKRRSAAFRRGCDHRLRSHFACLADSTRHWHPWAGEVYHRARARGCDHPHAIRVLGRSWARVLWRCWQDEAPYDPARHGNLRRLQTQGG

SEQ ID NO: 513324 - protein, 402 aa, unidentified
MRFVGIDVGAERHTIAIVDESGVVILKATAFTEDSAGYGRLLELLGTATDCLVAMEATGHYWRNLYAALVTAGFAVALINPLRTSRFAEEELQRTKTDAIDALGIARFAAQKRPTITQLPEAALQELRELVRLKGQVLQQLGDRVRQLHRAVDLVFPEFTRHVRTLDSELATAILERYPTAAALRTVSARKLARLCYDGSHHVGEARARALIVAARQSVGAHHGEPYQLQVRYVCEDIDLLRRRLRALEKDIEQRLEQIEVGKLLTTIDGIGPQTAACIIAEVGDPARFHSSRALASYVGVVPRLHHSGKRRFSTSAKVPLGNARLRRALWMPALTAVQHNPWLRAYYYRLPEAGKRPKVALIAVIRKLLSAVYSIAKHRRPFVLAPIFSPVAGGAVVPTAQ

SEQ ID NO: 513325 - protein, 316 aa, unidentified
MSDAQVFVGIDVSKAQLDVALRPTDDCWHVSNDELGIAGLVERLRTVQPTLVVLEATGGLEVPVTGALADAGLPVVVVNPRHARDVAKATGRLAKTDTLDARGLAHVAEAVRPTPRPLPEAQAQALSALLTRRRQLVQMLTAERRRLQTAPQPIRADIQAHITWLACRLARTDDDVAAAIRSSPLWRAKDEILQSTPGVGPILSRTLVAEVPELGVLNRQEIAALIGVAPFNRDSGTLRGKRAVWGGRAHVRAVLYMSTLAAVRHNPVLKAFYERLRSVGKAPKVALTACMRKLLTILNAMLKHRTPWQENYANHS

SEQ ID NO: 513326 - protein, 369 aa, unidentified
MRDYSTTVVGLDVHKESIVAAVLAPDSERAAVTTKFENTPGALKAFVSRLQRRKPLSFVYEAGPCGYQVHRELTEQGEKCAVVAPGLIPKRAGDKVKTDRRDAEKLAQLHRAGQLTSIRIPTRSEEADRDLVRAREDALAERLGARHRLSKFLLRQGLVWRETKAWGVKHRAWLRSLRLGLESHARAFEAYLRGLEEVEARLEALSQQVLELAAADAWKGVVANLRCLKGVDTLSAFTMAVEVGDFRRFETAVAFMGYTGLVSREHSSGESVRRFRITKVGNAHLRRVLVEAAWAYTQRDTVGPKLTERRAEGTAEAVATARRAQQRLCTKFRKLVGRGKPRQKAVVAIARELAGFVWHIGRFSQEAHR

SEQ ID NO: 513327 - protein, 343 aa, unidentified
MRWTVAIGVDTHKHEHVAVACDTLGAQLDAQEIEASTAGYLALWQWAQELGLPAFAVEGAGSYGAGLVRFLEAAGAPVYECERPARRERRRGKSDLIDAFLAARRLVAGTGLGRPRGGGRREDLRLLLLERRSAVAARTAALNQLQAALVTAPAPLRERLTALAGDQLVAAVARLRARAGEAETAVLIGVLKRLAGRIGTLGAELAKLEAELEAIVGALVPELLAECGVGPVCAAQLVVSSGDPARMRSEASFAALAGTSPIDASSGRQQRHRLNRGGDRQLNRALHVIALNRIRYHAETTAYHARLLAAGKTKREARRCIKRQLARYFYRRLCESPKLALTP

SEQ ID NO: 513328 - protein, 350 aa, unidentified
MLIIGCDYHPSVQQIAWVNTETGECGERRLKHRGEAEQFYRELKNKRISVQVGIEATGHSRWFERLLAELNYEVWVGDPAQIKAKQVRKQKNDRKDAEHLLKLMLEKTFPRIWVPSPENRDVRQLLLHRHRLVGMRTRVMNQLQAVAMNEGIRRKKGLWSEKGRQQLESLSLMPWTTRRRQELLELLDRLDPNIDELSQAIEQEAERVPEVKLLMTHPGVGPITALAFVLVIGTPERFSCGKQVASYLGLIPCEDSSSERWRLGHITKQGNKLLRYLLGQAAQSVARCEEQWQRQYAHLTMRRNKPIAKVAMARKLAVRLFWMWRKGWDYQQLKKFGSHVGQLGALNGVQ

SEQ ID NO: 513329 - protein, 340 aa, unidentified
MYYVGADLHKEQTWFYVMDEHGAKVSSMSVSNELRTIEEYVSNIPRPFTLAVESTYNWYFFMDLVERYADKAYLANSYELKAFAKRHKKTDKIDARLIADVLRKGYLPIVFIPDRKTRQMKELLACRMNLVKDRSRSIIRLKALLDKQGIPSTGNFTTNKRLLIIPLSDMPAEYELCAVHDIESICFLGSKIYTMDKDIRQYASKDKDILNLITVPSLDYFSASLIKTEIVDINRFASFARLCAYAGLAPRVAQSANKTFHGPLNVNRRKKLQWILIEVVFHFIRQQPDKQAKYDAIAARKGTNTAKIVLARDLLKIVYHILKEQRSFIPNELPEFSDAA

SEQ ID NO: 513330 - protein, 392 aa, unidentified
MMNPVVGLDVSKGESQVQAFLDKGQPFRKSFSIKHTVEGFENLLGFLKEIERVADGKQPSVILESTGHYHSPVIQFLEEQQYVYIIVNPLISHRARSTSLRKVKTDAVDAYLLCELYYKEEIEPYKKRGIQLLNLRNLTRQQETISSISTQTKIQLLTVLDQVFPEYRGVFGNLYSKVSLQTLSLFPTSEHVLNTTESVLTDKIVSLCTRRSEKWAKEKAQKLIEVALRNPFQTNLYESHIFNLKMFITIVLQYQEHLSQLETEIDALAKEIEEYKIIQSIPGIGEKIAATNISEIGGIDRFNHPKKLVAFAGIDPSVYSSGRFTATNNRITKRGSRRLRQALYMAVYCGIRDARKQKTSDTVIPRNKRLREFYDKKRDEGKPYRSSNNCLC

SEQ ID NO: 513331 - protein, 393 aa, unidentified
MKVWDFCERIDIRKISLESSAVEKIGNSEFQQKAPNYYNFDVIISISLSDEMTIKATTKAVIKYLEAIKKKHREEILFACGYEAGPTGYGLCRGLQKAGYGCVVMAPTTMSNPDGKRRVKTDRIDARAIARILAYKSYSQVHLPSEEMEALKEYTRARDAKKRIFKKAKQELLSFLLRNGKSYPESGNYWTEKFFKWVKTVQFSEKWMQEAFNEYLAEVYSLKAKIELMDMKIREIAELEIIKDKVDKLVCFSGIDVTTAVETVVEIHDFTRFATAAQFVSYLGLCPGEDSSGKTKNMLPLTKAGNKRVRALFCESAKAIKRTNPYGQKSKRILERQKNASPEIVAYADKATKRIRTKMRHLEERGKNYNVSSAAGARELACFVWGMMNGKIA

SEQ ID NO: 513332 - protein, 409 aa, unidentified
MEQLIERGCGLDVHRDTVAACVRVPGPNRRPQQEVRTFGTTAAELLALRDWLEGPGVTHVAMESTGVYWKPVFYVREDSFTCLLVNATHIKQVPGRKTDVRDCVWIAQLLEHGLLRGSFVPPAPIRELRDLTRHRKVLIQERSRAANRLHKLLQDAGIKLASVATDILGVSARAMLDALVEGTTDSDVLADLARGKLRKKLPALRQALTGRFRPHHAFLVSQLLAHVDYLNESITAVSEEVAVRITPFAAQVEQLDTIPGINTRTAEVIIAELGVDMHFFPSDRHLASWAALCPGNHESAGKHASGKTRQGNRWLRTALVEAAAAAIRTKDSAPGARYRRIMRHRGHKKAVVAVAHAMLRSISHLLAEGTTYHDPGADYFDRRHAQRVTRRAIQLLERQGFRVVLEPAA

SEQ ID NO: 513333 - protein, 350 aa, unidentified
MPHKFDTAVVTIGIDPGKNTLHMVGLDARGEIVLREKVARTKIVSRLANVPPCLIGIEAGMGTHYVTRELLALNHDVRQVPPVYAKPFRQTHKNDFRDAHAVAEAVQRPTTRCVPPKTDEQLDLQALHRVRYRLVGERTAIINQIRCFLLEHGLTVRQQLHWLRHALPDILSQRTDVLSPRMVRILEDLAQDWRRLDDRIEAVSGEIEALAQTTESCRHLMTIPGIGPIISSAVVAAIGNGIAFTRGRDFAAWLGLVPKQISTGDRTILGRITKRGNRYLRMLFMQAARVVLLRPRNWMKHGFGPWLAAAAQRLHHNVLATALANKLARIAWSVLAQHRVYETRLSAAAV

SEQ ID NO: 513334 - protein, 428 aa, unidentified
MEQVDGIRLLEFRQVKKEIRGSGQYLIVGIDVAKEKHNAFFGTANGKTLHKGVIFDNTIEGFEKLLTLTELLKVQHDLTKVVFGVEPTANYHKPLGEHLIKCGHRVVLVSGAAVKHNRSLLDGRWDKHDTKDSANVADLICQGKFLYYEYPDPKMQDLRNLLSIKKRLKKEEHGLRVRIRNQLLAQYFPEMDRHFGSAVSMAIVGRCLDPSMIAGMEFDEFRRSIAPGRTNIAQQKLLQTIWRLAPESIGCHVGDAVSFEGKLMVSKLNQVRENIKETENRIEDLCMQFPEYQCLVSIPGFGPDVSSKVLGAIGNPFRFTSYKQVLKMAGFDLCAQRSGKTSNSVTPVISKQGRSDLRYALYQAAFISSLRNKGFMTYYANKLRGRQREKGIGTKMRVKLAAKLLVIAWTLMKKKESFDQKYLNQEDV

SEQ ID NO: 513335 - protein, 389 aa, unidentified
MSYYVGIDIAKFKHDCFIVTGDGEVVRASFSFPNNEDGFKELKAALDQLDHSQKIKVGLEATGHYGRNLKLFLTSIGYEYSELNPYLVKKYSESITLRRTKTDKKDAMLIAKYLQFEASKSNQELSYTIYDLKTLTRSRDKLVRTRSNELVIITNCLDRMFPEYKSFFGGKLGKCALTILEKYQTPDKIAKMNDSTIVKMHNISRSISVNKLIRLKDLAKVTVGHSSKSDVFVMGQSIKRFNMIDEDITEIEEEIKVMMKEIKSPIETIPGIGTISAASIIAEFGDIKRFSTSSKMLAYAGLECSKHQSGQEDFKGRMVKHGSEHLRYVLMNVAVTVKNFSPTFASYYIKKRDEGKCYRVALNHVVKKLLRLIFKLTSTDTQYNLSLSK

SEQ ID NO: 513336 - protein, 342 aa, unidentified
MKIHTIGIDLGKTNFHLVGLNERGEVVVRKRFSRAQLLRFTANRKVHVIGMEACGGAHFLGRALQEQGHEARLIPAQYVKPYVKTNKNDYIDAEAIAEAVGRPTMRFVPIKSDDQLDLQSLHRVRERWVTRRTAVINQIRGLLLERGITLRKGRRYLDEALPGILEDADAKLSGTLRLLLGQLKLELDQLALRLEEAEALIEQTVQESEACQRLMQIPGIGPVTATAVISAVGNGAANRKGREFAAWTGLVPREHSTGGKQKLLGISKRGNRYLRKLFVQCARAVLQRKTKQAPGLKVWLEKITSHTHGHVAAVALANKLARMAWAVLATGEAYRAPLPAAA

SEQ ID NO: 513337 - protein, 322 aa, unidentified
MTAQLTAHPLACAAGIDVGQRFLDIGLAPSGRTFRVPNAADGITAIVKRLTQAGVGRVVLEAIGPYAQRLIAALSVAGFEVGVVNPRRIKAFRDAEGRRAKTDRLDARLIARFALAMTDAIRPLPSADQLALRALSTRRRQLTEMIAMEKTRLKQAAEPLLLDSHRATIADLTHQCALIEAELARRIAGDDELARTLKILKSIPGIGERVATVLVTDLPELGRSDRKAIASLAGLAPHISQSGNAPPRAAIAGGRPCVRTALYMAALVASRHNPQMKTAYLSLREQGKPAKVALIAVARRLLVTANALVKANQSWGPDAKNT

SEQ ID NO: 513338 - protein, 371 aa, unidentified
MKIYNLKATPVASVKELKDEQKPKAKQIVLGADAHLRGYQVGRKIDHAVVGVVESFRSEEALLLFAKKQLERAERVVLVYEAGPLGYSLYRKLKALGVECYVCAADSSEQQRKRRKNNRIDARNLTSKLFNYLNGDQSALQMVRVPSEAQEQLRLTSRQHDQLVEERKRLGAKGNAMLLSQGFGSWSNWWRPKAWARLGSLVPGWLLERLQVWVDVLKMLDEKICQAKVGLARGCSGPRPKGVGALSQMQLRSEVLDWHFYSNRRKIACLAGMVPSEWSTGDSERRGSITKVGVPAIRRIIVEMVWRMILFQPQYKPVQKWQEVLRGSNPALKKKAVVAIGRQLIVDLWRLETGRVTAQELNLVMIEAEGV

SEQ ID NO: 513339 - protein, 405 aa, unidentified
MFCGIDWASERHAVCVLDDAGTKATAFQIAHTADGFDQLVARLARLGEPATLPVAIERPDGRLVDRLLEAGHPVVAVQPNAIKAWRDAEVLSGAKDDPGDAAVIAEYLRLRHHRLRALQPFSPETRALRAVVRTRTDLVDQRVAATNQLAACLDAFWPGAKAVFADVESSIALDFLTRYPTPESTTHLGERRMAAFLIKHGYSGRRPPAQLLARLHAAPAGLCGTVEVEARRDAVLALVRVLRALNQAIKDLDRSVVAHLGEHPDAETFTSLPRSGQVNAAQVLAEWGDCRPAYDGPDAVACLAGATPVTRQSGKHRSVSFRWACNKRFRQAICTFADNSRHASPWAAKVYADALARGCDHPHAIRILARAWIRVIWRCWQDGVPYDPTKHGAARRLTEMASSAA

SEQ ID NO: 513340 - protein, 392 aa, unidentified
MYIVGIDIGKKHHEASIVSPEGKQIGRSLRFATTHKGADSLMSFIFKNIGNSPCVFGMEATGHYWYPIYSFLKAKGYTIYVINPIQSDSLRKMYIRQTKNDSIDSFLIAEVIRFGQFGTTSMADENILAMRQLCRYRDSVISSRTEIKLRIGTIMEQIFPEYEKQFSSLWLSTSMGILEKYLTPENIENAPIDELFEIIKDKSHNRLTKAKAISIKEAAADTFGIKIAQDAFSFQLKQLIDRMNFLDKQIEALDIEIMKYYEQFDCYLHTIPGIGIIGAATILAEIGDISRFKNSSALVAFAGIDPTVRQSGEFNSTHNHMSKRGSPYLRHAIFLAATTCSFHNSPLNAYYKKKRDQGKHHLTATGAVARKLTTVIYAVLRDSKPYEPKKFC

SEQ ID NO: 513341 - protein, 389 aa, unidentified
MIYVGIDVAAEKHACCILTESGKVLKQFTFSNDMPGFEKFHKALLTPSETKIGLESTGVYGNNLAEFLRRNGYETHIFNPLLVKKSIQATTLRKTKTDKSDAKHIAQYTKEHSQPNLEPSYHISELKSLSRGRFSLVRERSKVKAQAKGLLVQLFPEFSQAFSDVFGAAASAVLRQLPSARMIAQCPVDVLTDLLRTVSHGRLGKVKAELLIDLAEHSVGIQSMALELQMQMFLQQIDLFTLQINRYEVEIKSEMEKIQSPITTIPGIGCVLGAAILSEIGDIRRFTTPAKLQAYAGVDPSVGESGTSVSTPGRMVKHGSHYLRWALCQAARCVSLYDPIFAVYMKAKRDEGKHYCVACSHVAKKLTRVIYSILKKNTAYSLTYSQIGA

SEQ ID NO: 513342 - protein, 346 aa, unidentified
MAYYVGLDVSVKETSICIMDDKGVVAARTDISTDPDLITNFISKHAPDVERVVHESGILAIWLTRELEKRGVPIICIDARLAHKALSGRINKSDQGDAEGLAQLARTGWFTQVHIRSEASERVRVLIGARERLIRMRKDLEGHVRGVLKVFGVCMTSVGTGKLRRDFRDQLAAAADTDPAIALLSETFIPLHKTLCIARDALDDQVRMMARESDLARRLMTVPGVGPIVALAYIATVDDEKRFRKSVDVGAFLGLTPKRHQSGEVDWSGKISKCGDCDMRRLLYSAASTLISCTRKPSRLKEWATKLAERKGHKKAAVAASRKIAVLLHCLWRNETVIEPGMGGAS

SEQ ID NO: 513343 - protein, 315 aa, unidentified
MTKPLLALNVGVDVGKSQLDLYLLERDRALTVPNAEAAIASLVRHLRRYRLERIVIEATGRLEQPFVRAALAAGLPVVVVSPLKIRRFADAIGQLAKTDQIDARLIARFAAAVKPLARPASDANAQAIKDLTVRRRQLVSLRTMEKNRRQVMPQELRTGIDRIIKTLDRELKRLEQLIEHAVEQHAPSRHKRELLTSMPGIGNAVAATLIGDLPELGSLNRREIASLTGVAPFNRDSGKLRGKRRIRGGRAHSRTALYLSAMVATRFNPDIKRFYERLVSAGKHKKVALTACIRKIVTALNAMIRDNSPWQSAMA

SEQ ID NO: 513344 - protein, 309 aa, unidentified
MEVFVGIDVSKDRLDVHVLPSGEAFSVVHDAEGLEALGERLKALSPQVVALEATGGFEVTAAGVLGAHDLPVVVVNPAQVRAFARALGLRAKTDPVDAWLIARFAQATRPEPRPLPDADQRLLSDLVARRRQILQMLVAERLRLGRASELRLKKSLKRLIGALEKELGEIDDDIDQAVRGSPIWRRKEDLLKSAPGVGPIIARQLLAEMPELGNMDRRQAAALAGLAPFTRQSGQWRGKAMIGGGRTHVRSALFLAAMSASRFNPDLKAFRQRLIDAGKPKMVALIAVARKLITILNAILRDQKPWQTA

SEQ ID NO: 513345 - protein, 351 aa, unidentified
MTMVGGFDVHRKQITFDYVDDDGLVRVGEIRPATRTTLRHWLSEHCPAGDAEFALEGCTGWRYVVDELATAGVVAHLGDPAEIATLRGPKKRAKTDRADARLLRTLLLEGRFPESWIPPAHVVEVRTLGRLYCTLMDERRAWQQRIHAQLFHQGCPPIRALLSVAGRDALAQAELSAAGRQYVDTALRRIDELTVEIGPVRGQLVSFARRQVACQALQARQYGVGWLCAAIMWAEIGDARRFSSSDQLVRFAGLDVTVYSSAGKRSPGHLSRQGSPELRWATFEAAKCAARHGSPEHAYYQRLATKHDGHNGKNPTLAVERKILRRSYHTLRELGDAALAMPVPEEQGVAA

SEQ ID NO: 513346 - protein, 403 aa, unidentified
MNSVGIDISKGRSTIAVMRPFGEVVISPFEVRHTDSELSKLARRLKSLNGETRVVMEATGNYHAPVAKLLHDAGLYVSVVNAKLVHGYGNNDLRRVKTDRKDAVKLANYGLDRWLTLPRYVPEEDTRLLLKNCYRQYRQYSKVQTVLKNNLISLLDTVFPNVNRLFSSPIRGDGSEKWVDFVAEFWHCRCVSEKSEKVFTNKYQRWCRKHGYNFSEEKAHTIHAEASGYIGVMPKSETTKLLVEQAVAQLRATSAALTALKHEMLALAAQLPEYPVVMGMFGVGPTLGPQLIAEIGDVRRFYSKKALVAYAGLDAPPNDSGDVTGKHKSMSKIGASSLRRTLFLVMSVYLQNAPLDEPVYQFMDKKRAEGKPYRVYMMASANKFLRIYYATVKAYLESLEHTA

SEQ ID NO: 513347 - protein, 386 aa, unidentified
MMTMTRTTESTAPTVTSSSHLLLAFELGERVWKLGFTTGMGQRPRIRQVAAGAVDRVLEEIARAKGRLKLPAETRVVSCYEAGRDGFWLHRWLVAQGVTNHVVDSSSIEVNRRARRAKTDRLDLAGLLNLLARYLLGDQRVWRVVRVPSVAEEDARQLHRTWESVQQDRSRLICRLQGLLVTQGLRLRIDADFLQRLETARLWNGAPVPAGLHQRILRVWAQLELADRQLEALEAAREALVPDRQTATGQYVAALPTLRGIGPIGAWVLATEIFGWRQIQNRRQLGALVGLVPAPYQSGETAHDQGITRAGNKHVRRLMVQLAWSWVRYQPESALTRWYQQRFGRGSKRMRRIGIVAVARKLLIALWRYVDRGEIPDGAIVKNQAA

SEQ ID NO: 513348 - protein, 358 aa, unidentified
MSPIKRNKLDFTGQPIYVGLDVHKKSWSVSISTTYGQYKNFSQPPEVEKLVHYLRHHFPGAQYHSTYEAGYCGFWIHDQLMEKGITCLVVNPADVPTKNKERKTKRDRVDCRKLSRSLRNGDLEGIYVPARGKLEDRSLIRTRLSMVRKQTRCKNQIKSMLLFYGVVIPEEKEMGHWSRRFIRWIEGIRMERASGDMALQIHLEELCHLRQIIAKLNRAILALSRTEEYRSRVLLLRTVPGVSTLTAMILLTEIGEIRRFPSIDELATYVGLIPDTDSSGEKEHVGGVTQRSHPQLRWVLIESSWRAVPKDPALMMAFKEYCKRMRKTKAIVKIAKKLLNRIRYVLKNRAEYIPSVLE

SEQ ID NO: 513349 - protein, 427 aa, unidentified
MKYNQNLKILQITEKTLIVGVDIAKETHHARAFDFRGIEYGKRIEFSNDIDGMKRFLKWATDIMNKSNKEHLMVGMEPTGHYWLCFAQFLRDKNHKVVLVNPFHVKRSKEFDDNSPTKNDRKDPKTIAMLVKDGRYVEPNIPEGIYSELRIAVDIREMLTKDLNKIKNRVARWLDIYFPEFNKVFADWEGKAALITLKEFPTPAKILGIGAEEILAAWKKEINRAVGAKRALKLIEAASESVGKRDGIEMAEVEIKIILEQYEMLVKQLKKIESKIEELFMQVPSANEMLSIKGVGVITAAIFIAEVGDITRYEHPKQIQKLAGYNLVENSSGQHKGQTTISKRGRRRLRSALYKMIMPILANNKEFQELHKYYTTRKENPLKKKQSMIVLCCKLIRVFFAILKKGVKYNGNKMLRDIKRPEIRNAA

SEQ ID NO: 513350 - protein, 409 aa, unidentified
MDQIHDRVAGLDVHRDSITACFRRLGPKGGVLREKEQFTTTTAGLRVLSDWLADRQVELVAMEATGVYWKAPYYELERRFTVWLCNARHVKKVPGRKTDLSDAEWLADVAAHGMVRPSFVPPPPIRELRELTRYRKTQVDGRVAEIERLEKVLQDAGIKLTSVASKVVTQSGRAMIEALIAGEQDPAALAELAKGKMRPKIPALIEALTGHFGAHHAVAARQILRHLDFLGETIGSLSEQIDARTVPFEPVYQLLSDVPGLDRLTIDVIVAETGADMARFPTAADLASWSGLCPGNYESAGKRRRVSTTPGNQWLRRAMIEAARAAVRTKGSYFGAQYRQIARRRGPNKAAVAVAHSLIELIWQLLSTGEVFADLGSEYFQARRDPERQARRLVTQLEDLGFTVTITAA

SEQ ID NO: 513351 - protein, 314 aa, unidentified
MSAEIFVGMDVAQGCVDVAVHPGTAFQIPHDEHGIAHAVERLQALQPTLIVLEATGGLEVPLTGALAAAGLPIVVINPRQVRDFARATGQLAKTDRLDAQILARFAEAIRPPVRPVPDAQTQALAALVARRRQLIEMLTAEKNRLRLAARPIQKRVQVHITWLEKELALTNTDLEATIRLSPVWREKEEVLRSVPGVGPVLTTTLFANLPELGTLTRKEVAALAGVAPFPRDSGTLKGRRAIWGGRAHVRAALYMATLVATRRNPVIRTFYQRLCQAGKAKKLALTACMRKLLTILNAMLKSGTPWRVAVSQST

SEQ ID NO: 513352 - protein, 345 aa, unidentified
MQPMYYIGLDVHKRTISYCVKDASGAIQGEGSLPATRAELDRWMNSLPQPWTAAMEATVFTGWIYDHLKPHAAALKVAHPLMLRAIAASKKKNDRIDAKKICDCLRCDFLPECYMASTAIRERRRTLRYRHLLVRQMVQIKNKTSTLLMEAGVSYNKQRLHKAGYFRELMATNPDINDGLRSLLRICRETVVRLSKTESALVRSLERDPQLLERVERLMTIPAVGPITALTWALEVGEAMRFSSIKKAISYCGLCGAQKSSGNTTVRTPLSKQRNKHLQTTLIEAAKMAPRYSPTLALLYDQEKQKGDANRATLAVARKLAAYLMAVDRGQRHFRILETSDSIAA

SEQ ID NO: 513353 - protein, 400 aa, unidentified
MFGGWDWGSTHHGVCVIDDDGTVLRRWLIEHRADEIERLFAELAAFGASQTLPIAIERAEGLVVDLIGGAGHPVIAVDPAGFKAARPRWGSGGAKSDLGDAYMLADYARTDGHRLRRVEPVAPATRDLAMLVRARVALVEARTAASNQLWALLSEHWPGAAGLFQKLISPIALAFLDDYPTPQSATHLGEGRMSQFCRRHSYRGGKSPALLVERLRMAPSATDPIAPTVLAIVVASSVAQIRLLNTEIARLEREARTALDAHPKAALLADLPRVAHVSLAQLVAELGPLLERCDNPDQVAALCGAAPITRESGKTRTVGFRYAANKPARVAITGFADNSRHSSAWAAERYHQARSRGARHPHAIRIVARGWVRVIWACWHSDTAYDPLRHRGERLATHPT

SEQ ID NO: 513354 - protein, 301 aa, unidentified
MMFKNYIGIDISKNTLDIALMTSEGELAEVNCLNDRVILNKCLNTLLKDYKIKKEETLVCAEHTGHFGNKLIDICENNQFNLWMESAYTIIRSQGLTRGKNDKVDAIRIAEYARRFEDKVVLWEAEHVDLTLLKRLYSERELIVKDIAKYKSQLKQEEGFHTQSYFKQKKKRIGKLMKYNDQVLQEVEKEIDNILNHNAEIKNNFEIITSISGVGKQTALITIISTSNFKKFQNPRQFACHAGCAPFKYESGTSRTSRNKVSNRANKDIKKIFHMAALSSLRTKGEMKQYFDRKVAEGKIK

SEQ ID NO: 513355 - protein, 403 aa, unidentified
MNSVGIDISKGRSTVAVMRPFGEVVISPFEVRHTDSELSELARQLKSLNGETRVVMEATGNYHAPVAKLLHDAGLYVSVVNAKLVHVYGNNDLRRVKTDRKDAVKLANYGLDRWLTLPRYVPEENTRLLLKNCYRQYRQYSKVQTVLKNNLISLLDTVFPNVNRLFSSPIRGDGSEKWVDFVAEFWHCRCVSEKSQKAFTSKYQRWCRKHGYNFSEEKAHTIHAEASGYIGVMPKSETTKLLVEQAVAQLRATSAALTALKHEMLALAAQLPEYPVVMGMFGVGPTLGPQLIAEIGDVRRFYSKKALVAYAGLDAPPNDSGDVTGKHKSMSKIGASSLRRTLFLVMSVYLQNAPLDEPIFRFMDKKRAEGKPYRVYMMASANKFLRIYYATVKAYLESLEHTA

SEQ ID NO: 513356 - protein, 384 aa, unidentified
MPQPNDLSRSLVALDQNSTIIAVVELSQSSWLVGGMLPGIERQPRKKLEPSPERLLALLHRWRDEAVRAGRTITRIALAFEAGRDGFWLARWLEARGVEAHVIHPSSVAVSREHRRAKTDRLDTELLKRGFLGWLRGERGHCSMVRVPTLAEEDAKRPNRERECLVKERTRLVNRMKGTLARLGIRTTLRKVAEHPAALYTPEGSPLPPNVAAELERDIARLGLVIGQIKQIEQARRERLEEAPERGPHAMVRRLARVVGIGIETADMLVNEVLSRPMRDRRAVARYAGLTGAPDESGAKRREQGLAKAGNARVRRGMIQLAWRFLRFQKNSALARWYQVRTADRRGATRKTMIVALARKLLIALWRFVTTGETLEGVVLRPAG

SEQ ID NO: 513357 - protein, 342 aa, unidentified
MKITTVGIDLAKNVIQVHGVDERGKAVLRKQLRRNQVAAFFANLPACLVGMEACGSAHHWARKLGSCGHTVKLMAPQFVKPYVKTNKNDTADAEAICEAVGRPNMRFVPMKNVEQQAVLSLHRARQGFVKARTAQANQIRGLLAEYGIVIPQGIGHITKRLPEIMEDGENDLPGAFRLLLQRLGDHLKELDRHVGELEMQIQTWHRETDASRKLARIPGIGPITASALVASIGDAKSFDNGRQLAAWLGLVARQHSSGGKPTLLGISKRGDTYLRTLLIHGARAVIRVAEHKPNYEGSWLARLIGRRNKNVAAVALANKNARTVWALLANDRKYEANYGTAK

SEQ ID NO: 513358 - protein, 342 aa, unidentified
MYYIGLDVHKKTISYCVKDASGQVHQEGKLGATRWELDDWIKTLPQPWTVAMEATIFTGWIYDHLLPHAQQVKVAHPLMLRAIAAAKKKNDRIDAGKIADCLRCDFLPECHMASTAIRDRRRTLRYRHLLVRQMVQMKNRISGLLMETGVSHNKRRLHKVGYFRELLASNEEVNESIRPLLRVSRDTIVRLQKTEYALVSSLQRDPLLAERIKRLRTVPGVGPITALTWALEMGEVSRFPSIRQAISYCGLCGDEKSSADKVTRTPLSKQRNKHIQRVLVEAAKLAPRQDHNLALVYEREKQKGNANRATLAVARKMVAYLLAVDRGQRDFVPFADSQSAAA

SEQ ID NO: 513359 - protein, 452 aa, unidentified
MMEDAMAPRKRAATQAAISLTHPNAAGIDIGSAAHFVAVPPERDDESVREFASFTADLHRLADWLDACAVDTVAMESTGVYWIPLYELLQSRGFTVLLVNARHVKNVSGRKSDVLDCQWLQQLMSFGLLHGAFRPADQVCVLRSLSRQRTMLLRSQGRFVQHMQKALTQMNIQLANVISDVAGETGQKILRAIVAGERDGLALARLKNSRIRASEDEIAQSLQGSWRAEHLFALKQALDAFDFCGTQLAECDAQIQAQLQALHVREDEPAQGKKRGRARNAPKFDLRTQLFQMCGVDLTRIDGIDVTTALVVLSEVGADMSKFPSDKHFASWLGLCPGTKITGGKVMSGKTKRCANRAAQALRLAAAALRSSQSALGAYYRRMCARMDKPKAVTAAAHKLARLIYAMLTRGQEYTDQGQDYFEERYRQRVLHNLAQKAKAMGMQLVPSQNTA

SEQ ID NO: 513360 - protein, 346 aa, unidentified
MTKTPIAVLGIDLGKNSCSLVGLDASGAVVLRRGVRRETIPGIAAKLPRCIIAMEACCGAHQLGCLLARQGHTIRLMSPEYVRPYVKAQKNDDRDAEGIAEASTRPTMRFVELKTEDQLDLQTLHRVRSRLVGMRTTLINQLRAILLERGSVFPKGRRKLEVALNAFLADPDVSLAARIRTLIVEIRAEWASLDARIGTLDREFVEVAREDEAARRLVTIPGVGPMTATALRAAIDDGSAFTRARDLPAWLGLVPKQHTTGGKPRLLGISRRGNAYLRQLFIHGARAAMPSMSKAENPTGAWLRGLLARAHPNVAVVALAAKLARIAWATLRHGTSFARQPEMAAA

SEQ ID NO: 513361 - protein, 347 aa, unidentified
MTYCGVDFHSRQQKVVFCDLATGEIQRKELKHQSDEVRQFYTQLPKPVIVGLEATGSSQWFEKLLAELGHEVWIGNATEIRRRARSRQKNDWRDAELVLDLMVKDEFPRIYRLSEESLEILRRLRYRHRLVKMRTMAKNGLHAIALSAGLSMKSKLLTKSGRAKLELLDLSPALKDQRDEWLDLIDQLNHRIARLDSEVEQEGQTDPRVQLLRTHRGLGPLTALALVHTLEPVNRFSSSRKVTAFVGLEPCEESSADKVRWRGISKAGSRLLRFLLIEAAGVAIKYDDELKRFYLHLLHRRDWRKAKVAVARKLLVRAWIMLRDQIDYAEFLKRGVAVRSARTGRRP

SEQ ID NO: 513362 - protein, 343 aa, unidentified
MKNIKVLGIDLAKNVFQIHGSDAKGKCVLRKRMSRTKLIEFVANLQPCIIGIEACGGSHYWARLFKQSGHEVRMMSPQFVKPYVKSNKNDRNDAEAIAEACMRPTMRFVPIKTTEQQDILAIHRARELSIKNRTAQASQIRSFLLEYGVTMPQGISKIKRLSEIIEMNKDKLSLLVVELMIQLYEQFKIYDMQVKKYDQQLEKLAKHNNLCKEVQKLDGIGPLIASAIVATIGDAKVFKNGREVSAWLGLTPKQYSSGEKTVLGGISKRGDRYMRKILIQGARTAVKVCDSKKDKLSLWVANKKQRCGFNKAAVALANKNARIVWAIMASGECYRQPKEVLRG

SEQ ID NO: 513363 - protein, 339 aa, unidentified
MNITTVGLDLAKNVFHVVCFNERNKELKKRMLRRNQVHQFFAQLPSCRVGMEACATAHYWGRELRTLGHDVKLIPPQYVKPLVQGNKNDYNDARAIAEALDRPNISFVAVKSAEEHDMQAIHRMRSQCIRDRTALSNSTRGLLGEYGICLSKGLSVLRRKIPELLEDAENGLSLRFRNLLSRRYEQLVELDEHIAFYTKELELLSKQDDACQRLQTIPGFGPIVASAFRSTIGDGRAYVRGRHAAASLGLVPRQHSTGGKNILLGISKRGDKYLRKLFVHGARTVVLHAENRNDPLSRWINRIRERREYNKAALAMANKMARMGWAVLRYNTNYEPTLA

SEQ ID NO: 513364 - protein, 416 aa, unidentified
MNAVGIDVSSRKSTVAVLRPLGEVVCLPFDVTHDIVGLASLAEKLKALDGETRVVMEHTGRYYEAVAKALHEAGFFVCAVNPLLIKEYGANSLRRVKTDKADAVKIARYALDNWADLRDFTPMDAIRYDLKTLNRQFQLASKQRTASANNLIALLEQSFPGIRKCFDSPVRSDGTQKWVDFAHSFWHVDCVRKQPFAAFCERYRKWCKRHAYFFKLSNAEEVYALAKRAVVLTPKSKVVKVLVQEAANQLSSISRSVEVYRAEMDRLAAMLPEYPVVMAMYGVGKSYGPQLMAEIGDVRRFERKQALVAFAGIDPMPNQSGDKNVRSNKSSKRGSPYLRKTLFNVIRTYLQCAPQDEPVFQFLNRKRAEGKPFYVYMLAAANKFLRRYYAKLRDYFASLDTLQSVDPIPATLKASL

SEQ ID NO: 513365 - protein, 387 aa, unidentified
MTQIDDLSRSLVALEQDTTLIAAVELSQSSWLVGAIVPGLERQPQKKLEPDPSTLLKLLERWRGEGERAGRTIRRIVLAFEAGRDGFWLARWLRKRGIETHVIHSTSVAVSREHRRAKTDRLDLAMLMRVFLGWLRGERKHCSMVAIPTLEQEDAKRPSRERENLTGEKTRIVNRMKGALARLGIRGFKPELRKAPQKLAALSMPEGVVLPPNTRAEIERDMARLAVVRGQIEVIERTRLERLQQAPADGPNAMVLLLARVIGVGIETADMLVQEILSRTLRDRRAVARYAGVTGSPDESGAKRREKGLAKAGNARVRRGLIQLAWRFLIFQKDSALAQWYRARTDGTKGTRKTTMIVALARKLLVALWRLVTIGEVPEGVVLRPAA

SEQ ID NO: 513366 - protein, 410 aa, unidentified
MEVLFERVAGLDIGKGSVTVCVRTPGAGGRRRGETRTFKTMTRSLVVMRDWLVECGVTIAAMESTSTYWKGPFYCLEEVMEVWLLNAAHMKAVPGRKTDVRDAEWIAQLLEHGLLRPSFVPPPDIRRLRMLTRYRVQLMGDRTRESVRLELMLEDASIKLSAVASSLTTVSARAMLTAMINGERDPRVLAELAKGKMRAKIPALTEALTGHFDAHHAQLARSILHRLELVEDALAELDAVIAAACRPWAHQLELLQTIPGVGQKVAQVIIAETGADMSRFPSAAHLAAWAGLAPAIYESAGKRSPAGTRHGNKWLTSMLVEAAGSVGRMKGKNYLAAQHARLTSRRGMGRAQVAVAHSILVSAYYMLKTDEPYRDLGPDWLARRNTEAHTRRLVAQLERLGHTVVIDPAA

SEQ ID NO: 513367 - protein, 339 aa, unidentified
MGLYCAVDLHGNNGYYGIVDETGKRVFKQRIPNSLPSVLTALEPYREQLEAGVVVESTYNWYWLVDGLQANGYGARLANPAAMQQYNGLKNTDDETDAFFLTELSRLGILPVGHIYPKEERPVRDLLRRRLLLVRHRTAHILSFQNLIARERGEQISSNGIQKLWPNEVARFFDDERLVLMGQTNIEMIRFLTKHIRRIEKVVLDAIKLRPEYEKLLTVPGIGKILALTIMLETGDINRFEKVGNYSSYSRCVKSSRTSNEKKKGENNRKNGNRYLNWAYIEAANFIRRYCPEAKRWHQRKAARSKQVVATKALASKICKACYFIMRDQEDFDVSKIFG

SEQ ID NO: 513368 - protein, 343 aa, unidentified
MKHYAAIDVSLEESHVCVVDETGRILREGRVASEPDALGAYLEGLGLPLERVGLEAGPLSQWLYAGLQARGLPVVCLETRQVKAALSAMTVKTDRKDARAIAQVVRTGWYTAVHVKSQRSQETRALLQARQLTIKQIGEINNSIRGLLRNFGLKVGRVGRSGFPGRVRALLESRPSLAAVIEPLLTVRATLLRESARLNRRIVETARPDPICRLLMTATGVGTVVALTYRSGVDDPHRFAKSQAVGAHYGLTPKRYQSGDTDRIGHISKVGDEMVRRALYQAAHTILTRPVKPSALKAWALRVARRRGMQRAKVALARKLAVILHRMWVDGTEFRWSRQTMPA

SEQ ID NO: 513369 - protein, 350 aa, unidentified
MIIGCDFHTRYQEIAWLDLETGETGERRLEHAGEQVREFYGALRGQVRVGIEATGYSQWFERMLHQMGHEVWIGDAAAIRASVVRKQKTDRRDAAQVLELLHTNRFPKIWVPTPEQRDLRQLVLHRVKLVQMRTKVQNQLQAMAMGQGICRKKKLWTVQGRAELERLPLDRWAQRRRQELLQLLDQMNESIRELTGEVERQARQHPDAALLMTHPGVGPNTSLGFVLTIGPVERFARGKKIASYLGLNPSEHSSGGRQRLGSISKQGNATMRWLLVEAGQMAVRGDADLQRVYQRLKFRKGSAVAKVAVARKLAVRLYWMLRDRCDYATLVRTPGSSSSAVVPEESESGR

SEQ ID NO: 513370 - protein, 338 aa, unidentified
MALELLAIDLGKRSFHLYGIDTNGEILSRKVSRTKLAEVVNNLAPKAIAMEACASAHYWARCWLAAGREVRLINPRFVKPFVKGSKNDAVDAEAIFEAAMRPTMRFVPVKSRDQQDLQSLHRARDRLICQRTALINHTRGLLAEYGVVLPQGPWRFTAQAPAAVAGAELSDLARSIFGELMDQLDELDRRVKKLDATMVALCRTNETCRRLAKLPGVGPVIATAIVAAVNDGRQFRSGREMAAWIGLVPRQYTTGGKPRLGGIGRRANHYLRRQLIHGARAVVSRLPQHDARYDARRSTWLKALVARRGFNRTIVALANKTARTAWALLNRKEDYAIA

SEQ ID NO: 513371 - protein, 367 aa, unidentified
MSKNIRFWVGMDVHADKIQVAVYRGHEEFPLEEYESQTDARSLARLLKRLKELPGKVRCVYEAGPCGYELQRYLTKNGIVCEIAAPALIPRKAGERIKTDKRDARKLGRLYRAGELTMIYIPSAEQEAVRDMIRARERAVEDVRRKRHQLCKFLLRHGYRYRNGKQWTQGHLKWMKGIQFDISLLKTVFEEYILSLDQAEERVKHLTGEIEEIAKRPEQARQVSALMILRGVQVITAMTILFEIGDMRRFLRAKDFMAALGLVPSEYSSGNSVHRGSITKTGNSHIRRVLVESAWHYRHRPTVGKGIKARRVGKPRELLEIAQKADVRLNRKFRRMTEHKKLSTVAAVATARELAGFVWAIGQQVHA

SEQ ID NO: 513372 - protein, 348 aa, unidentified
MLADELDYVVGVDTHLDEHVLAVVAAPSGAVLARRAVPANARGYSAALRFAGEAAIGARVWAIEGTGSYGAGLARYLAGRGETVLEISRTPRAERRLRGKDDSLDAARTARAALASETLALPRSGQRREALRLLLITRRSAVDVRREALGQLRGVIVTAPDGLREQMRRLPVGKLLERCSRFRRSSSASPDELATRLVLRSLARRIEAATLEAAQLEHEILGHVRALAPRLLDEPGVGPIVAAQLIVAWSHPGRLRSEAAFARLAGVAPVPASSGQTTRHRLSRGGDRQLNRALHTIVLHRRQHDPTTKDYIAHRIAEGKTRRDATRLLKRYLARHLYRLLQQEPLMT

SEQ ID NO: 513373 - protein, 355 aa, unidentified
MDSKKYIGMDVHKESISIAVMNGAGKIVMESLIETKASMILQFIDGLRGDVQVTFEEGTSAAWLYDLLKSHVTKLVVCDPRKNASMREGHQSDKIDARRLAELLRLNHLHPVYHGEHGLRSLKELVRSYLTITKDLGRVMTRVKAIYRSWAIPCTGKQVYAPRHRAEWLGKITEPGVRRRAEFYYQQLDALRTVRQEVRRELLAESKKHPAWKLLCQIPSIGPIRAAALLGILQTPHRFRTKRQLWSYGGVGIEASSSADYQVMKGQLERKKKAVEIRGLNRNYNHDLKNLFKGAAIVAASKPGPFQEFYTALLTKGMRPEMARLTLARKIATIVLMVWKRGVCFDAQYLKPQTA

SEQ ID NO: 513374 - protein, 310 aa, unidentified
MGEVNVAIDVGKHQLDVALGSEGDLFSTPNEPGTIARLCKRLAGIGCARVLIEGGSYQNLLVAGLRGAELPVVIINPRRVREFAKSIGRLAKTDRIDARVLALYGERVEPPLRELPEEQTQVLRALWVRREQLIEMLVMEQNRLEHAPKALHRSLRAHIDYLRKQMKQADDDLDREVRNSALWDKYELLSSVPGVGRVLCAALLSDLPELGRLNRREIAALAGVAPFNHDSGTLHGQRKIEGGRPRLRRVLYAATVAAARCNPVLKPFYQRLRAAGKKPKVARVAVMRKLLTILNVMLKTHSAWRPPCPA

SEQ ID NO: 513375 - protein, 390 aa, unidentified
MFFLGIDIAKHNHVASLIDDNGNSIFKAYSFSNSSNGADSLIDKLKKYSTDDIIIGMEATGHYWLALYSYLLEKDFNIIVINPIQTDAWRHATDIRKRKTDSSDSVLIADFIRFGNFKTSSIADEKYLNLRNMTRFRHSLIEQIGDLKRKIITNLDLVFPEYSSYFSDIFGQTSKEILLNFNTAEDFKNLKTRDFEKVLRNITLKKSATIKLNSLKQMSQSSFGVKFALSSYSIQIKCLIEQIKVIEDQTKLIENEIESIVKDLNTPIFTIPGIGYVTGAVILAELGDINKFSSDKKIVAYAGLDATVNQSGQSDGQHGHLSKRGSTHLRKALFQAAFVASTNDTIFKDFYDKKRKEGKHHLVAVNAVARKMCHVIYAVLKKNEPYVEQK

SEQ ID NO: 513376 - protein, 343 aa, unidentified
MDHFAGLDVSVKETSVCIVDETGKIVREVKVASEPEALLATLKNPAYHFKRIGLEAGPLSQWLFSTLAEAGLPVICVETRHMRAVLKAQINKTDRNDARGMAQMMRVGLYRPVHVKTLRSQKLRMLLTHRQLLLSKAIALENDLRGTLRNFGLKVGIVGTVKFEARIKELVENLPDLAVLVEPMLIVRRVLREQIVILHRRLLAIVRNDEVCQRLMTTPGVGPVVSLTYRATVDIPARFRKSKSVGAVFGLTCAKYQSGEVDWDGRISRCGDEMMRTMLYEAAQAMMRSKKWSWLKAWAMQIAKRRGMKKAIVALARRLAVIMHRIWVDGTEFRWTREQTTAA

SEQ ID NO: 513377 - protein, 428 aa, unidentified
MKNNNIQKLEAITPSTLVVGVDIAKETQWARFVDYRGLELWKTLKFKNNKKGFESILTSIELICKSKGFDNVIVGMEPTGHYWKPLANYLIMHEVTIVMVNPYHTKRAKELDDNSQTKSDKKDALTIAKLVKDGRYYEVYMPQDIFAELRVLSNSRISLMKRYNALKNTITAVMDEYFPEIVTVFKNPLKGKASMQILKSCPFPSLILELGIDGVLAEIKKAVKKTVGRKKAQQLVEIASNSIGVGYGINSAKLKLGLMIEELELLTKQLEQLETAMEKGLSDIGYGEIILGIPGIGVVTAASFLGEIGDPMRFNHPRQINKMAGYNLVEDSSGKNKSGTAISKRGRKNLRSVLYQIALTMVAVNNEMKELYRYLKTRPNNPLKKKQALVVISKKIVTVIYNLVKKQTKYKAELVLGEFRKNQIKLAA

SEQ ID NO: 513378 - protein, 340 aa, unidentified
MSEITTIGLDLAKHVFQVHGIDAQGTTVLRKRLRRGQVLAFFSRIPRCVVGLEACATAHYWGRELGALGHEVRLMPAQYVKAYIKRNKHDAADAEAICEAVQRPTMRFVPVKTAEQQATALLHRGREQLVRQRTMLVNALRAHLAEFGIVAAQGLRNVGELIAIVRDDGDTRLPDLARQVLQVLANQIEQIETAVAGLEKQLLAWHKTNPVSQRLASIPGIGPIIATAIATTVADPKVFRSGREFAAWLGLVPRQNSTGGKTRLGGITKRGNRYLRRLLINGASANLLRSKATKADPWVIGLRRRRPPLVVAVALANKTARIAWAVMLREKEYQPRAVAA

SEQ ID NO: 513379 - protein, 401 aa, unidentified
MQQQLLPRGWAGIDVGKGHHWVCLIDEAGTTVWSAKVVNDEAAILEAVGAVLARAEQVLWAVDVTGTMSGLLLALLAAHGQQVKYVPGRIANQMSTAYRGEAKTDARDAYVIAETVRHRGDLAGVEVSTALVSELRLLVAHRTDLVGDRVRMINRLRDVLSGYFPALERAFDFAHSRGALVLLTGYQTPAALRGRGHSRLRAWLVKRKVRSAEQVAGAAVEAAKTQHTVVPGQDVAASIVADLAASILAIGARISDLDTRIGTTFRAHPQAEIIESLPGMGPILGAELIAAAGDLNGYANAGRLASAAGLVPVPRDSGRRTGNLHRPMRYSRKLRRVFYLSASAAMMREGPNRDFYLKKRGEGLNHVQALIALARRRVDVLWALLRDNRVFEVTPPATRGA

SEQ ID NO: 513380 - protein, 351 aa, unidentified
MSRQTSQSAVVTIGIDIGKNTFHLVGLDQRGNIVLQLKTSRAQLERRLANVPRCLIGLEACSGAHHIGRQIEALGHDVRLIPAQYVKPFLKGHKNDYRDAEAIAEAVQRPTMRFVRIKTPDQMDLLALHRVRARFVGQRTGVINQIRGFLIERGITVRQGPAPLRRALPELLGSNAATLSPRMVQIITDLAADWRRLDERIASISAEIEALAGEDSGCQRLMTVPAIGPIISSAVVAAIGNGSGFKQGRDFGAWLGLVPKQESTGDRTILGKISKRGNKYLRTLFVQAAHVILARRPRVAMSGLWPWIEQASKRMHRNMLAIALANKLARIAWAVLARGRDYQARVITNAV

SEQ ID NO: 513381 - protein, 343 aa, unidentified
MHTVATISLDIAKSVFQVHGVDADGLVVIRRQLKRRYVLAFFEKLPPCLVGIEACASSHYWSRELQALGHTVRLMPPAYVKPYVKRQKNDMADAEAICEAVTRADMRFVPTKSPEQQSGLMLHRTRHLFIRQQTSVINAIRSHLAEFGVTAPVGRKGMEELLRVIADPSDKRVPDVVRACLAGLGSQLLSLKKRILDFDRMIMAWHRSNQTSRRLNCIPGVGPLLATALVANVADPKAFRSGRNFSAWIGLVPKQHSSGGRDRLGSISKQGDRYLRSLFVAGALAVIRYAKIHGTKHRPWLTALLARRPTKVAAIALANKLARMAWAMMATGARYNYPPALKV

SEQ ID NO: 513382 - protein, 330 aa, unidentified
MNIKTIGLDIAKNIFHLVGLNRYGKRVLKKKLRRPQLLKYFANLAPCTVAIEGCASSYYWQRELIKLGHTVKLLPAQHVKAHVRGNKNDYNDALAIAEASLVPQMREVRPKSIEQQSMQALHRLRASAIRDRTALSNQLRGLLMEFGIIFPQGLTSIREGLFGVLEDAENDLPYSLREALAIKHQHFRQQDDLIKDFTRLINAASEAHKEIALFQSAPGYGAILSSAFYSVIGDAKAFAKSRDVSASVGIVPRQHSSGDKTVLLGISKRGDGYLRKMLINGARSVVNHAHKKTDALSVWVTRLVERRGRNKATVALANKLARIGWAIIRS

SEQ ID NO: 513383 - protein, 335 aa, unidentified
MKHYAGLDVSMDTTHVCVVDEEGRRRSAYSVESSPSAIAETLSAAGPIERAVIETGRMTPAICLGLRRLGMNVVCIEAHQAHQSLKAMKADKTDPHDAAGLAQLARTGFYKEVHVKSAAAQGVRSAITARSHLVEARVRLDNTIRGLCIAFGIKVGPGQGRDFVIRAEAAAEMPGLGEAVTSLLVVRERLVTEIKELDRLLNDIARQSVACRQLMSIPGVGVQTATAFAAAVDEVQRFKRSRAAGAYFGLTPRRHQSGNVDWVGRITKQGDAMVRKLLYEAANSILTRSRQTFALKTWALKIARRRGLRKARVALARRLAVIMHAMLRDGTLFET

SEQ ID NO: 513384 - protein, 408 aa, unidentified
MNTLYVGIDVSSKSNVVYLMLPNGDKHSNFSVANSHEGSTLLVKKIYSALTSHSLDTVLIGLEATSVYGDNLVYFLREDATLAPFNRKIHVLNPKQVKKFHDTYNDLPKNDYVDSFVIADCLRFGRINKEVYMGEYRYKALQNLTRARFFAVQNLVKEKQRFMNVLFKKYSTMTQEKVFSDAFSTTALAVYDEFESAEALANMDLHELTDFIIEKGKNRFPDPDAVAKAIQKAARSSYRLPKTVNDSVNQVLSISITSMKALESQIKEFDKAIKAQMELLPNVLISIPGIGPVYSAGIMAEIGDINRFNSQAALAKYAGLAWKQHQSGGFESEVTRLIPSGNRFLKYYLCEAAFSLVRCDKEYSDFYRLKYKEVNRCQHKRALALTARKFVRLVFRLLKDNRLYCPAK

SEQ ID NO: 513385 - protein, 349 aa, unidentified
MEVTTIGIDIAKRIFQLHGVNNNGKTVLKKRLMRDQVLIFMSNLPKCLVGIEACGGSNYWARELSKLGHEVKLMAPQFVKPYVKTNKNDEADAEAICEAVARSNMRFVPIKTVEQQDMLSIHRVRARLVKNRTALANEIRGLLLEFGIIIPQGINKIVDKLTEVLDSDQLSGISYQTFSDLKEEYITNDKRVKELENRLKILLNQCSLYKRLQEIPGVGLITGTALIASIGNASCFKNGRQLASWLGLVPRQNSSGGKTKLLGISKRGDVYLRSLLVQGARAILNAKLRYISKKDQIHANCSKFTEWICNLSERCGSNKTVVAIANKLARVIFAVLSSGNAYLEQKVCN

SEQ ID NO: 513386 - protein, 426 aa, unidentified
MFAESQDDEQIIERVAALDIGKAEVVCCVRLPAPSGTARRVQEVSTHSTMVGSLSGLANRLVELGIERVVMEATSDYWRPPFYLFEAHGLDPWLVNAKDVKHLPGRPKTDVLDAVWLCKVAERQMLRPSFVPPAEIRQLRDLTRYRVDLVGVRGAEKNRVEKLLEDACVKLSVVASDIFGVSGRDMMAAMIAGERDPSKLAAFARTRMRPKIGLLEEAFAGLRIGTFDAHHQLLLSRMLARVDAVEADIAALDTEIEAQLAALGDVVARLDEIPGIGPTAAGIILAEIGTDMTRFPTPAHLCSWAKFAPGIKSSAGKNKGNGSTGHGNRYLARVLGEAAVMAGRTDTFLGARYRRIARRRGKKKAIVAVGRSILVIIWHLLSDPEGHFQDLGADHYDRRVSTTAERRTHIRGLQALGYRVTLEPAA

SEQ ID NO: 513387 - protein, 352 aa, unidentified
MNQITTVAADLAKDLIVVCAADAFGRTLFFKQFGFRGFASWAANLPPCTMAMEACSSAHFWARTLESLGHRPKLLSPDLVTPFRKSKGAKNDRNDAQAILIAALQPDMRFVSVKSIEQQSILACHRMREGWKSERTALINRVRGLLAEFGIWLGRSPQNLARSLPKLIQDEQLPPRVRTLLVQAQEHLMRLEALMEQCELDIAAHARHSEAAQRLCKLNGIGPITASAMVALVGDARDFRNGRQMAAWAGLVPKQSSSGGKDRLGKITKRGDTYLRGLLTQGARSTLNAALARTPDKRSRLEHWIVALRQRVGYHKSLVAIANKHARICWALLARDEIYHPNGWPRHASTAA

SEQ ID NO: 513388 - protein, 348 aa, unidentified
MKKIVKQVVGIDVAQKELVVSLGRMYDDWSPEVYTNKSFANIQKGFMTLVAWVKKWSDPGCSVRFVMESTGVYHESLAYFLDEKGYELTVVLPNKISNYFRTLDVKTITGKTAADAITMFGLEKKLESWKRPKKIFKDLRQLTRERDQIVQERTMVKNQLHAEQAEANPNPSSVQRIKKRIEFLNKQEREIKTEIATVVKADQEVSSAIKITSSLTGVGLLTSVTVLAETNGFELIRNKRQLSSYAGYDIREKQSGTSVKGKPRISKRGNKYLRKAMHLPALTAIRHDERFRATYARLVSKHGIKMKAAVAVQRKLLEMIYIIYKTNVPYDKNYLKKHNVANADAATE

SEQ ID NO: 513389 - protein, 323 aa, unidentified
MEHFIGCDAHKKFSIFASINEKGEYGPTFRVRHDLEVFRKFLKELPAGSKIALETSGCYYWMVDEMERAEHIPLLAHALTAKRRMEGRHKTNERDARGLAMLLRNGTLPVVWIPPAELRDQREMLRWRMCLSRMRTRVKNRIHGVLQRYNVDIAVSDLFGDAGRVELLARLHELPPYSRHSLLDQLQMVDTVETQISECEQVLEEMLYPSADRDLLDSLPCVGKILSAVMALEIGDVQRFGGPDRLVSYAGLVPVARESADWKRKDRCPRDCNMYLKWAYVEAANLISIHRGHWPERSNRARRCMAKRPWPSPGIWPKHRIGC

SEQ ID NO: 513390 - protein, 421 aa, unidentified
MPRTGVAVLYVGDDWAEDHHDVEVMDQSGRTLGKAKLPEGVAGIARLHAMIGKHLGEDIGKDLGEDAEPARVTIGIETDRGPWVRALVAAGYTVIAVNPLQAARYRERLAVSGAKSDPADAHMLADMVRTDAHQLRPVALDSDQAEAVKVVARMHKTLIWERTRTTQRLRHALREYFPAAVEAFEDLDAADTLQLLAKAPDPATAARLSLGQISAALKRARRRDIPAKAAAIQAVLRAPHLGQPAVVTGAYAVSVQALVALLGTLNAQVKAMESQVEAHFGQHPDAEIIQSQPGLGAVLGARVLAEFGDAPDRYASAKARKNYAATSPITRASGRKKVVAARFVHNDRLVDALMTQAFAALRASPGARAYYDHQRTRGNEHNAALRQLANRLVGILHGCLKTGSRYNETTAWSHHLNEAAA

SEQ ID NO: 513391 - protein, 473 aa, unidentified
MRKDKRLRQLASTRKQLLKQNKRLSNTCLEQINLDAAGIDIGSRSHYVAVPTDCDKEPVREFLSFTEDLIKLCRWLKKCKVKTVAMESTGVYWIPLYEMLCEKGFEVKLVDARHVKNVCGRKTDVLDCQWIQQLHTYGLLQGAFIPDLSICALRSYVKQRDMLIAKAASHVQHMQKALVQMNLQLHNVVNDITGITGMKIIRAIVSGERSAKRLSKYRDGRCKRSQDDIRKSLVGNYREEHVFSLKQALELYDYYHEKIAACDVEIEKKLRELSTTTSVESNEPEHIEHKLKKRRKNDHHFDLGKALEAMLGIRMTAIPGVDASTVLHVISVIGTDMRHWKNEKCFVSWLGVCPGTKVSGGKRLSGKSKRTANKAALALRLAAQTLYRSQTALGAYYRRMRARIGAPKAITATARKLAAIFYRMLKYKTEFIDMGQDYYEKQYRNRIMNNLRKKAAQLDMQLVPLHQTMNTRI

SEQ ID NO: 513392 - protein, 354 aa, unidentified
MLYAGIDYHKRYSQVHVIDERGRTRATARLANDFGTLHGFFAGLAEPCRAVVEAGWNWGEMYDWLDAIENISAVERAHPYRVRAIAAAQVKTDSIDSHTLAQLLRVNLIPRAYVPGSETRRLREVVRQRVFLVRMRTMVKNRIQALLARHHVPLPAVSDIFGKRGRDYLTNLKLEDAAQELLRHDLELLKTLSEEVRATEKWLHQATGGDHRVEVLRTIPGLGALLATVVALEIDRIERFESSAKLAAYAGLLPTTYSSGGHTFHGKLMPQSNKWLRWALVKAAWVAVRLDPYFRAHFAKRRAHKPAQSAIIATARRLLEVVWHVLKENRPYQNRPPTGSNHASQNSSAAFATT

SEQ ID NO: 513393 - protein, 345 aa, unidentified
METMYYIGLDVHKKTIDHCVKDSSGRIYAAGSIPATRLALDMWMKTLPRPWTVAMEATIFTAWIYDHLQPHAAAVKVAHPLMLRAIAVAKKKNDRIDAKKIADCLRCDFLPECYMASTEIRERRRTLRYRNLLVRQAVQMKNKIAVLLMEAGVSYNKQKLHKVGYFRELLATNQDIDEGLKPLLRLCRETVVRLGKTESALVRSLERDSLLVERVERLMTIPAVGPITALTWALEVGDVQRFSSIKKAISYCGLCGAERSSADITKRMPLSKQRNKHLQTVLIEAAKMAPRNSPELAMVYEQEKQKGNANRATLAVARKMVAYLVAVDRRQKGFLVVENKNRTAA

SEQ ID NO: 513394 - protein, 316 aa, unidentified
MDDKQTVYGVDVAKAELMIGHDESEALLRIANTPEGIAAWLAQLPTGSWVAMEASGHYHQLLAHMAHAAGMVVYVLNPQLIKHYGRAVGMRGKTDRLDAQLIARYVLREHSKLRIWEPPAPGADALSRLLVRRQALVNARQMLAQSLSGLAELKAPRQALMASFKRMLAQVELLIRTEIARVPAMAALHRRLVSIVGIGTIVAAQLVASLTALRFTRADSFIAYTGLDPRPDDSGQRRGRRRLSKRGHGLLRCLLYNAGMAAARSKLFKPTYQQLRDRGLQSTEAIVILARKLARIAFALYQSGQSFDAQRHVKTA

SEQ ID NO: 513395 - protein, 425 aa, unidentified
MHFKWNNKINQVTENTLVVGMDIAKHIHYACFVDERGRVIEKAFAVHQSKEGFENLYEKILQTMKEAKKTEVIIGIEPTGHYWMNLAYFLDQYGIPLVMVNPMHVRRSKELDDNLPTKHDKKDALVIARLLKDGRFSYPRILKDIEAELRIGSTLRSKLTEDLASIKNRIIRWLDRYFPEFTQVFPNFGKMALATLEMTPLPKDIKEKTAEELVFLYRQVKGMRAPQLPKAKLLIEAAQNSIGLTEGTQMAQHEIATLLRQYRLLETEIETINNQLAEMAQTTMEYEILASVPGLGDATIVDLLSEVGCFALYENPRQLIKLAGLTLRESSSGQHKGQKHISKRGRKKLRNTLFKVIVPLIRHNEAFKQLHEYYTTRQQNPLRGKQSMVILCGKLLKVLHGICKKKVLFNEQQMMKDLYCLEEAA

SEQ ID NO: 513396 - protein, 318 aa, unidentified
MNTKTNQSVNVGVDIGKFQLDIYIRPLDIYFTVSNDEKGIKEAIKIIKQHSPGRIIIETTGRLEMPFIIACANANLPFVVANPIHIKRFAGAIGQRAKTDKLDAQLIAHYGEAIQPKLSQLKPDTMQAMSDLVGRRNQLLVMQTMEKNRLQILPKELAMTIKPILTVFKNQITKIENKIVALIESCPDYQAKNCILQSMKGIGRIASASIISNLPELGYITNKQASALVGVAPMNRESGRYKGLRKIQGGRHQVRTVLYMAMMSAIQSNPVFKETYQRLVAAGKPKKVAIIACIRKMVVILNSMLRDGVMWEAPKATN

SEQ ID NO: 513397 - protein, 413 aa, unidentified
MTTSPRIQSINSNVCLHMSIELAAASWKLGFADQLGRRPRVRSIEAGNFHQLRSEIASAKKKFDLEPDAAVISCYEAGRDGFWVHRCLVSIGIESHIVEPASIQVNRKKRRAKTDRIDAQRIVSALMRFKAGDQLACRMIRIPDTEVEDVRNINREMRTIKTERTASTNRIKGLLCTQGVTKVVIDGSFPRRLKGMRTVEGNRLGEHLQARLLREFDRLALATSQIRALQMQQAKMMRTAAKEIEKSEAERTSPKCAVIAEFLARLSGLGPVTAWTLSSEVFSWRDIENRRQLAALAGLTPTPNASGDDEKEQGISKSGRGELRVLLIEVAWGWLMHQPRSDLTKWYEKRFNDGTKRNRKIGIVALARKLLVAIGKFVRFGEIPAGAKLKDKHQFKYMPALKIPGTELDCLAA

SEQ ID NO: 513398 - protein, 351 aa, unidentified
MRIIGVDLHTRQQSVAMLDTDTGEVIEKTLEHEGDEVREFYSALPGPVLVGIEATGSMPWFLKLMEELKIECRVGHPAKVRAAEPRKQKHDRRDARLLLNLRAENRFPAIWMPSTEQRDLRKLLRHRHQWVRMRTRVQHTLQSLALANGLRRGATLWSQVGQHALQALPLAPFAGQRRAALLALYPVFQKAIDDLDQRVSEQALLHPQARRLMTHPGVGPVTALATEVFLGNPLRFVDGKAVASYIGLIPSERSSGRRQRLGKLSKEGNALVRYLWGEATIHAVRRDPELKRFYRRKLMQKGLGKAKTAAARKLGIRLWIMLRDQIDYKEFCRRGQLRQKSGDARAGMPGR

SEQ ID NO: 513399 - protein, 418 aa, unidentified
MDAIHYIGFDVHKRSVSFCVKQSDGAVLAEGRLPAEREALRRWAGAQTAPWHGAMEATLFSAWIYDTLKPYALRLEMGHPAMMKAIGASKKKSDRLDARRIADLVRCDLLPACYVASPAVRELRRLLRYRNLVVQQSVRMQNKIAGLLMECGATYNKARLHGRKYFQALLGQVEEVPESVKQMLRLSRGALDMFQSVQRQLLKRLHEDAALHARVERLCSIRGIGEVTALTWALEIGDPQRFGSISQAVSYCGLTAAFRASADHQQRGPISKQRNAHLQTALIEAAKLAPRWNPELAALHARELERGHRNRATLAVARKLVAYLLAVDKSGVPFTPPTAPQETHTGENTALSSPAGMVVFPTPPPVVAQAAERSSRSRVRSAAPKTGAPLTAPGRSAQTTLATGGSGGNTTLPGRAAS

SEQ ID NO: 513400 - protein, 442 aa, unidentified
MPKIPIFERKRIERAKALVGKLTIGVDPASRRHTAIVYSPERLPLSAALSVQNDRQGFEAMEKTLNHIRSQYPSHQAVFVIEASGEYWKPMWHYFSQRDYQFVLVPPLFVKRTRDLDDHTPRSNDPKDAVRITNLALEGRYFVPPPQPEIFEDLQQAVRAWEKVTDDLIRSRLRIGSLLAKYFPEYPPLFSNLIGATSLAVLELCPFPADVLSANKETLCQTISNASGKKIEVARVDKLCHKAAESIGVTRGIAGARLRLKVLLQDANKSKEQAAMLRRELRQMQKKIDYAKRIQSICGIGLISTARFLGHLGDMNNFDKVKKIIDLAGISLIATESGNFYSSRQISRRGRAGLRCILYEMTCHFVRFPNSARRKYLASRLQGKLYRQAIVAAIPHLVRTIFAVVNSDSPYQHPAVNDPLRQQIATLEKQRQEQQKKNKKAA

SEQ ID NO: 513401 - protein, 427 aa, unidentified
MPYKIAGIDVHKIMLHVVVPDVQVDGEYDFTRRIFGSLPEALRSLSAWLVEQQVQEVVMESTAQYWKPVWGTLERYWKPICQTREGALATSGRLHLAQALSNRGRRGRKKDFRDAERLVKRLVAHELVLSFVPDVEQRLWRTVVRTKYQLTRNRVQLQNRLEALLEEAHIKLSSLVSDLLGASARRMLAAIADGETNRETLAALADRGLRSTQGQLQDALGVCQELNPVYRRLIRMVLDEVASIDKRIEQLNQEMANLIRLHEDQVKRLAEVPGLGVDSAQQIIAEVGATAATFPSEKHLSSWVGACPGDEESAEVNRSRRSPQGNRHMRRILNQAANAAAKLKGSIFEILYRRYVPRLGHNQTIGIIAHKLCRLVWKILHRGIRYEERGQEVSKASKQKRTRKMIQALRRLGYRIEPNPSQPTITA

SEQ ID NO: 513402 - protein, 415 aa, unidentified
MTKIDTTRKRTLLVAVDVAKSHNEVLIESARPAGHRHFRVANTMADYQHLAEYLRRHGECVVIGFEATGNYHRPLAYFLHQQGFELRLIPTLALARTREAMHNSWDKNDPKDAQVILHLLKTGLTQTWHDPLLSGTHDAQELSKTYHQITRARMRVWHRLRNHYFQLYFPEIERFIRSDSSDWLTVLLLQFPTPALITALSRKEFTAAGLRLAGRKIHKTELLASIYAAAENSIALPVAAHSAAIAMFRLVLEEYRGLGRLRDSVAQQAAAALADNPDRRRLMTVPGVGPITALTILAEAGNLRRFAHYRQFLKFCGMNLSTQQSGRFRGVSRISKYGNARLRTAFWMAAQSAVRMRQNSLRSKFDRYVQANPLDADLRRKAYAAVAAKLARIVFGLIKHETDYRPFFEDALPGG

SEQ ID NO: 513403 - protein, 482 aa, unidentified
MASKATAESEKSKRLTRKQRKDLGRRIWSEKRGLDVAHRDAAGIDIGSREHYVAVGPDRDAEPVRVIGCFTTDLHRMAEWLKQCGVKTVVMQSTGVYWIPVYDVLEQYGFEVWLVNAKETKNLPGRKSDVQESQWLLKLHTYGLLRKSLRPTPEIRGLRTCWRERSEYVQQAGACIQRMQKALTEMNVQVATVLSDLSGVTGMSILRSIVAGERDGMRLAQFRDPPVKASKETIAKSLEGTWLPEQLAILKRQLADWDHVQRQMAACDVDLQAMLKGMPAALVKPTQALPAAAETRGKRNRKRKGNSSKNEPSFDLTGELKRGTGVDLSRIDCIKAMTIQTVVTEAGLDMSKWLTEDHFVSWIGLSPRNDVSGGKVLKKKTRKVVSRLATALRMAATTLRESDSYLGAQFRRLRTRLGPPKAITAMAAQLARLIYRMLKYGQEYVEKGTAQYEQRYRQQQIHLLGKKAAQHGFALVSLANPA

SEQ ID NO: 513404 - protein, 337 aa, unidentified
MAKSRAMRMVGIDVSARWVDVSRAAVDEAVATRQCANTPAGQRALARWVTQGGRAARVVLEATGLYSLDVALTLQRTVGVEVMVVNPRASKEFAGAWGQRARTDTTAADLLREYAARMPFTPWTPPPPVALALRAVMRRVVALIEMRVQERNRLHALSATEALPASVRADVRQHIRALGRQIVRLEREARALVEPAPALRAGYRHLRSIKGIGRRTALLILSEVAVLPAELTVRQWVAYAGLDPRPIRSGSSVHPPVHISKRGNVYLRRALFMPALVAVRRNAAVQRFATDLTARGKAPLTVLVAVMRKLLHAIYGMLKTDTDFNGEKFRRSVRAEG

SEQ ID NO: 513405 - protein, 369 aa, unidentified
MEKGGEKENRMTICIGIDVHKKKCIATLKRDSQEIVEQTSFYNNRHGIKEFIEHIKLYDEGAIAVCESTGNYWIRLHDTLEDNGIDTVLANPIKTKIIAQAKLKDDKIDSNVLADLLRADLVYTSFVPDKEHRELRQIVRTRVDLVATKTSIKNKVHAILAKYDYSCPTNDLFSQKAVQWLKKIELSWIDRMAVDAYLETLCGIEKQIKIFTAKIASISKEDERVRLLMTVPGIDYITALTIVSEIVDIQRFSTPWKLVGYAGLAPSKRESGTTHRIGDSRRITRQGSRWIRFTIVESATTAIMYDNRISKFYRRIASRRGPQKAKVAAAKEMLVIIWHMLTKKEPYRTMNNDLVQRKYKRMERESVLA

SEQ ID NO: 513406 - protein, 410 aa, unidentified
METIFERVAGLDVHKAQVTACVRVPAPSGGREQRLAEFSTTVRGLVALRDWLEAHGVTDVAMEATGVYWQPVWHVLEDAFELMLVNARHVKQVPGRKTDCSDAAWICQLMEAGLLRGSFVPPKPQRALRTLTRYRKTQIQARADEANRLHKALEDTGIKLDCVATNILGKSGRAMLDALVAGTTDPEVLAELAQGKLRPKIPALREALEGRFEPHHALVIGAILAHIDFLDEHIDQLSQAIEEQLGPFAPGVPLAATITGVAERTAQVMVAEIGTDMTRFPTAGHLSSWAGRCPGNDQSAGKRRSGRTRKGSKWLKIALDEAALAATRTKGSYLQAQYQRLRPRIGHSRALVAVQHSMLVAYWHMFSTGETYHDLGGDYFRKRDPERATRRLIAQLEALGHKVTLEPIAA

SEQ ID NO: 513407 - protein, 418 aa, unidentified
MKKHSKSLQRSEPTLKRTKARGPVQRDAKEVLAEVLGKLTGKLDAPAVSRSAKENRRGNTVGPNRDRLTVGVDLGDRWSQYCILGLEGETLAEGQLRTTQEDVREFFQALTVARVVLEAGTHSAWVQDVITERGHEVLVANPRLMEGSKRRKRKSDRIDANKLARLGRVDPQSLYPIRHRSREVRQDLVVLRARDALVSVRTELINTARGLVKSMGTRLPRCSSPSFAEKVKDAIPVEVREALLPLVQLTETVNDCIARYDQKIEELGQKKYGHTTLLRQVKGVGPITSLAYVLTLEDPQRFSSSREVGPYLGLVPKQEDSGDSQPQLGISKTGDRMLRRLLVGSAQYMLGAFGPDTDLRRYGLRLCERGGKNAKKRAVVAVARKLAVLLHHLWVTGDVYEPLNHTGAETRTAQATAA

SEQ ID NO: 513408 - protein, 316 aa, unidentified
MDLAQPTPWVDFIGVDVAKSWIDSHRLSSGQRERVPATRQELGRFARRASSCLVVLEASGGYERPLLDALARAGIAYRVVNPRQARDFARATGRLAKTDQVDARVLAEMGRTLALTPSPPPEPERERLAALLARREDLVAMSRAEANRLAQAATADLRRDITSHLRVLKAHLLLVERRMADCVADSAPLAQAAARLSTVKGIGPVTAAALLARLPELGRLDRRSIAALAGLAPQACDSGLRRGQRHIWGGRANIRRALYLAALTASRYDPTIRAFRSHLQAQGKPIKVILTACARKLLTILNAMMRDGTDYSKQPA

SEQ ID NO: 513409 - protein, 380 aa, unidentified
MASMHDSVRFKTTVYAAIELSKKSWVVAIARPDRDRPSIHRIAGGNLADLIGRLRKAAGEKQRIVVCYEAGYDGFWLARSLAKIGIDCRVLDPASIQVNRRARRVKTDRIDSLALLRALIAIDRGERHVCAVVRVPTVEEEDARRSHRERQRLVRERTGHINRIKGLLFAQGIRGMEPKRRRTRIDFGKLTTAEGRPLAERLRRELEREYQRLELVQSQLRIVEKERDTADAQDPAVERKRELLCALQGVGGASAAILAREVFARPFASRRQLGSYLGLTPSAYDSGSTTRCQGISKAGNSWARRVLIEVAWLWRKYQPGSPLSHWYARKTADQSPRIRRIMLIALARKLAISLWRYVETGLVPDGAVMAKTTPHMATAT

SEQ ID NO: 513410 - protein, 342 aa, unidentified
MEKVSIIGLDIAKSVFQAHGADASGGVVFRKKISRARLLEFFASLPPCTVAMEACGGAHHWAREMAKLGHEVKLIAPKYVKPFVKRQKNDAADAEAICEAASRPTMRFVAVKSETTQASALVFRTRDILVRQRTQITNAVRGHLAEYGIVVPQGAGHFKKLVAYLEDPASPLPDEVRSTLSLLAQTATGLEEKISLLDKEITRRTREDEVARRLMTIPGIGPITATAIAALAPPASAFRRGRDFAAWVGLTPLQKSTGGKQKLGATSKMGERTLRRLLIIGAAAAVQQAVRRGAPPTTWLGRMLARKPRMLVTVAQANKTARIVWAILVKGEDYKSPEVAAA

SEQ ID NO: 513411 - protein, 388 aa, unidentified
MQIVTDRSQAPTAIRTDLGAIFVSLELSRSTWLVTSLSPGGGEKMSKHMIRSGDVAGLWSRFSQLKDKALDRTGQGVPIIVIQEAGLDGFWIHRLLQSERIESYVVDPASIATSRRRRRAKTDKIDGEALVRALLAYKRGEPRVCTMVRAPTPQEEDRRRICRERKTLTAERVEHVNRIKGLLFAQGISDYEPLLRKRWERLEELRTGDGRPLPEHLKAQIRRELDRLELTLQQIKAVETERNAMLSPSDDGTPAPGAMLKNLKGIGPEFAGVLWSEGLFRSFSNRRQVAAYAGLAPTPWRSGSVAHEQGVSKAGNPRLRTTMIQLAWLWVRHQPRSILTLWFHQRTQLNGGRVRKVLIVALARKLLIAFWKYVTAGVVLEGAETTSA

SEQ ID NO: 513412 - protein, 376 aa, unidentified
MSDSIIYVGMDVHKDFVMMAVLPADAPRPTRVERVPNEPTHLRRFFRRWVPQGRVRACYEASGAGYVLQRTLEGWGVECAVIAPALMPTRPGHQRKHDKRDAIELARLHRAGELVPIRIPTASEERVRDLVRCREVLQRELIRARHYLVKFLARRGLVYREGTPWAGPHERWLQALARSGALSAEDATVFGEYRALIAYVAQRRAELDRQIAALALTPAYAASVARLRCFRGLETHAAMVLASEIGDWRRFTSPRPLMAYLGLVPREASSGTHERRGSITKAGNSHCRHVLLQAAWSYRHVPARSERLQQRQQGQPAEVVAHAWKAQQRLHRLYGRLAYRKRPAVAVVAVARELVGFLWAVMQDVAPAAEALAHVA

SEQ ID NO: 513413 - protein, 386 aa, unidentified
MRGKTFIPRDYDVFAGLDVDKRSISVTFSNHQGFISSLHMPYSAEHLIKHVRKHFGDQKVAFAYEAGPTGYGLYDGIVAQGYRCLIAAPAMIPRAPGQRVKTNRLDGVSLSENLRGGQLKSIHVPTPIYRELRHLVQLRDTVMSEVVATKQRIKSLLLFEGLDFPTAPAGSQWSLKVKRQLQKLTCSKGVRFKLDELLDSLEFLEKKVVKSTREIHRFCNDDPELLQCIQYMMSVSGIGWIVASQLLARIGNWREIQNVRQLAGFLGLVPTEHSTGDRIRRGSITHSGDGRLRSKLIQASWSAIRQDGELRDFYRSVCRTHARHLGPRVAIVAVARKLSARIAVVLMQQRPYVVRKKVDSAPLTQEETVPQGTTRRLGEPGETDNS

SEQ ID NO: 513414 - protein, 357 aa, unidentified
MVFVGVDVHMSYLEIAEIDKDGKLESRRRIGNTLESIDAFVESLDSDAKVAMESCSYFYPLYSRLEEAGIEAKVAHPLKVRLIAESRIKSDKIDAVVLAQLYRMNYLPTSYVPPKEVRQVRALLRHRTALVRQRTQIKNRIHHLLEKNGVKTKRLGCSDIFGKGGLTRIHRVDLPTIERSILNTDLGLLEYFTKTIDQLGSELARIASENPQARLLMTIPGIDYYAALLLLMEIGDIRRFSDPKKLCCYSGLVPGLHQSGQVARYGHITKQGNKWIRYILVEAVGHPIRHNPESEIHRMYMRIKARKGHSVAKVACARKLLKVMWFMLTRNEPYRYSDSQLIKRKERRLERKASKCY

SEQ ID NO: 513415 - protein, 320 aa, unidentified
MRNAVGLDISKTTFDATAIIGGIEKSAKFDNDSKGFEQFKDWLDKLKCPDAHICMEATGNYYEGIADYIGRLYKVSVVNPLKISKYAESRFTRTKTDKQDAKLIAEYCQTAKAQDLVIRKPVINDGYKLKRLSALYAQLTADSTAQKNRLEAAKDTFVVKICQSNIKHLQRQIKVVKKELEKLTKQPALKDQTDRLATIPAIGRLTAVMLLNYLSGTDFPTSNKFAAFAGLTPQIKDSGTSVRGKPSLTRYGNRRLRAMLFMPAMVAYRIKAFPDFIARLEAKNKPKKVIIAAIMRKLAVIAYHVHKKGEDYDPTRYKAA

SEQ ID NO: 513416 - protein, 518 aa, unidentified
MARTPSRRFRVRTPASVGKPRGVLHPRVQQVGPEHFGIVCFDCHKVSSKFLLADFYGRRLIPPTAVQHNRPDLDSAIAQIRRAFEHHQVRDGVVAIERTGRYHRVVQRAFGACGFETRILHPFVTKQYRQPVDPGNKTDDADLAAIYRATITGCALLEASRDEAWTTLQLLIRHRRDLVRKGAALNCQIRDHLEAALPGYAACFDKLWDSPIPWHLLRYYPTAGQLHEAGVARLCQSLRQAGMRFQKRTLQSVVDWALQAAAGDIAAHQHLRIALALYADRQRKTQEIQALERDIAGRLVQTPYVLLLSFPGINVVSAADFAGEAGPITHYLNAKSITGRAGLRPSRYQSGQVDLASGPLVRHCNHALRAAILGIADNLITCNHHFQALATQWRAQGKDPRDTRVKVGLRFCRIAFQMVAGRQVFRHPCIQGRHYILDKLTAFHRAHDTGMPEVLRDLQAAIGQLPPHAQAEEARPLAQELRRIQDGRRRGPQLLGDILPIVLARLGVGVVQSTESGE

SEQ ID NO: 513417 - protein, 371 aa, unidentified
MGESSKMLFVGLDVHKDTIAVAYAPEDRGADVESLGAIGTRQCDIDKLIRRLESKGATLVFVYEAGPCGYWLHRYLTRRGFSCAVVAPSLIPRKAGDRVKTDRRDAVTLARLLRSGDLTSIYVPTVADEAIRDLSRGREDAVGDLKRSKVRLKAFLLRQDIRYEGRANWNAAHLRWLARVVCPTPAQQIVFQEYVHTVTEQSERLRRLESELHTAVKTWRLYPVVEAVQALRGLDLTGAGTLIAEVGDLTRFDTPRKLMSYLGLTPSEYSSGAHRRQGGITKAGNGHARRALVEGAWAYRYPAKVSRHLQLRLEHVPPEARAIAWKAQVRLCKRYRLLSARGKHVNQVVVAIAREMAAFAWAIARTVPVAS

SEQ ID NO: 513418 - protein, 423 aa, unidentified
MNFTQNEKISQVTNETLVVGIDISSENHYVRAFDWRGIELSKTFKFESTSYGFKRLMEWLDETCKSNSKTKVIMGAEPTGHYWFTLAEYLKENNIKFVFVNPMHVKRTKELDDNHPSKNDRKDTKVIAKLVIEGRYLIPYIPEDIYAELRVANERRMRITREIVAIKNRIQRWFAIYFPEYTHVFGSWECDSSIEVLRNCPLPADVMSLGAEDINQLWREKKIRAVGIKRANALIEKTSVGVKNGANAARFEMSMLIEDYLIKKEQEARIIEILKTLCIQVPNSEKLLSIKGIGILTVASFFGEVGDIRRFESPKQIQKLAGLAIANDDSGKHRGKAGISKRGRKLLRYTLFQAVISLLMHSPEFRYLHHYYTTRSNNPLKGKQSKIALCCKLIRVFYAILTKGVEYDSEKLLYDIVRPELAA

SEQ ID NO: 513419 - protein, 346 aa, unidentified
MRFYQATHSFYCGVDLHARTMHVCVVDAEGVTRVHVNLPCVPGRFLQVIEPYRERLVVCCECLFAWYWLADLCREQGIAFVLGHALYMKAIHGGKSKSDKIDSEKIARLLRGGTLPQAYVYPKEMRATRDLLRRRMFLVRQRGQALAHVANTFTQYNVATPEKKLSYHKNRVGVVDRFQDQSVQRAVQSDLQLAEHLDEQLRGIELYLIQHAKIDDPQAFARLQTISGIGPILAMVIVYEAHDIGRFGSVQQFVSYCRLVKCSHESAGKKTAGHGNKIGNAHLKWAFSEAAVIMLRESAGAKKFVARREKKHGKAKAISILAARIGRTVYWMLKRKECFDEARFLK

SEQ ID NO: 513420 - protein, 346 aa, unidentified
MKYYAGLDVSLKETAICIVDEKRKIVREGKVGSEPEAIAAWLARTGLEFERVGLEAGSLAPALHDGLSAAGLPVICMDARHLKAATSAMPVKTDRIDARNIAWALQAGWYRAVHVKSRATHQLRALLRSREMLVKSKQMLENHLRGVLKAFGLKVGNVASSRFEQRVRELVDGEEILGQVVTQILRVRREVMQRLDDLHRLLLAAVKDDPVCRLLMSIPGVGPVTALAYRTAVENPARFAKSRDVGAHFGLTPRRYASGETDRTGGITKCGDRMVRALLCEASNVLLTRVQRWSWLKRWGVDVARRRGKLRAQVAVARRLAVIMHRMWVDGTTFQWTRDAEEAATA

SEQ ID NO: 513421 - protein, 382 aa, unidentified
MQPAQLNNNTTNNLLAVSFELSKNSWKLALHDGCREKASIHTVNNEVASDRLSEAIGLIEQAKQKWNMPSDTRVVIVYEAGQDGFWIQRALTQMGYEALVIDPASLPVERHARRAKTDRLDAIKLVLALRAWLRGEHDRLHIIKVPSVEAEAQRQLVRDRGELQKEGQQHRDRIRKLLRTVGCWEDIDRDFTDRFTNGNVACHNGSALPVELKERLDREMDRLKLVNTQLAALEKSLVGKLPEPIQKRIDTLQSLKGVGEVGAKRLVLELFWRDFDNRRQVGSCVGLVPQPYDSGESRVDQGISKQGNRRVRALLIEMSWLWLRYQPESDIAQWFLARTEGNAQNKRGKRIAIVAVARRLVIALWRYLEQGVVPNGAQLKPC

SEQ ID NO: 513422 - protein, 317 aa, unidentified
MDVAFKSFVGIDIAKRTLDVHVLPERTSLKPPNDSKGRGQVREKLPPPGECLIVVEATGGYERALVAELIDAGHQVAVVNPRQVRDFAKACGILAKTDRIDAAVLARFGQAVVPRTQTKIPEKQLELQDLVVRRRQLVELRTAEMNRKENVASKFVKKSLQESVDALTKQIRRFEKRIAALVQSDDEWKQKAEIVQSAPGIGPGTSATLIAEVPELGKLSRRKISALVGLAPFNRDSGEFRGRRAIRGGRSSVRCSLYMATLSARRSNPVIRAFSDRLKALGKKPKVIITACMRKLLVILNTMVKNNTHWNPAISTT

SEQ ID NO: 513423 - protein, 360 aa, unidentified
MEATLTWVGLDVHARSTHAAAIDLMTGELKRMRFGPGNEQVVDWLAQLPQPRAAYEAGPTGFALFRAARARGIAIDVVAPSKTARPSGERVKTDRKDAELLARLGLAGQLAVVAVPEEFIESVRHLSRSREQLRQDLMRARHRVSKLLLQHGRVYPEPTTWNQRHRIWLSRQHFEHEPTEIAFCDLLAAVDGTVARKAALDERLLRLAQDERLWPTVQRLRSFRGIDTITALCLHLELGGDWQRFSSPRKLFSWLGLTPTLAQSGESSTQGGIAKTGSSYGRRLLVESALHYARKPAIGVTLSNRQAGQPAHVLQISWRAQQRLYRLHHRLRARGKPFNVATVAVARELSGFLWAAACAP

SEQ ID NO: 513424 - protein, 381 aa, unidentified
MKRPRGSHPEPQIVPFSRKLLAEIGRYQEPRNWQLVLTRSIGQASTGEARRELEVEMKLLVLGIDIAKHSYQVSLRVGKKIERQEFGNEPEHFRELSAWLKQHQVKRCHVCMEATNRYWEALAKYLYAQGHVVSVVNPSRIRDYARSKLLRNKTDKLDADLIADFCTTQTPDAWQPLSPEIQELQALMRHWEDLKALRSEVQARLSNGSPSASVHQMLTEHLAFLDQQIAELKKQIESHIDQHPGLKQQRDLLVSIPGIGDLTAAKLLGENIQAFSSTRALAAYAGLNPQHRLSGTSIHYRPRLSKIGNPHLRKALYFPAINAKRFNPVIQTFCARLHQHDKHKMTVIGAAMRKLLSLCLGVLKSGLPFDPNYQSTALLHP

SEQ ID NO: 513425 - protein, 400 aa, unidentified
MISVGIDVSKEKSTICILKPYGEIVSRPFEVCHTEKELSELTSMLLRLNDDVRVVMEATGIYHLPVLCYLKEKGLFVAVVNPFEMKEYRCQGLRRVKTDKQDAVTISNYGIDHWYRLKNYEAEESVYAELKLLGRQYRHYMRMRVESVLELTHLLGYTMPGIKTLLKGWNETNGKDKLGDFAEEYWHYDNITKKSEEQFIESYLKWAKEKGYHQSQDKAVKIYALAKEGIPTVSSDTPSTKMLVQEAVRVLREVDNTLMTILTQMQALAKSLPEYPVVRAMGGVGNVLAPKLIAEIGDVRRFHSGKALIAHAGIDAPPYQSGQFIGTERKISKRGSSSLRKIGYEVMRCLKTHKEPEDAAVYKFILKKEKEGKSKRAAKIAGLNKFLRIYYARVMEVYQK

SEQ ID NO: 513426 - protein, 350 aa, unidentified
MMVLKQVLGVDIAQKELVVSLGRLNEDLSVDLYSYRVFSNKETGFEALHKWLIKNTVETVNRHIVMEATGVYHQKFAHFALEKGHDVSIVLPNKISNFMRTLETKTITDKTCSEAIARFGLERKLEKWSKPDETYRCLQQLTRERDQIVDERTMVKNRLHAEESEMYPNKSSLERMNELIKFYNKQEKAIKDEIKEHLEKNKSIKDKVDKICSIPGMGSLTATIILAETNGFELIRSKKQLTSYAGMDIKEKQSGTSVKGRPRLSKKGNRHIRKSLHLPSLSAVKYNQTHKEMYTRLVEKHGVKMKALVAIQRKMLELAYILCKNDTVYEEDFEKKKRAAQMANSLETSI

SEQ ID NO: 513427 - protein, 446 aa, unidentified
MAKVTYRAVSIERVTSVSLAALLAGAVRLVVAVDVAKTKMMAGFGREDGSIVRLVRFDSPMQTRTFVELVVETGQRLGVPVEALMEPTGTYGDGLRALLSEGGVSVFMQSPKRIHDAREVFDGVPSLHDAKSCVVMAQLHRQGVSRAYAAASEERRELRALVDRRRVYEKPLQMHLGELEALLGRHWPELLVDMDVWRQRTALELLVEYPCPADATAHPDDALALMRRVSRNGLKQARLQQVLDSAASSVGLPASAHERELIRCVAREALRVRDAMRSIDKELEAIADKHDATRSIAPVVGRVTAVVLVAYLGALSEYASAAALEKACGLNLKIKSSGNVAGRPSITKRGSPEARAYLYLAAMRLVKDDPLMAAWYRSRGGYLANRKPLALVAVMRKLVRALWHVARGATFESTKLVDARALGLEACHPASTLHGTPSLAEVGVAP

SEQ ID NO: 513428 - protein, 418 aa, unidentified
MTNEVRWFVGIDWGSEQHRGCLLDAEGRCVGERDVAHGGAELSELCTWLLDQTAAEPAEIAVAIETPRGPVVEALLERGFQVFAINPKQLDRFRDRFSVAGAKDDSRDAKVLACSLRTDQQAFRRLAADDPLIVELREWSRIYDELKQEQNRLTNRLRGQLWRYYPQAIKLSDDLAATWFLDVWQQVPTPAKAARVSEKTIAAILKNHRIRRLDAAEVLRILRQPPLVVAPGTTEAASAHIRTIAARLRLINQQIKEAEGRLDELCAAIETAAESAPGQICEQRDVAILRSCPGLGRINIAALLAEAWEPLRRRDYHALRILSGVAPVTRRSGKSCIVVRRHACDRRLQTAVYHWARVAIQHDPISRQRYAELRRRGHGHARALRGVADRLLYVLCTLLQRQILFDPDHRSSPMAAAA

SEQ ID NO: 513429 - protein, 313 aa, unidentified
MSQNNTSILYVGLDVAKLSLQLHLAGRFHSLANDLKGHAQLLKLLRGHRAAHVICEATGGYEQPVVRALQAADIPVTIVEAGRVRYFARAQGQRAKSDPIDSAVLTQYGLTFKPAPTPAASARQQRLADVSQRRRQLIQARTAERNRAEHYTDPLCLRQDRQFQKLLEKQIDECDQAILTLIAGDADLARKAKRLQAIPGVGPVVAATVLAEMPELGKLNPQTAAALAGVAPYDRDSGKLRGIRHISGGRRPVRCALYMAALSAVRHDRILKEFYTRLRAAGKKPLVALTASMRKLVVLMNHLLKNHEFQLAN

SEQ ID NO: 513430 - protein, 478 aa, unidentified
MAAKKKDARTGPDRTTADAAAEHGGEGAEVAEDRVQVVEYAAAIDVAKGSGMVCTRVPGSRPDRRRQTVWRVEATYAQVTALMDHLRCEGIQRLVLESTSDYWRIWFYLAEAAGLEVWLVNAREVKHLPGRGKSDRLDCVWHCKLNERGMLRRSFVPPEPVRDLRALTRTRARLAQDQARHQNRVEKILEDAQLKISVVISDLFGASGRRFLDALVAGERSPKALAALGDPRLKATRQQLEDALTGRFRDIHAFEISTHLRIIDAINEEITRLDGKIEEQLALVPRTAPACVACGLAGGGHAPGCADEQVPLLGLAARLDEITGIGECNARAIIAELGTDPSQFPTPGHAAAWARLTPRTRQSGETARPGRTGKGNRYIRGALGQAAMTAAKTDTRLGAMYRRIARKRGKQKAIVAVSRIICEIAWILICDPAARYHELGPDYYTPRSPARQTRDKIREIERLNPGKKVILADADAAA

SEQ ID NO: 513431 - protein, 348 aa, unidentified
MTIIGGLDVHRAQITFDYLDTETGEIFTGQIRPASRSAFREWLGGRRFGGCADVRLAVEGCTGWRFIVEEMQRAGVRPHLAEPAETASRRGRKRRAKTDKADARLLRNLLLEDRLPESWIPPQLVLEARILARLYLSLSADRSAWLQRIHAQLYHQGVPAIETLLTGDGCAKLVEAALSPAGRQAVLTATATIQALDQQREPLRAQLQALARRLPGPRALTAHFGIGLLTAAVIWCEMGDCQRFRNSDQVVRLAGLDVTVWASDSKRSPGRLARQGSPTLRWALFEAAKTSARPASPDYDFYEATRQRLDAKRATLSVARKLARRCYHTLRDLGAEAISDADETTQAA

SEQ ID NO: 513432 - protein, 324 aa, unidentified
MIDGILGIDVCKNTLDVSISSYTKVRTKSFTNSPDGWRHLLDWLIAQKIQRVHACLESTGRYSLGIACALYEADHVVSIINPAQIRDFVRTKLGRNKTDGVDASHIREYCELFKPSPWAPPSEAHRRLGELQTIRSGIIAGLTEWKNRKNSGIVDAEAQALADATISHFTSQLGAVDKAIAVTIDNDCDLQSKRDLLLSISGVGETLAGVVLAELPGPDVLRSSAEVVAYAGLNPRQHQSGTSIDRATRISKIGNAVLRAALYMPALSAMRYNSAIVALVTRLKSRGRLKPKQIVVAAMRKLLVLCFGVLKTGRPFDAAIAMGG

SEQ ID NO: 513433 - protein, 356 aa, unidentified
MINSTKYIGMDVHKESISIAVMNAAGKIVMESVIETKASMILQCIDGIRGDLQVTFEEGTSAAWLYDLLKPHARKVVVCDPRKNKSMREGNQNDKIDARRLAELLRLDHLTPVYHGEHGLRTLKELVRSYLSITKDLARVKSRVKAIYRSWAIPCSGKQVYAQCHRAEWLGKISEPGVRRRAEFYYQQLDALRVVRLEVRKDLLAESKKHKAWKRLCEIPAIGPIRAAVLLGILQTPHRFRAKRPLWNYGGLAIEMHSSADHRSVDGQLQRSKKNVMIRGLNRNCNHDLKNLFKGAAAVASSKPGPFQEFYAALVAKGMRPEMARLTLARKIATIVLIVWKRGVRFDAHHLKPQTA

SEQ ID NO: 513434 - protein, 343 aa, unidentified
MQTITTIGLDIAKSVFQVHGVDAGGQVVIRRQLKRRSVLAFFQKLPRCLVGIEACASSHHWSRELQTLGHTVRLMPPAYVKPYVKRQKNDMADAEAICEAVTRANMRFVLTKTPEQQSCLMLHRTRHLFIRQQTAVINSIRAHLAEFGIVAPVGRKGVTELLHIVADPSDKRVSEVARACLAALGSQLLSLKQQIVEFDRMILAWHRSNQTSKRLHYIPGVGPMLATALVASVADPSTFRSARNFSAWIGLVPKQHSSGGKDRLGSISKQGDRYLRSLFVAGALAVIRYAKIHGTGHRPWLTALLARKPTKVAAIALANKIARMAWAMMAKGERYKEPIALAR

SEQ ID NO: 513435 - protein, 341 aa, unidentified
MLEVSTIGLDLAKNVFQVHGADASGAVLVRKKLRRDQVLKFLAAQPACTVAMEACASSHYWGREIAKLGHEVRLIAPDYVKPFVRRQKNDAADAEAICEAAQRPTMRFVAVKSEEQQAAAVVFRARDLVVRQRTQTINAVRGHLAEFGIVAAKGPFHVAKLVAAIEDDRSGIPEMARPILCLLVEQLRSLDERVALLDRELARRAKEDAEAKRLMTIPGIGPITATALAALAPTAQAFKRGRDFAAWLGLTPLQRSTGGKQKLGETSRMGERTLRRLLIIGASATVRWAIRKGSTADPWLARMLNRKPPMLVIVALANKTARIVWALIARGGTYRAPAAAK

SEQ ID NO: 513436 - protein, 363 aa, unidentified
MEYIAFDAHKRYTLASVVRPDGEVVREERIEHDRGSLRGFLERCERGSPVAVETIGNWYWIVDEIEAAGCVPKLVHARKAKLMMGEINKTDKLDARGLNRLQRNGTLPTVWIPPGELRDQRDLPRTRMVLVRQRTQLKNRIHATLAKYALHDLEVSDFFGVRGRALLRQRFDLLPTHTAYASQQLLEQVEELDRQVRAFEQRIQATFKPTPAIQLLLTLPGVGLTLAVVIALEVGDIARFVTAEKLAAYAGTTPRVHASGGKTRFGPSRPDVNRYLKWAFVEAANAICIARGRVPHRHVSRLYERIARRKGHAKAIGAVARHLAEATFWILSKHESYREPKASAVSSTGDKRGWPLSSRKLDR

SEQ ID NO: 513437 - protein, 461 aa, unidentified
MSNKKPAGPQKASARKRVNWQALDVVHPEAAGIDVGGSEHWVAINPERDPEPVRRFGCFTADLREMARWLVQAGVRSVAMQSTGVYWMPVLELLEQYGLEVYLVNARHTKNLPGRKSDLQECQWLLKLHAFGLLNNSFQPTNQIRIARTLWRQRGNLVAQAGSAIQRMQKVLTEMNIQLANVLSDLSGVSGMKIIGAILEGERDPWQLAALARPEVKATPEDIAKSLEGNWREELLFILRQEVECYRFYQSKIVDCDLQLRQHLQSFGARVDIRAQPLGPKPKGKKGSRNAPQFDLRTELYRITGIDWTQINGIDVLTAQTVIAEAGADLNAFPSEKQFASWLGLCPTNEQSGGKILSRRTRKVVNRATVAFRNAAATLLRSQSYLGAQYRRLRTRLGAPKAITAMARKLACLFYRLIKHGQQYVDKGIEYYEARYRDQQIRSLAKKAHKLGLQLVIPETA

SEQ ID NO: 513438 - protein, 383 aa, unidentified
MDIITYVGMDVHKATVSVALAEAGRGGEIRQFGVFENRPETLTKLAARLSKGRHRLSFCYEAGPCGYGLHRLLTGCGHDCVVVAPSLIPLKAGDRVKTDRRDAMMLAKLHRAGELTAIWIPDAAHEAMRDLVRARATAGRVLSKARQHLQGFLLRHGQIYRGVRAWTLAYRRWLTTVRFAHPAQQIVLQDYIHAVADAEARRDRLTRQIEELLPSWSMAPVVEALQAMRGVALVVAVTVVAEVGDFRRFANARQLMAYLGLVPSEHSSGSTIRRGGITKAGNALARRVLIEGAWTYRMKARVSRKLHDRLEPLPAEVRDIAWKAQVRLCARYRRLAALGKPSVVATTAVAREMVGFIWAIARLAQPAVEDQRTQRAHAEAPRC

SEQ ID NO: 513439 - protein, 445 aa, unidentified
MRDQSASVIEDEEVGVSGRIDVDRGLQPEGCRAANNVQKEVMVNNQRTLPDTAEPSLFIGLDVHKETIVIATAEAGRTGEVRSHGTISNDLHALEKCFAKLRKTHALTAAQLEVGYEAGPCGFVIARRLAQLGIPCKVVSPSLIPKKSGDQVKTDKRDAKKLARLLRSGDLEAIHIPDAADEAMRDLCRARTDAVNDQRRLRSQLKGFLLRHGYKYSGKSSWTEGHLRYLRELVLEHPVHKVLMEETLKSLSEAEERVIRLTQLIEAHFLVWERRDWCQALMTLRGFAVLTAVTTVAEIGDTGRFKHPRQLMSYLGLTPREYSSGETRRQGGITKCGNSHARWFLIECAQHYALVPKISAQLSKRQEGASRRIKEISWNAQNRLHARYRSLIGSGKCRQKAITALARELLGFIWAILKEHTRPGSVSVRSNVMKKPREYVIKSSR

SEQ ID NO: 513440 - protein, 339 aa, unidentified
MTKHNLLAIDLAKNVFQVCGMTQHNKVTFNKQLKRAELPEFMAKQPPVVVAMEACYSSNYWARSFEAMGHTVKLLPAQHVSPFVRGNKSDRNDSVAIAEASRRPNIRTVPIKSVEQQDIQCLHRIRERYITSRIGLINQTRGLLAEYGIVAPKGHKAFSALLREVASTENSVISPLLKIQLHQVIEEYCWHSDRLKEIQITLTNIANTNPLSQLLLSIPGIGVINATLIYSAIGNGSQFKTAREFAVWLGLTPKQASSGDTFKSGGITKRGNRHLRKQLVHGARAALTRCRNKTDKVSLWANQLVARRGYNKACVALAARMARTCWVLLNKRETYKVAC

SEQ ID NO: 513441 - protein, 427 aa, unidentified
MPTSTATDQPAQTVTVGRRSWLWLLIVDQHDIEVFIGLDVGKSDHHAVALNRSGKKLFDKALPNDEARLREILAKLSEHGKTLLVVDQPATIGALPVAVARATGAEVGYLPGLAMRRIADLHPGQAKTDARDAMIIAEAARTMPHTLRSIAPDDETLAELGVFCGFDDDLAAQITATSNRIRGLLTQIHPALERALGPHLDHPAVADLLTRYPTPAALKTAGRGHVRARLKKHAPRAAERLTEAIFTALEEQTVVVTGTNAAGIVVPKLAEQLLSLRHQRDAIAAQVEALVEAHPLHRVLTSMPGVGVRTCARILTEVTGKHFTSAAHLASYAGIAPVTRHSGTSIRGEHTSRRGNKKLKRALFLSAFAALHHPPSRAYYDRKRAEGKRHNQALIALARRRSDVLFAMLRDGTLYQDPEPRNLPSAA

SEQ ID NO: 513442 - protein, 397 aa, unidentified
MLGRVWAGVDIGKGHHHAVVIDPDGVRLLSRRVANEETALLELVAQVSGLAGQVDWAVDMSTGGAALLLALLVAHGQRVVYISGNQVNRVAGAYRGEGKTDARDAAIIADQARMRRDLTPLRLDDELIVELRMLVARRRDLAGDRVRLVNRLHEQLLGISPALEHALELTNRGPLVLLTHVQTPAAIRRLGAERLEDWLRSRKVRGAAELATKAVTAANTQHTTLPGERLAAQLVADMAKGVMSLDEQLKHTDKLIEGRFRGHRSAEVLLSMPGIGILLGAEFLAATGGDMTAFASADHLAGYAGLAPAPRDSGRISGNLHRPRRYHRGLQRALYTSALVSIRCNPQSRTFYDRKRSEGKHHTQAVLALARRRVNVLWALLRDNRSYTPAPPTAAAA

SEQ ID NO: 513443 - protein, 401 aa, unidentified
MSKKNTRNALDTSLSYAVIGLDLAKADCAVAAVPCSDDELGLIDRMDYESLFEQAEKLEPTLFAMEPCCGYSQISLRLQNMGHEVKVISGHAVKNWIATHKSNQKTDLNDATALAKLALYDHDLQPIRVKNVEECRIASVQAIRIQLRTQATKSLVCFKSLCQCWGIVIRRGSSNTKKMAEAVAAVEKLLGAEVTSSLMILRDAYKFTMKQINALDKLLDALVEANEQARTMKTVLGIGTQTAARLAVTTGDIKRFPMPRSYVAYFGLAPRNIITGHSGTPSPSKRGALKPVSSRGQGKVSRRGDRVARSFIIQGAATIYMLYCKDMLPECQLRRWLHEQIKRGKPYGKIIVSLAAKLLRIVWALLTYGEKFDSHKAGVPRSVLAAMEKPLKHDVAAESAA

SEQ ID NO: 513444 - protein, 343 aa, unidentified
MQVTTIGLDLAKHWFQIHGIDARGGVAVRRKLRRGELLTFFQSLQPCLIGMEACATAHHWARELSALGHEVKLMPPAYVKAYVKRNKNDAADAEAICEAVTRPSMRFVPVKDAEQQSVLMLHRARSLLVRQRTMLVNALRAHMAEFGIIAPAGLRNVELLTETVAREHERLPDLAREILQLIVEQMHDTMLRVREIEARLAKWHRQCQVSQLLATVPGIGIMGASAIAATVADPSLFRSGREFAAWLGMTPRQNSSGGKERLGRTSKRGDKYIRSQLIACAVAILRHARNRSTRDGEWVRAMLARKPTKVAAVALANKTARIAWAVMMRGSGYQAKEVLGQTA

SEQ ID NO: 513445 - protein, 388 aa, unidentified
MYLIGIDISKYKHDCFIATEAGVPIKAFSFENNRLGFDLFLKDLRFLDQSKEIRIGLESTGHYGSNFKQFITTSGYTYLEFNPYLTHMFSKALSLRKTKTDKVDAKTISSMLGSVDYKTLHTKFYHINELKQLVRYRHVQMMNRSKTLIELTNILDRTFPEFKPFFNERLAGSALFILKKFKSRTRISKFSTKDYESIRSYSKGKLSYVRVQKLKSLALSSVGYETQSDLLLLKHTIKHYEELSNTLDTIDEEILSMMKGIPQTLTTIPGVSVISAAIIIAELGDFKNFTNPSQIVSFSGLDTSVNQSGTMETRGHLVKRGSGLLRMTLWQITFSSLKLNPKLYDYYLKKRAEGKHHKVALVHCARKLIRVIYYLGINQVPFDHSQFK

SEQ ID NO: 513446 - protein, 482 aa, unidentified
MKKSEKERKAQVLEMLSKQKIRSVADIESYKLSVCHPASAGIDLGSRSNYVAINPDIAAEMGTDIVHQFTTTTSGHRACRDFLLSCGIKQVSMESTSVYWMNLYYTLEDAGIEVCLVNPKKFRMVPGRKTDILDCQWLQTLHMYGLLKGSLIPDGNIRKLRSYMRQRESLLQDKGRYVQRMQKALVQMNLMLVNVLDDITGVTGNAIVEQILAGERDPVKLASFRHYGCKKSTEEIAESLNGCYKDDQLHLLKINHDAYKFIQGQIDEIDGYIDACLRTFPVKEVQTETESKENKADVRKLYKKPRSKKNGIKTTINLEERLIEMTGVNLMSITGLGANTILQVISEVGTDMSKFPSAKHFAAYLGFVPRNKITGGVIISSSTDRTKSRAAQAFKKIIPSISRSDSAFAAFYHRIAARAGTGKAITATCRKLSLAFYNTIVLGQDYVEEGNKRYKERLADKEKKLLEKLAKKHNMVLSPVAC

SEQ ID NO: 513447 - protein, 421 aa, unidentified
MRGLRAKRVRAVKAETLIVTVDVGMASNTGYCTTVDGRDIKPFKFDNTREGLDKLWSMVVVSRNKFKCTEVMVGYESTGPYAEPLVHYLMPRPVTIVQVNPMHTKRIKELNDNSPLKTDDKDPRVIADVLRLGHALSVVVPEGDAAYLRRLNNARERHVGERTALLNQLQQLVFLIFPEFKAVFNDVTVKTAQHILKNYTTPETIGTLTKDGLGEEIRKRSMGKFGVKEAERLISLARDTIGIKEGIAGIVLDIHHILVQLQTLNGFVQEIEAEMEKTLERVPCSTRILSMKGLGVVTVAGLIGEVGDFSKFRTQPEIMKLAGLDLYEISSGKRKGQRRISKRGRSLLRKILYNAAISTIRKNGIMCTQYANLIGRGMKRTSALIVIAKKLLRIIHAMVRDDRDYVSNYESPKRVVIRKAA

SEQ ID NO: 513448 - protein, 376 aa, unidentified
MGHDSTVYVGLDVHKESITAAYAVGIGEVELLGKIGTSKTDIDRLCQRMQSKATHVRIVYEAGPCGYGLYRQLVQKGFDCMVCAPSLIPRKPGERVKTDRRDALKLVRSLRAGDLSSVYVPGVEDEAFRDLARAWAAAKADLKHARQRVKSFLLSHGVRYTGSANWGPAHRRWISTFAFPNHWQQLAFDECRRTIEDRLAQCDRLEAALREAVVNWRFYPAVLGLQAMRGIQFTTAVGMLAELGDLSRFEHPRQLMAWLGVTPSEHSSGDRRRQGSITKNGNSYARKLLVEAAWSYRYPARVSPDIQRRHEGIPKPIIDRAWDAQLRLCRRYRKLAARGKNVNTSVVAVARELSGFIWDISRLAMSLAIPKDARPV

SEQ ID NO: 513449 - protein, 338 aa, unidentified
MTETQYFVGVDIASRTFTVSVGGTPWKVILKPKLFENTEDGFQTFLEWLASHQIFARQTVICMEATGVYSEGLAYFLFAKNYQVAVQSPLEVKRTFKPNGPKTDAVDSLQIAEYACRHLDKLSFWQPRNDILEQVKALLATREQFVSQNVAHKNALQAIQRKPVRTPFAEQAHSQMIEQFKKQILAMDHEIRRLIESDPTFKEMLLLLLSVPGVGLLLASHMILLTQISLDHKELASYLGIAPHEYSSGSSVFRHATSRHFGPSAIRKLLYLASCSVRAHQPQFKVYFARKTKAGKPARLVLNNIANRLIKIICAVLRTKTAFIKNYHSVQPLALTAS

SEQ ID NO: 513450 - protein, 343 aa, unidentified
MAIVILGIDLGKNICSLVGVNEDGAVVLRRRMRRQTVLTFAAKLPSCVVAMEACCGAHHLGRLLTAQGHTVKLMSPEYVRPYVKAQKNDDRDAEGIAEAASRPTMRFVDLKSQEQLDLQSLHRVRSRLVGVRRTLLNQLRAILLERGHIFPQGRRRFEAAIDTLVADPAYEISSRIRQLVIDIRSEWQALDSRIEALNGEFVAIARHDETARRLVTIPGVGVLNATALVAAVGNGAAFRRGRDLGAWLGLVPKQHTTGGKPKLLGISKRGNKYLRMLFIHGARAAMPSLSASQSPLGEWLRGLLARTHRNIAIVALANKLARIAWATLRRKTSFDLRHLAVAG

SEQ ID NO: 513451 - protein, 363 aa, unidentified
MLILAIDLGKAKSMACWYQTTDATHEFRTVPTRPGDFHTLLGDRPVDRVVVEICDAAGWVVDLCRTLGIAVQVADTNQEAWRWKNVKNKCDRGDGLKLARLSAMGQLSPVHVPEKVVREWRSLILYRHKLIDRRTSVRNAIHSILVAQGKAIPGRRSVWSDDAMSQLADLAKPLSECTTMDDLWRGHLKMELEHLDELCRRVVELDRKLDALGEADARVRRLRTIPGVGPRLSELVVAMIDDPNRFASARQVSAYAGLVPRRYQSGEMDRSGRISKAGCGKLRKLLTEIAWGMLRHNPHGREVFDRISKGQKTRRKQAAVALGRKVLCWCWAMLRDGADWRVPAARERATQHSVPLPPACTTG

SEQ ID NO: 513452 - protein, 326 aa, unidentified
MEGIWIGIDVSKKKLDAAVWVVGKKYRTLKVDNDAAGFAALLLWSRALASGLELRFCMESTGDYGFALALYLVEEGEWVSVVNPAWIKHYGRALGRLNKTDTADAKLIAQYALERKPHEWTLKEPGLRNLFRLHRRREQLKTMVAMEDNRTECPQAVGPACMASVKRVLKALKAEQRDVEKQILQLINEHSKLKTDVQLIHSVPPLAQNSAVAILAEMPDVNECQAAPNYAAQAGVNPTLAQSGSSVRGSSSMSRGGRKVVRAVLQMPTLRAIKTMPEVKAIYDRLRARGKKHRQAMVAAMRKLLMIVYGVLKHRRPYIPNFNLNT

SEQ ID NO: 513453 - protein, 411 aa, unidentified
MELLVPRCAGLDVAKDEVVACVRVPDGHGGRDQQVRTFQTFTSGLEALADWLAGDGVTQVVMEATGQYWKPVWYVLEERGFELLLVNARHVKILPGRKTDVCDAAWLAELLEHGLLRGSFVPPAPIRELRDLTRYRKRLIQAHASEGQRIQKTLEDAGIKLDSVAADVLGASGRAMLVALVAGERDPQVLAELAKGRLRAKLPQLRQALRGRFRAHHALLIRLALAHLEQLEASIAELDAQVDRVIAPFAQARDRLDTITGVGKRAAECMIAEVGVDMSVFPTASHLASWAGRCPGNNLTGGKRRSGKPTKGNRWLGEVLIECAWAAARSRDTYLSAQYWRLARRIGKKKAAMAVGHSILVIAWHLLTDNCDYQDLGGDYFVRRDTDRQRQRAVAQLQALGYRVALEPIAA

SEQ ID NO: 513454 - protein, 356 aa, unidentified
MSRDIKYIGMDVHKEAIVIAVLNSSGQLVMESIVETKASSILQFIHGLRGELHVTWEEGTWAAWLHDLLQPHVHQMLVCDPRRNALLKEGNKSDKMDARKRADLLRTGMLRPVYHGEHGLRTLRELGRSYQTIRKDLNRVMNRRKALYRGWGIACSGTQVYAARYREEWLHKIPHAGVHRRAELLYEQLDGLQALRRTLRPELLAESRKHKASKLLRQIPCIGPIRAARLIALMQTPHRFRSKRQLWTYSGLGIETRDSAQYCFVRGQLQRVKKPQQIRGLNRNHNHEMKEIFKGAATRASCGVGPLRDFYVGLLDKGMKPEMARLTLARKIAAIALTLWKKEERFDAEQLKPQAA

SEQ ID NO: 513455 - protein, 360 aa, unidentified
MQPEASKIWRCQKRMLYVGVDVGKSKCRASMMNAEGKIMKEIDFTNNSQGISSLTSLLSLDDHVVMESTGPYWLDLYNHLDDLHIPVVLANPLKTKAIASARIKSDKVDARILAHLLRTNLIPQCYVPPKEMREIRSLVRHRVSIVKLRTMVKNKVHALVDRNGLKHEFSDLFGKAGMKWLKSLELSGLDRLMLDNYLMHLESLDAQIDRVDDEITSKASVDGDVRILMSLTGISVYSALLIKSEIGTIERFADYKKLVSWAGLAPSLHQSGNVEFHGNITKQGSTMLRWIMVEAARVASNHDPRLRAFYERVKVRRGDQKAVVALANKMLKIIWFMLTWKEEYESANEKSYARKLNSLD

SEQ ID NO: 513456 - protein, 345 aa, unidentified
MYRTKVGVDLAKEVIQVCIYRNKKVQSNIEMTPSEFLCWLVNAKPVTIIFEACGTSNYWRQKAIEAGHDARLISAKLVSVVRQNQKTDKNDALAIVQTSLLPDVTFIGGKTVEQQQLQSIKRLRELAVKHQGASQKQLVSLLLEMNIRISNRKGGIICAIEGVLEDATNGLSTECRAAIFTSKEHLQSLIKAVHRYDDCLDKSVIAHADCKKLLKLEGVGTMNAINLYIALGCWDIGVFTKGKDASACIGLTPIQHSSGGLVKLGSIGKHCKNSILRSQLVCGAMAAVTQAVNREAKTKKDVWIKGLVERRGKKCAAVALANKTVRTAYAMLTQGTEYKAELLSA

SEQ ID NO: 513457 - protein, 413 aa, unidentified
MDVVHPRCAGIDCSKRDAKVCIRVQGRGRNQASSTVTTWGATTSQILALREHLLAAKVTCVVIESTSDYWKPFYYLLDDELNMMLVNASRVRNVPGRKSDVSDAAWLAALGAHGLVNASFVPPPPIRALRDLTRTRTHITRERSREIQRLEKLLEDAGIKLSSVATDITGVSGRAMLEALIASQRDPAALAELARGRMRQKIPELTEALTGRFSAHHAFMTRLFLDRIDAHTADIARLDARIEEVIAPFRPIRELLTSIPGFSSKIAEVFIAETGGDMSVFPSAGHLASWAGVSPGSNESAGRVKSIKTRPGNPYLKGALGVSAMSAARSKNTFFSAKYQRIKSRCGPMRALVAVEHALIITAWNMLTDGAFYRELGTDYYTLRKPAKTKARAVRQLEALGYTVTLTPLAAAP

SEQ ID NO: 513458 - protein, 357 aa, unidentified
MREVISLTTKRVCGLDLGDKTSAVCVCGRGGEIEWEGRVRTTVAGLAKRFQGVEPMRIALETGMHSLWVSRQLRQWGHEVIVAHAAKVRLIGNSRRKNDRLDARTLADLASVRPRLLSPVEHLSAEAQAHRGVLRSREALVRSRSSLILHARGSVKAWGGRLPSCSAESFVKKAQGAVPAKLLPALAPIFEMVGELTVRIRSYDRQIEELLRTHYPQAQRLRQVRGVGPITTLAFVLAVGDPQRFARSRTVGAYFGLVPAQRDSGSLRPQLRISKQGDPYVRKLLVQCAHYILGPWGVDSDLRRLGERLSQVGGKNGKKRAVVAVARKLAVLLHRLLVSGEPYEPLRQAGLAQRPAA

SEQ ID NO: 513459 - protein, 370 aa, unidentified
MSVRRILAKTIDTDLEYEAIGIDLAKNCVSAALLTTDGEVVCIDRLDYSELEKSAQALSSTTFAMEPCTEMNYLVQKLEAWGHRCLVIDGKNVQNYVENHYSGQKTDLNDAQALAFLAQDTQLRTIKAKDVEQQKYASLTTLREQYIKQYRQTIVSLKGICQAWGLNISKGISGKARLKDLIENHAAFPEELKESLVDMVTHAQTAQKALNKITKTLEELAKSDKVCQLIQTIPGLGSICSCRLRATVGDIKRFKSPKDFPAYYGLVPRSIATGHNERKGKITHRGDRTMRSLMVQAAGSLVNMATKGKLKSKQLTKWILKKQKEKMPWGKLVCAVAAKLLRIVRAVLISNKPYNSKIAGVAKCSLPKGS

SEQ ID NO: 513460 - protein, 343 aa, unidentified
MQAVTTIGFDIAKSIFQVHGIDAEGQAVIRQQLRRSRVLGFFRKLSPCVVGVEACASSHYWSRQLQALGHTVRLMSPAYVKPYLKRQKNDASDAEAICEAVQRPSMRFVPTKTPDQQACLMLHRTRHLFIRQQTAVINAIRAHLAEFGIVAPVGRNGVEELLDVVANPDDGRVPEIARECLEALGNQLRRLKGQILAFDRRINAWHRSNETSHRLDELPGVGPALATALVARIPDPRVFRSGRDFSAWIGLVPKQNSSGGKERLGNITKQGDRYLRSLFCAGALAVIRYGKIHGTKHRPWLAKLLERRPTKVAAIALANKLARMAWAMMAKGERYKEPVALAR

SEQ ID NO: 513461 - protein, 409 aa, unidentified
MEVICPRCCGLDVHKREVVACVVTTESDGMPSKTIRAFGTMTPDILALADWLAAHEVTHIAMESTGVYWKPLWNLLEESFALLLVNARHVKAVPGRKTDVRDCEWLADLLRHGLLTGSFVPDRSQRELRELTRYRTSLVRERTAAANRLQKTLEGANIKLASVATDILGKSGREILAALVAGETEAAQLAQFAQGRLREKIPQLERALVGCIGTHHRFLVAEQVAHVDFLEERIARVNAEIAERVRPDEDAITRLDTIPGVGRAVAEALVAEIGSDLTRFPSAKHLASWAGLCPGNHESAGQRHSGKTRKGSPWLRACLVQAAHAAARTKGTYLAAQYRRLAARRGRAKAAVAVAHSILIIAYHVLTEGTAYRDLGGNYFDERDRQGVERRLVHRLEGLGYTVSLHLAT

SEQ ID NO: 513462 - protein, 337 aa, unidentified
MEYFAGLDVSMAETQICVMARNGSVIHKAKVPSTPADIAAELAQLPTCRRIVFETGRMAPMLYHGLRQLGLPVICVESRQAYQALKLLATHKTDHNDARGLAHLARTGFFKPVHVKSLPAHAVRSLIIARKKLVGQRVTLENQIRGLAVVFGVRLPRALSSTFIRQALQASEGIPGLSAAMQGLVAARTAVLAAIVAIDGDIRRMVRASDACRRLMSIPGVGQLTALAFTAAVDDPKRFRRSRDIGAYLGLVPRRHQSGEIDYTGSISKCGDRRLRTLLYEAANVMLTRYKGALKLKEWAFAVAKRSTMRKARIALARRLAIIMHAMLRHGTEFKAA

SEQ ID NO: 513463 - protein, 360 aa, unidentified
MTTKPPSRHIVAGVDTHKRTHHAAVLDANTGKLLADHEFAATQAGYQKLLSWMGSHGIVIKAGLEGTGSYGAGLQRYLQAHEITVIEVSRPNRQDRRRQGKSDPIDAINAARAVLSESATTTPKARQGYVEAVRQIRATRRSAVKARRSALNQIHGLLGCAPERLRAKLSGYDRAALVLRCAQLRIPKDAALDDPTINARRMLRRLAKRIQMLDDEITEANQELDDLLTRNTPNLLAINGVGTEAAGQILTTAGQNIDRLKSEASLARLCGVAPIPASSGNTTRHRLHRGGDRDANSAIHLIIINRMRWHEPTKRYLHRRTEQGKSKKEVIRCLKRAVVRELYRALQADLNPSLDTLDAA

SEQ ID NO: 513464 - protein, 334 aa, unidentified
MSKTYLGIDVHKLRCVYTELNTKGKIVRKGSFGNNIEEVSDFASSLKGLEELVLEPVLNYLWLLDHFEPYVHSVHVATPYKVRIIAESKCKTDKYDSRILAELLRVNFLPESWIPPVELRSLRNIIRQRHRLVKTTVMYKNYIRHLLFLHGIALKVSNIASAKARREIKRLYLPETTRQSVEQCLQVIGNLGEMINVLDDQIELQSANNETIELLKTIPGIGQLWAATIYGEVGDINRFSSAKAFASYTGLVPSVRSSGESSHYGGITHQGSCPLRNALVEAAIRTIRKSPPLNRMYHRIVYRSNSQKARVAVARKLAVIIYKMLKNKEPFRTE

SEQ ID NO: 513465 - protein, 315 aa, unidentified
MQCIHFIGIDVSKEWFDVCIHGGPAKPERYDNGGEGFAAFASCFAGTLPEALVVLEATGGYEAALIAFLLKQGVAVHRADPLTAKHFLRSLRLRGKTDALDAAALARYAAERHKSLALMRLKDAEQEELALLLSRRADLVAGRVAEQNRLGHPRYLPLRASLNAIIRALADEIDVLERRIEALVAQSQALAARLSAMTGVKGVGKQTAYTLLACMPELGSLTRRQAASLAGVAPHPRDSGKSSAYRKTAGGRAAVKRALFMAALSATRFNPELKQFYQRLRQTGKKPMVALTAAMRKLITILNAKIRDAKLATSR

SEQ ID NO: 513466 - protein, 370 aa, unidentified
MTQDIKFYVGLDVHKDSIAIAVAETGSREPGRFVGTTGHALEELEKALLSIGSKDSQSLVYEAGPCGYDLYRSLVARGWICAVIAPSRVARRPADRIKTDRRDALLLARLHRSAELVAVQVPDSGDEAIRDLVRLREDAVRAQRVARQHLAAFLLRHGYRYTGKTAWGRTHQNWMSQLTFADPVLYTAYAEYRLAVQAAAERLERCEAVIQQTLPAWRWQPTVAALTALRGIQWLTAVKLVAELGDLRRFAHPRQLMAYLGLVPSEYSSGSNRQRGPITRTGNSLARRTMIESAWSYRFPARIGKDIEARQTGLQVEITQLAWKAQQRLCVRYRRLSQRGLHVNKVCTAIARELTGFVWAIALCTEPVTS

SEQ ID NO: 513467 - protein, 401 aa, unidentified
MKVSGLDVHKDTIFCAIYNGKTYGEVVEYPTFSEDIRTMGVHLQTEGVKRIALESTGIYWIPVWNILEEMGFELMLVNPFLIKQMPGRKSDVKDAQWIAKLLHKGLLRSSLVPDKVIRQLRTYSRKYVKMQGMITRVTQEMERILETCNIRITSLVSKNNSKSVLSVIEKIIAGEDSVEELACCIHGRILNSKGELVRLSLEGFIQEHHRFSLQLAFEQFKLFTSQLTQLEEKMEEICDSHYPRQMKLLMSIDGIGKQAAMQIIAETGADMKAFENSGKLSGWTGLRPRNDESAGKFKSNAVTHGNKYLRRIMVQCAWAAARTKGSFYKGKFEQLCVRKSRKKALIAVARKLLTVVWHVLSENEPFNPGLLPVYNPRKMQMKVDYHRREIEKLEKLGYGIA

SEQ ID NO: 513468 - protein, 346 aa, unidentified
MEHYVGLDVSLKLTAICIVDGTGKIVREGMVASNPEAIAAFIKSHARHVVRIGLEAGATSTWLWTELNNMGLRVICIDARHAKAALKMQINKSDRKDAVGIARIMQCGWYKEVRVKGLDSHAIKALLVSRALLVKIKRDLENQIRGLLKNLGLVIGRAKMNVFAVRAAELIEDRPELAAAVGPLLKAREAIEQQIADFDRKVMRLARDDAQVRRFMTTPGVGAITALCFLATIDDPTRFKRSRSVGAYVGLTTRRYASGEIDWTGRISKCGDAMLRSYLYEAANVLLTRVAKWSTLKAWGIRLAKRSGLRKAKVAVARKLAVILHRIWVDGTEFNWSSKEVAVQSA

SEQ ID NO: 513469 - protein, 519 aa, unidentified
MSRRRSSPPQPAGPRLVLQKPNGVLTPRVQAVGPEHFGIVAIDCAKARSCYLLADFYGRVVLEPTPLAHTQGDLQAALARLRQALRDHDLRDSVVAIERTGDYHRPVQRAFRQAGFDTRLVHPLTTKQFRQPADPQHKTDATDAAAVFRAAAQGFGLVEADWPEDYLTLQLLRRHRRDLVRKNAALYCQIREVLHAAMPGYAECFCHLWESPAPLVLARHTTSAAAVLQAGPDGLARLLETAGVRYHKDTLPKVLAWARQAPPGHALPLLQRRLLTTLDDDRLHKTQEILALERDLAHDAVRTPYALLLALPGINVVTVADLAGELGPPAGYANANAITGRAALMPSRYQSDRVDHRNGPLVRRGNRRLRAVLMQTADNLVQCNHYFKAKSDLWRRQGKDPRWIRVKVAKSFSRLAFAMVAGRQLLAHPCCQPRHYLLGKLLAFHVEHGTPGAQLRDDLLALTDRLPAQARREEAPPLQEQLDALARRRRGPQPLADTITLVLARLGVVQSAAPEGDLG

SEQ ID NO: 513470 - protein, 310 aa, unidentified
MTITPGYVGIDISKATLDIFDTAIGRAVRLANAREPIAAQAEQWRRDGRFVVFEATGVYDRCLQEVLQSAGVPFARVNPARARDFARASGFLAKTDAVDARMLAAMAQRLTPEAQEPAAPERDKLAALQRRRDQLVAMRASERTRLKDALDAEEEQSLASHVAWLSEEIARFERRISAHIRATPQMARAYQRLRSAPGVGPVAATTLLALLPELGRRSPKAIAALAGLAPLNRDSGTFRGKRTIGGGRRRVREALYIAAFAAKRYCPHFRERYQDMRAAGKPMKVALIAIARKLLVRLNAMLRDDLCYQT

SEQ ID NO: 513471 - protein, 339 aa, unidentified
MTILTVGIDLAKNVFAVHGRNEEGKAELLRPAVPRAKLLELIASLPPCVIAMEACSGAHHWARQFATFGHTVRLIAPKFVTPYRRTGRRGKNDAADAAAICEAATRPDMLFVPIKTEEQQQQLMVHRARQGFIEARTANINRIRGLLSEFGIVLPLKANTVRQQAALHLETLPGHANTVIGDLLSELTRLDERIAQYDTHIRGLARGKDNPAQRLMRLSGIGETTATAILAMIGNGHDFKCGRQFAAWIGLVPGQYSSGGKTRLGRITKAGDAYLRSLLVLGARAVLAAAKNKTDSISTWAIELEKRRGYWKAVVAIAAKNARMAWAVLAKGEAFKLPA

SEQ ID NO: 513472 - protein, 355 aa, unidentified
MPSKADTAVAHTIGIDTGKNTLHMIGLDEKGAIVLREKVSRTRIAARFVNVPPCLIGIEAGMASHHIARELAALGHKVKQVPPAYSKPFRQVHKNDFRDAHAVAEAVERPSTRCVPIKTDGQLDLQALHRVRSRLVGNRTAVINQIRGFLLEHGIPVRQGHRFLRQQLPQILATRADVLSPRMIRIIGDLVEDWRYLDERIETVTDEIEALARADEGCQQLITVPGVGPIISSAMVAAIGNGAAFCKGRDFAAWLGLVPKQMSTGDRTILGRITKRGNRYLRTLFIQGARAVLLHPTSWARHSFGPWLTTAARRMHRNVLTVALANKLARIAWTVLAQGRRYEARVEPRIEPAAA

SEQ ID NO: 513473 - protein, 423 aa, unidentified
MHRRKTNMKEWKEITHYAGFDWARNHHVVVIVNSQGQIVADFEFEHSVEGWKSFGEKTAGFANLAVAIETSQGAAVDQMLQRDYTVYPVNPAAAASYRQRKVPSGSKTDHIDGWSLADALRVDGQGWKALQPADELSTQLRLLCRDEVSLIAQRTLLVNQLQQALVEFYPAALEAFEDWVSPATWDFVLEFPTPEALTKAGKRRWEKFLHTHRLWRPETVEKRLAVFSQADQFKASAPVTKAKSQLALSLCKLLRTLQQQLDQYREQIETLFKNHPDHDLFGSLPGAKKMLAPRLLAAIGSDPSRYGTFQVLQSYAGTAPISFESGQIHKARIRWNCDKFIRHTVHLWADCFHRVSPWGQAYYRKKRKEGMTHACALRCLGQRLLKIIFRMISDKKPYDAELHNRNQQKHGSWVLALIEKPAV

SEQ ID NO: 513474 - protein, 363 aa, unidentified
MCVTIKEGSKSDKHKLRWGTTTAELLRLSDWLQGHPVSHVAMEATGVYWKPVWHILEGQFELLLANPTQVQALRGRKTDLKDGERIANFLQHGLLPGGFVPPQPIQQLRDLTRSRTTLKPEQVRIGNRIRKVLEDANLKLSSVTSDVMGVSGQEMLRAIVGGECDPAALAQLARKRRRGKIPVLRQAAKGTLNEHHRFLIEQWLALWDELASRIRKFEERIEEQIRPFAAAVETWISLPGMDRITAWTIVAEMGPDMAQFPTVAHAASWTGLVPGTGGERGQAAKRAHQTGHRMAPPRAHSGRLGGEHEKGLVLQGVLPPAGSQEGKETSYCSRRPTRCERPATYCCGPEKNIPTSVRTTSTA

SEQ ID NO: 513475 - protein, 349 aa, unidentified
MAVTIVDTPRPVTGGVDTHLDVNVAAVLDRIGGLLGVEAFPTSVEGNRQLLEWMAGFGPVERVGVEGTGSYGTSLARYLRDVGIEALEVDRPNRQERRRKGKNDIVDAIEAARAAQGQRQLGASKTKDGNVEAIRALMVARRSATDMKIASLNQIRHLGFTAPEEIRQSLQGVSRRLLAKRAAVMRPRADSDPVSYATKTALRTLGRRVLELDVERKELDKLLNSLLAETAPGLLGLYGVGKHSAASLLVAAGDNPDRLRSEAAWARLCGVSPIEASSGKVTRHRLNPFGNRQANAALWHIVITRISSDRRTAAYVERRSKEGRTKKEIIRVLKRYVAREVYPYIVAAV

SEQ ID NO: 513476 - protein, 343 aa, unidentified
MGEVSTIGLDIAKSVFQVHGVDAGGAVVIRRRITRAKLLEFFAALPPCLVGIEACPTAHYWSRRLQALGHNVRLLPPSYVKAYLKRSKNDANDAAAICEAVTRPSMRFVATKSEQQQSGLMLHRSRQLLVCQRTMLSNAIRGHMAELGIISAKGRNGTAELLKIIANEQDDRIPEAARFSLDVLARQYVAVRAEIVAIERRIHAWHRSSEESRRLEEIPGVGPIVATALVAEVGDWKVFSSGRSLAAWIGLVPRQHSTGGKERLGRISKQGNRHLRWLLVAGAMAVIRYARQHGTKRLWLARLMDRRPIKVAAVALANKIARMAWAMMVRGERFKEPRLLPAA

SEQ ID NO: 513477 - protein, 387 aa, unidentified
MIYYIGIDISKYKHDFCIISNTGEVIVENSSFENNKKGFQSLLELLKSYNKSEVHIAFEATGHYSKNLELFLIDQGYSFMKMNPLVIHQFLKARSLRRTKTDKADSLTIANYLMSVPYKPNSDLLYNIFTLKSLCRSREQLIKERSKYQVLLTNQLDLTFPELKQFLNNRISATLLFILEKYTNTDHISLMRDYDSIKNISRGKFSYAKFAKLKELAKNSIGHHDENTDLLISTYTSIIKTFNEKIDPIEKQISTIIKELNPKMLTIPGLGEISAAAILSEYGDINNFSSPNKMLAFAGLEPSIIQSGTIENNGKMVKHGSGHLRYSIMNTTMIILRYSPTFYDYYLKKRSEGKCHRVALSHVCKKLIRIIYTIEKNNIDFNPSLLK

SEQ ID NO: 513478 - protein, 438 aa, unidentified
MSNKVIFNLDDLFISVGIDVGADFSWMSIALPNQQFVGKPYKILHSSIASLTTAVSKIKESEELYSLESRIFLESTGIYHYPLFCYLRDKGFNCSVINPIITKNSTNINIRKVHNDRFDSKKAALVGLKPDLKVSLMPSDLALNCRNLCREYYDLMDNRGAYVNKLQGELRMAFPQYLGIFSKVTINTSLTLLETYTSPSAFLEADKQEIIDIIKSTARFGLTYAQNKYNAIIQAATDANQFGYIIDSNIKRIRLYISFIRKYDEEINNILESLHELVDANEDADFVKQIHLIETFKGAGFLSAVSIMGEIGDFSAFSKPKQLFAYFGLDPAVKQSGKFEGTKVQMSKRGSAIARRVIHTLTLQSISISRNGEAKNPVLREYYLKKCDSKPKLVAMGAVSHKVCNMIFAILRDNKSFEIITPQEHIKQYNASKCDMAA

SEQ ID NO: 513479 - protein, 318 aa, unidentified
MTPDGERIGPVVRIASDPVEFAAQVSSWGEAPEVVLEATYGWYWASDVLAEAGATVHLAHPLGVKGFAYRRVKNDERDAADLADLLRMGRLPEAWIAPPQVRALRESVRHRAKLVALRSGLKAQVHAVLARQGVTLAPSDMFGAAGRRQLDELRLDPPFQARVLSLLRLIDAYTFEIDMVGKRVSAELKHHAGFKAIQALPGVGPVLGAVFVAEIGDITRFTRPQQLCSWAGMTPRHRESDTRVHRGRITKQGNHLVRWAAVEAVQRVHHGPLAATKARLAARRGNNIAKVAAARELLALVFYGLRDGRIRCLATTPA

SEQ ID NO: 513480 - protein, 347 aa, unidentified
MKHLFIGLDVHKKSWSVTIQEGQVVLKRFSMEAKADSLIYYISKHYKGYLVECCYEACCCGYHIYRDLTKAGWNVLVVNPGDIPRINKQSTNKSDKIDSRYLCHHLASGHLRGISVPEQKQEQFRSLFRRRADLVKSLKRIKCHIKSMLLYYGIELPQNYDNVNWSKAMTHWIEKLKWLYPTAAATMKSRLDEYHFLRGEYLGVCNELRSYARKQYKKDYYLLRSIPGIGPFIAIAVLSEVGDIRRFKGIDRLSSYVGLVPSVHSSGQKSYSRGITYRSKNLLRSYLIEGAWIAAKKDEELMQYYQQRKGCDHRKIIIKMAAKTLSRIYHVLKTGKPYQTMQVRMAV

SEQ ID NO: 513481 - protein, 386 aa, unidentified
MREQNESDKVLIKGDSMSVRRILAKTINTDLEYEAIGIDLAKNCVSVALLTTDGEVVCIDRLDYSELEKSAQVLCPTTFAMEPCTEMNYLVQKLEAWGHRCLVIGGKNVQNYVENHYSGQKTDLNDAQALAFLAQDTQLRTIKAKDMEQRKYASLTTLREQYIKQYRQTIVSLKGICQAWGLNISKGISGKARLKDLIENHAAFPEELKESLVDMVTHAQTAQKALNKITKTLEELAKNDKLCQLIRTIPGLGLICSCRLRATIGDIKRFKNPKDFPAYYGLVPRSIATGHNEKKGRITHRGDKTMRSLMVQGAGSVINMATRGKLKSKQLTKWILKKQKEKMPWGKLVCAVAAKLLRIVRAVLISSKPYNPQIAGVAKCSLPKGT

SEQ ID NO: 513482 - protein, 351 aa, unidentified
MSQNLNNTVAVIGIDIGKNSFHVVGLDRRGAIVLRQKWSRGQVDARFANMPPCLIGMEACVGAHHLSRKLKGFGHDARLMPAKYVRPYSKGQKNDFRDAEAIAEAVQRPTMKFVATKTVDQLDLQALHRVRERLVSQRTGIINQIRAFLLERGVAVRQGLRFLRAELPHILATPPDVLSPRMVRVIEDLAGDWRRLDERVQNLSDEIEAVARQDGGCERLMSVPGIGPIISSAMVAAIGTGDGFSKGRDFAAWLGLVPKQISTGDRTILGKISRRGNRYLRVLFVQAAWVVLIKPNSWERHGLKPWLEAAKKRLHRNVLAIALANKLARIAWSVLARGRSFEARPAVASAA

SEQ ID NO: 513483 - protein, 359 aa, unidentified
MRNAGIHANSLLEVRRMYNAVGIDVSKGKSTVAVLQPGGTVIRKPFDVSHTSQNLNELADYLSSLDGTTKIVMECTGRYHEPMVKALSEAGLFISIVNPHLIKNFGNNSLRKVKSDPADARKIARYTLDNWTELRQYSGMDNTRTQLKTLNSQFSFFMKQKVAAKANLIALLDNTYPGVNKLFDSPTREDGSEKWVDYAYSFWHADCVRKIGLKAFTERYMSFCKKHHYIFQQDRPEKLFNASKELVAVFPKEKTYKLLIQQSIQQLNLASEHVERLRREMNELASTLPEYSTVMGIYGVGKTYGPQLIAEIGDVSRFTHREALTAFAGVDPGVDESGQHKSKSNRASKVGSARHCFRS

SEQ ID NO: 513484 - protein, 389 aa, unidentified
MSDESMVLRYARNEEAPATRRFGNDVEGRGRMVRHLEERARAASGAKVVFAYEAGPHGFGLCDDLTARGIECHALAPTRLASSSKSRKNKTDEKDAHRIFEALRGHLLAGNELPSVWVPDEQTRDDRELVRSRLDAVDKRRRIHSQIQMLLKRHELRRPKEVGQAWTLKSLAWLRGLTGVPSPLNSGARAALAALLRQLAAMEQEVKTLDEAVARLAQQPRYLALAQAVDEEMGVGLTTAMVFLTEMGDPDRFQNRRKVAAYFGLVPSINETGKQDDRKGHITRQGNRRIRWALCQAEWAAIRSNPEEKARHERLVKRNPKRRKIATVAGMRRLGIRLWHRAQVAKGATARTTPPSRPPEGGMRQFALPAQPRKYKGRPSRQEERPIAV

SEQ ID NO: 513485 - protein, 453 aa, unidentified
MAQGSGLTRGDRNRNNRIAALRAVVRRDRAVLAIDLGEDKQAAALVDHEGRVLARRIIKAKAYQLGSLLAWAADKAAAAGFAGLTVACEPTGHRWKALMGLADAAGHGFVCVQSLAVARAREGDDYTRDKTDHRDAYLIGRLVIRLDCYLPERADEIWARLRHLGARRFALVADVISCMQQVGDLLACAWPAALGVAARPLESTTWLAAMGVVTDRCNGDPARLRKMGYDKFVAAVRRELPRWGAKKIYHKIVKGLWEALADAGGVIAQRRGALERVHLLMGDWRSLLARLADTEGRMTAVLDELGLTELVTSIDGLSAVGAAVILAETGDLTRFASARSVVKHAGLNPSEHTSATLAGKTRISHRGRPGLRAAAWRAVWGGMRHNRVLHARHAHLTGRDGNRLSDGQARAACAATLLRWLYAVVTTRRMWDARIAAGAISARPGAVTTAAAA

SEQ ID NO: 513486 - protein, 339 aa, unidentified
MLHIAVDLGSSKSQVCVRQPDGVILEEGTCPTARLGERLQGYAPSRVVLETCAEAFAVADAVKQAGHEVRVVPATLVRTLGVGSRGVKTDKRDARILSEVSCRIEVPSVHIPSAMSRELRMLCTLRDAMVNSRTKLINSVRGHLRTRLIKLGLGGTKTFHSRVRKKLQATTEGMPVALERLLSVIEQLSAQIEGATQELDLLASAEPTCQRLMTAPGVGTISALRFFAAIDDIGRFRSHSALQSYLGLTPGEHSSSERQRKTSITKAGSAPVRWTLGQACWCAWRNQPGDPLVQWAKKVAERRGRRIAIVAMARRLAGILFAIWRDGTRYDPAKVGAKM

SEQ ID NO: 513487 - protein, 332 aa, unidentified
MSKKIIAQNEEIVIGVDVSDAKHNAAAVRVKGGELIRDDKVNPDFGSWQKYLEKFPGCDVTVVYESGPQGYNLHDAIKALGRKAVVVAPVKHVGVKTDKRDARSIARDWLAGSAKEVTVPGVQKREARQVLRSRGQLVKELVRIKNRRSALIRFHGLTGRLAPWRKGSISANLRFCLDSLDAVEAVVKEQIQKFDKHIGQIAAEPQWRPVVEKLTLIKGIGTLTALEVALEVADIDKFKSSDQFASYTGLCPGEWSSGATRRQGHITRRGPGRLRGALVRSAWILVRYDEAEKKRFQALAARAGKKRAIVAIARRLAVTIWWTLKESDEKAA

SEQ ID NO: 513488 - protein, 392 aa, unidentified
MTIFTGIDIAKEVHWACAIDAQGRVLLDRKLLNTPADLDRLVDELRALQEDVRIGIDVLGGIAALAQAVLLEARFDLVHVPGLAVNRARQGTVGGESKSDPRDARVIADQVRTRTDLRPVLTDSELDIELRLLVSRRRDLSEDQTRRLARMHDLLVGIFPDLEHALDLTTKTALVLLSRCVTPEELRNTSEKALAKHLGPLANRAYSRELIAAARACARRQMITVPGQALTARLIKELASEALVAIERIDTLERDIEQRLASHPDAALIRSLPGMGAVLTAEFIAEAGRIDRFKSADAMAAAAGLAPVLKQSGKSRWFKRANHGNRGLKRVFYQSAFASLRHADSRAFYARKRLEGKRHHQAVIALARRRVNVLWAILRNRQPFIAKAPAIA

SEQ ID NO: 513489 - protein, 392 aa, unidentified
MFYVGIDIGKRNHEAVVTDENGSIVIKAFRFTNNLTGYLRMTEKLKKITVVRSQFIFGMESTAHYWLALYTRLMKDGYCVQMFNPIQSDALRGLYLRQTKCDSRDAFIIAEVLRFKRYSATIVPQDKIMALRELCRNRAFLVDSQSDLKRKVVALMDMVFPEYEKLFSSLFVNASIAVLQKYPTPDKMVKANVTKLGELIHKASSGYHGLAKAQEIKQAAKESFGIDDTYGAYSALIKAYINNIKYIDDQLDELDKKIEEIFNGLDSKITTISGIGTKLGPVILAEIGDISRFHSADKLAAFAGIDPTVKQSGGFLGTRSRMSKRGSPYLRRAIWQACVVAIHCDPMFKAYYDKKAAQGKKYMNIIGHCTKKMITVIYAVLRDDRVYEPAAA

SEQ ID NO: 513490 - protein, 425 aa, unidentified
MNTKQNERISQVSSDTLVVGVDIGEEKHYARAFDYRGIEFSRRALPFSNSAVGFNVFYKWLEDMKERTGMKKVIIGCEPTGHYWFTFQKFLHDHKLKLVVVNPYSVNRSKEFDDNSPEKDDIKDPKTIAQLVREGRYSIAYIPEGRYAEIREAQVCRDQIMKQHIRLANQIQAWLQQYFPEYLEVYKKFDTESGLLVLEQAPLPADIRKLGAEEIRQIWKDAKLRGRLGISRAQTLIEAAQKSVGLEGGEAARFRIRVLISDYRRKQEQLARVDEILQKKVMLVPNVEKLLAIKGVGIGSVAGFIAEVGDIGRFTDPKQIQKLAGLEITKISSGKRKGKPGISRRGRRRLRRVMFEAARALMQWDTAFSDLFLYYRTRIHHPLGSMQAKVAVECKAIRVFYAILKHGCDYDPEKLRRDIKRPVTE

SEQ ID NO: 513491 - protein, 329 aa, unidentified
MNEVSQVSQVSLGIDVAKAKFDVALLNAGKVTQRTFPMDAQGFTALRAWISKQEVQQVHACLEATGAYGAALALSLYEAGHLVSIVNPARIAAYAKSRRARTKTDKADAALIAHFCHTQPPLPWAPPAAEVRELQALVRRVEMLQEMAHQEGNRQQRGIPSPAVRASIDATLAFLREEIAKMQRQVQQQVERSAELRGQQLLLCSIPGVGSWTAARVLAEIDEVRRAVDARQLAAYAGLTPRERTSGSSVHRPPRLAKTGNSRLRRALYLPAIVAMRHNPAVRALAERLRARGKRPMVIVGAAMRKLLHLIYGVLKSGKPFDPALAMAA

SEQ ID NO: 513492 - protein, 339 aa, unidentified
MWYSGIDQHKAFCLITTYGPQGPRVKQARVASTPLALQQYVAEFPGPHQAVVESTGGWYWLADTLAALGVELILAHATRVKAIAAAKVKTDKVDSNILALLLRADLIPAAHMIAPPQRGPRDLMRTRLRLVAKSVGAQNSIDRLLEKFNLESVADLDDLYQLQAACHAAQIHLFEEQISTLERALYPFLIPNADVQRLLWIPGLGKVTAFTVYTEIDGIARFPSVQQLFSYCRLVPGADNSAGRTRHRSGSKAGNRYLKLAFSHAGIRAVQYYPEIRAFFQAKARKKPIRIARTLVALELARIVYQVLTEQEDFNGRFKGRPISRRKHAQWPRRASPPV

SEQ ID NO: 513493 - protein, 375 aa, unidentified
MEHHSEAFVALDTAKLRNAVAIADAGRNGEIRYLGEFDNTEAATRKLVAKLASKHARLTFCYEAGPTGYGLYRLIKSIGHDCLVVAPSLIPSKPGDRVKTNRRDAVNLVKLLRAGELTAVWVPDERHEAMRDLVRARDAAVKDYRIKRQNVSSLLLRLGRHYPGKKTWGRTHINWLTGLKLEHREQRIAFEEMLLAVRQVRERIERLEQAMREAVADWTLAPVIEAVQAMRGFDMVGAVAFLAELGDLSRFENPRQLMAYLGLTPSERSTGESVKRGGITKAGNTRARRLLIEAAWSYRFPPRVSKDMQTRIGAAPRTAREIAWKAQMRLCGRFRTLTRKGKRPTIVVTAIARELSAFIWAINREVVGSHATANQ

SEQ ID NO: 513494 - protein, 459 aa, unidentified
MNMRIIGIDLAVSAKHKAMILDPASNEFVGKQITFRARPEDLDRLLAHARRGVADDVRLVAVLEATSMAWYPVSVYLQRHGVTVYRVNGQKTKDLRRVLWKHAGSDLIDSCVLARLYLLDPDRLEPCPLVTGDQLTLQRACRAYDRWRKRDVAEQNRMQATDHWAWDGLSKLIPAEAQPWMRANWYNPWRVLAAGELHLTAAWQAEAPASPGDTTWIGRWVERATQMTTLYGKEEMVGYAALQSDMQASLALRAQYTQRMGSLMRDTIQPLYTTLFPNCPLTSIQGVGTQSAATYRAFIQNIERFGSVEKFRMWCGVVPHSKQSGQGESKGLQITQAGPNLIKATLYLNADVARQWDVQFAAIYYTQMVTYGKHHLKAVCACASHLANRIYAILKAERRYELRDLEGNPINAEQSRQLCQQYRVPEEVRQRNNKRFRRAQAEAKKQQKAARAHKSRKQA

SEQ ID NO: 513495 - protein, 445 aa, unidentified
MAMRKRDDEVYPNAAGIDVGGSSHWVAVPRHLAEAAGEAAVREVGTMTDDLAELARWLLKLGVNTVALESTGVYWIPVFEVLEQHGLTVWLVDARQLKYVPGRKSDVQDCQWLQKLMSLGLLRAAWRPAAEVCVVRAVARQREVLIAEQTSWVQRMQKALVQMNIQLTEVLSDVMGQSGQAIIRDIVAGQRDARVLARHRHRRVKASEADIVKALTGNWREEHLFVLAQALAMYDDIARHLAQCDAKLEQLLGQRHAHDVDLGLSPRAGSKARQEFEVRQRLANWAGVDLTRINGLGVTVVMKLLTEIGPDVSRFATVKHFCSWLGLCPGTKISGGKVLSSGTKRSANRARQALKMAAMTLSHSDSALGAFYRRLCTRMDKPRANTATAHKLARMVFFMLTRGEAFVDQGQQHYEEQQRQRSIAALKRRAAALGFQINPLMAGAA

SEQ ID NO: 513496 - protein, 370 aa, unidentified
MGKYSEVFVGIDTAKKKHAVAIADAGRDGEIRYLGEIDSAPTTVERVIKKLASKYEKVRICYEAGPTGYGLYRQIITLGHECTVVAPSLIPKKAGDRIKTNRRDAVTLARLFRAGELTSVWVPDAVHEAVRDLVRARDTAAADVRKKRQQLLSFLLRHGRIYSGSKHWTRAHSRWLAAQAFEHPAQQIVFQDAVDAIEDCVSRLHRLEEQLYAIVPNWSMAPVVDAYQAMRGVSFIVAVTFVAEIGDVRRFENPSQLMAFLGLVPSERSTGDNVRRAGLTLAGNRRARRALVEGAWTYRYQARVSAKLQKRLEDIPKPVRDIAWKAQVRLCGRFRRLAAIGKKRPVIVAAIAREMAAFLWAIGRHVAPAS

SEQ ID NO: 513497 - protein, 429 aa, unidentified
MNVVTERLKLFKQMKASVRGSEKYLLVGVDVAKNSHHAFFGTPNGRTLQKNLVFDNSIKGFENLRTLARDLRNQHGLDDVVYGLEPTASYHKPLAEYLIRQEEHVVYVSNVAVAKNRALLDGRWDKNDKKDAANVADLVGQGRCLYYDVPDENLRVLRSLIAFRIRMKKEEHALRMRLRNNVFAQYFPELEKLYIRAGQPDDVVLAIAQHCLDPREIAGMEFEAFLKLIMTRTIRIEQEKRLRELWLIAPLSAGCRVHDAAKWEAQSLVTQLKAVRETVKDTEHRMAQAAQHFPEYACLLSIPGFGPIVSAMVLAAIGNPARFENRKQVLRLAGLDLSASRSGKNSDSATPVISKQGKAALRYALVQAASVASALTPNIRSYYSNLLKGRELERGIKLKMKVKLAAKLLIVAWTLMKRKEYFKTSCFSG

SEQ ID NO: 513498 - protein, 448 aa, unidentified
MSKPQVIDDQERERVFEKVAAIDVAKASGVVCVRGPHPSRPGARASTVWTVPATMNAVTALAAGLAGQGIEKVTLESTSDYWRIWFYLLEAEGLDVQLVSASQARQLSGRPKTDKLDAMWLARLTENGLLRPSFVPPAEIRALRHYARARTHLVQDRTRCWQRLEKLLEDALIKVSAVASKLTTLSAQDMIRAMIAGERDPEVLAGLARTRMKAKHAALVEALTGMFADHHAEIAQLLLDQIAFLGTRITRLTLLIEEQIDTIPAAWGAGPDGVTGTGAGTGPDAPVLPAVARLDEIPGVSAGLACSIIAETGLDMTRFPTAAHLVARAGLCPRAIQSGPRTRHGKGQGNTYLRGYLGQAATGAAGTATFLGERYSRIARRRGNAKAQVAVARSILVIIWHLLSDREARFADLGPGHYERHIDQNRKARSHIRQLQALGYAVTITQAA

SEQ ID NO: 513499 - protein, 462 aa, unidentified
MKKQEAEGSTSKRRQLQGLPLIRTDVAGIDIGSERHWVCAPTIDGQGREIASFGATTAELIRLAEWLQARHVKSVAMESTGVYWIAPHEVLEAKGLEMRLVDTRQLARVPGRDKKTDPTDCEWIQRLHSCGLLRGCFRPPEAICKLRTLVRDKGVLVAESGDWLRRMQKSLDQMNVRVHRAVSDINGTTGLAIIRAIASGERDVQKLAELRDPRCHKSVEEIAEQLRGHWREDHVFSLCQALKMYDAIAERITAYEKEIQGKLEAMEQPGQSGQTAPPLSSGNKAKKIKSRGQEDKRQALFRMSGVDVTQIDAVGVETVEVVISEYGCDLSRFPSEDEFASHATLAPHVPKSGGHPIKKKKRRNSASTRVAGALRMAAQSLRQSNTALGAYFRRLAQRKGADIATFATARKISKLIYRLLRWGQPYIDEGASAYEKRHKEQTFKNMASKAKRMGYRLVPADV

SEQ ID NO: 513500 - protein, 325 aa, unidentified
MELSAIGIDVAKDTLDVSVFTGGKALSKPFPNTEKGFAALIDWLAHRKLGRVHACLEATGRYSLGVALALHAAGHVVSIVNPAQIHDFARTKLGRNKSDKVDAGHIRQFGDTFRPPAWQPPSPALRRLCELQTMRAGFVASRVEWQNRAASLGADAAGRALAETTIAHFAAQIAAIDQAIAETIDTDDDLRGKRDLLLSIDGVGQTLAALVLAELPAPDVLGSSAAAVAYAGLNPRQFQSGSSINRPTRISKIGNAVLRAGLYMPAMVAIRHNKAVAALAARLRAQGRLTPKQILIAAMRKLLVICFGVLKSGRRFDPALAMPAA

SEQ ID NO: 513501 - protein, 322 aa, unidentified
MSKVIGIDISKQTFDVSWKEKDKNVSMVFPNNQEGFKSFFKHLKKGNHCVMEVSGTYHLKLAMFLHHRKVLVSVVNPLIIKRFCQMKMSRTKTDKKDAIMICAFGEDQKPALWQPDADYIKEMNSVLTTLEGIEKIATQVSNQMEAESQLDVLNSMAKESKERLLAHAEDEITLLLETLEALAEKHCPETLARLKTIPGIGTKTAIVLIAITGNFEYFDDVRALCAYCGICPRIYKSGTSVNSKGHIVKMGNGRIRKLLYLCSWSAQKSNPQCKDLKERLTAKGKPAKVINIALANKLLRMAFGVVKSNSDYNKTKGLQKAA

SEQ ID NO: 513502 - protein, 354 aa, unidentified
MKYYVGLDVGLEETNVCIIDSEGITVREVKVSTEPAAIRSAVEGYADRLERVGVEASSLGIWLYRELQPAGLPLIVVEARHMRVSLSTMRNKTDRNDARGIAQMMRLGWYRVVHVKNIEMQKMRTLLANRKLLKRKLVDIENHIRGSLRAYGLLVGAVARGAYEARVRELLVRCDPIFVMTIEAMLDVRRAIFEGFEKLHRVVLLAVQHDPVCRRLMTVPGVGPVAALSFKVGVDDPQRFTRSRTVGAHFGLTPRRHQSGTSIDYEGRITKQGDVAVREALCEAAASLLLRVRKWSALPAWGLRIAKRSSMLCAITAVARKLASILHRMWVSETDFHVGFGAKVTQRLRLKPAR

SEQ ID NO: 513503 - protein, 403 aa, unidentified
MIFVGDDWAEAHHDVYLMDESGRRLGSRRLPEGLSGIRQLHEVIGEHAEEPDQVVIGIETDRGLWVGALTGAGYEVFAVNPLAVARYRDRHHVSGAKSDASDAKLLADLVRTDRHNHRRIAGDSPDAEAIKVLARTHQSLIWTRTRHTNALRSALREYYPAALEAFEDLADRDALAILGRAPTPIDAQRLSVAKIRAALKAAGRQRNLDIRASQIQEMLRTEQLTAPAAVTAAFGASTRAEVAIIAELNRQIADLEAELATHFEAHPDADIYRSLPGLGVILGARVLGEFGDDPNRYTTAKSRKNYAGTSPLTVASGKKRAVLARHVRNRRLYDAIDQWALGAINNSPGARAFYHQHRAAGDLHHQALRALGNRLVGILHGCLRHHTHYSEHTAWAHRTATAA

SEQ ID NO: 513504 - protein, 341 aa, unidentified
MKKFIRTAIDLGKTYFQVHGLESEGGQSISRKMKRSKMREFYQQIEPCRVGMEACGSGHYWARELVAMGHEVVLIPPAYIKPYIKRGKNDAVDAAAICEAMSRPGMRFVPIKSADQQAVLMLHKTREMFVKQRTMSVNALRGHLAEFGIIVAKGIGRVDELLALAQSDTELPQIAKSAVAGLGQHLEGLDQSIEAVGDEIARAHKQNPTSRLLDEIPGIGVLIASVIASSVPDPSVFKTGRDFAAWLGLTPRQNSSGGKEKLGAITKQGNRYIRKMLVVGATSVMRVAGKRKGALADWINALQAKKPKRVAAVALANKLARICWAIMTTGEGFRVDTYVKA

SEQ ID NO: 513505 - protein, 348 aa, unidentified
MRFYQRQHAFYCGVDLHARKMYVTVVDREGTTLVQRNLDAGPERFLSLVRPYREGLIVGCECMFAWYWLADLCRGEAIDFVLGHALYMKAIHGGKTKNDRIDSEKIARLLRGGMFPQAYVYPHEMRATRDLLRRRTHLVRLRTDALAHVENSVSQYNLPAVEKKLRFAANRAGVAEQFADPAARRMIESDLALAAHLDEQIRAVELHLVHSARVDDPQAYQRLQSIPGVGKILALILLYEIHDVGRFADVRNFVSYCRLVRPRHESNGKVSTAAKKKKIGNAPLRWALGEAACLMLREVPQAKSLVARLEKKHGKAKALSILAARIARAVYWMLRRKEAFDVNKCFQN

SEQ ID NO: 513506 - protein, 350 aa, unidentified
MDVHKETISIAVMNSANSAGKVLMESIIETKASTILQFFSGLEGDLRVTFEEGTWAAWLYDLLKPHIRHIVVCNPRKNALLKEGNKSDRIDARKLADLLRLNYLKPVYHGENGIRMLKELSRTYLTINRDLVRVMNRLKALYRGWGIPCGGKSVYSPRNREDWLNKIKETGVRRRAEHYYQQLDALQQLRREVRRDLLQESRKHSAAKILRGIPAIGPIRSALLVALIQTPNRFRTKRQLWAYSGLALETHDSAQYRCLDGQIIHSQKPQQVRGLNHNHNHDLKSIFKGAAQNATAGSGPFRDFYERSLQKGTKPSMARLTLARKIAAITLTLWKKGARFDPEQLKSQAA

SEQ ID NO: 513507 - protein, 423 aa, unidentified
MNTSTLCVGADVHLKEITLRAVDKLTEEEIIAPFNVANNLPGAQSAASRLAEVATQLGYTRIEIGCEATGMLWIPFHRFLSTCQLLEPFDLQLVCFNPKLVADFKDALVLRGPKDDERDAFDVAARVQVGHWPDSYVPDDFWQGLRRLTRYRFKLSRNLSQEKMRFQSYAFLKCSDWKRVKAFSDVFGATSAALLTEFTAAELREMTHDQLADLIAHRGRARFYDPDATARAVQRALHTSYPIDFLMDEMVTATLATGWEHIRSIKRLMKRLDQHISRCIDPVPNPIITVKGLGPVITAGLLAEIVDISRFPEHKHLAQYFGISWTKCFSAGSPTRDSRMTKVGNPYGRYYFVLGADKLRQFNLEYKAYYRRKYNEVSKHQYKRALVLTARKLVRLVHALLTKNVPYVRPRTTIDPEGDDSLQ

SEQ ID NO: 513508 - protein, 316 aa, unidentified
MSHTLYVGIDVAKDSFDVASDPSGLALSLPNDPTGRQRLLDALQNHPVALLVMEATGGYERSLVADLLGAGHKVVVANPRQVRDFARGIGQLAKTDRIDAQVLARFASMVKPKPRQESSQQAVNLAELVTRRRQLSDLMTQESNRLQMARHAKVRKSLQKVTRLLEQQIIDLDKLIRDNIDSDDGLRRKDEIVQSFKGVGPGTSAMLLSHLPELGRINRQQIAALAGLAPWDFKSGKWAGQSKIWGGRMPVRNMLYMAALSAIRSNEIIRKFYQRLESQGKKFKVAITACMRKILVILNTLVRNDCLWSPPLPKNA

SEQ ID NO: 513509 - protein, 408 aa, unidentified
MYYVGIDWADQKYDVAVVDDSGTVVLSHLTIKKNRAGFEQLLDKLRGLCPDPQQIKIGIETANNLLVDFLVDLCYAVFALFPGAMKSFRKRYRPSGARDDQFDAFVIADVLRTDHACWRRVNFGSELVREIRLLARDHHDLVAAHTALNNGLRSTLKEYYPEYIQFFSDVTCATSLAFLAAYPDFERAAQLTRQQLTDFFKEQHWCHRRTLNKIDELLHREHLIVPAVLIRAKQRKALTCVKKLLVVTAALEEYNGCLQEFVDHHPDGKIFLSYPGVSYVTAARLLALFGDNRELYTAVSELQGLTGTCPVTEKSGKAFQVIYYRRACNKFYRDTMQRLAFSSLRLTPWATAYYQKHRAQGHTHSHALRCLANLHLRLLFAMWKNRTCYDENIFLAQRARHAIANQQQ

SEQ ID NO: 513510 - protein, 340 aa, unidentified
MLNSLLFRTIAWVRKPVSTRKENRDMKKFISVGIDVAKDKLDMAVRPSKTWDTIPYDEDGINNIIKVLCKLKPDIITVEATGGLENRLTIALFEASLPVAVVNPRQIRDFAKATGRLAKTDHIDADIIAHFGEAIKPEIRPIKDAQRRELADLLTRRRQLIDMRKAEQQRLSSVVSSVKKNIQSHIKWLNMRIDDIDQDISDLMANNTKFKQKNKIVTSVPGVGPVMSATLEAFLPELGTIGRKQIAALVGVAPFNRDSGRFSGKRIVWGGRANLRSVLYMSTLTAIRCNPVIKKFYNRLIEAGKATKVAITACMRKLLTILNAMVKNKTLWQENIPVSA

SEQ ID NO: 513511 - protein, 342 aa, unidentified
MQVTTIGLDIAKNVFQVHGIDAAEKVVVRKQLRRRQVLEFFKALPSCLVGMEACATAHYWARELTKLGHQVRLMPAKDVKAYVKRKKNDAADAEAICEAVRRPTMRFVQIKSTEQQGRLMLHRARDLLMRQRTQVINAMRAHLAELGIVAAQGRDGIKELLKIIASEADARLPVDAHTSLVVLAAELQAMQTLIGSIEKRIMVQHRLSEASKRLKSIPGIGLIGATAIAAMVPDPKVFRSGRDFAAWIGLVPREDSTGGKQKLGPISKRGDRYLRRILVAGACAVLRYARHKPEKYPWLTKLLERKPLKVVAVALANKMARIAWALLAKGDTYRVPALAAAA

SEQ ID NO: 513512 - protein, 348 aa, unidentified
MKVHTIGIDLGKTVFHLVGLDQPGNVVVKRRPSRSQLLRQLANTPTCLIGMEACCGAHHLGAALVAQGHEVRLIPPQFVRPFVKSNKNDYRDAEAIAEAVQRPTMRFVPIKTQDQLDLQALHRVRDRLVSRRTAVINQIRAFLLERGITFRRGRKYMQQRMPLILEDAEQNLSPLLGQLLDQLWQEWKVLASQIEAISGQIERIAEQDAVCQRLQQIPGVGPLVATATVAAIGNGSAFVKGRDFAAWLGLVPRQHSTGGKAKLLGISKRGNPYLRRLFIHGARSIFRQAHRDRLALDAWMNQLEHRMHRNVAIVAVANKLARIAWAVLAKGANYNWPGADPFEPGEAG

SEQ ID NO: 513513 - protein, 349 aa, unidentified
MQIKSQIRSIGIDLGKTTFHLVALGTRSQIVVRKKFSRSQLLIYTANLPASLIGMEAGVGSHFLGRALREQGHEVRLIPAQFVRPFVKSNKNDNRDAEAIAEAVERENMRFVPIKTEDQLDLQALHRVRDRLVARRTSVINQIRAFLLERGISFRKGPASLRRQMPEILENVDAKLSPGMRRLLDFLWQEWKGLQAQIESLNTDLEQIASSDPSCVRLQQIPGVGPLVSTAVVSAIGNGAAFKRGREFAAWLGLVPRQWSTGGKTKLLGISKRGNPYLRKMFIHGARAAVLRVKREGSTLGRWMSGLETRAARNVVIVATANKLARISWAVLASGNDYHPMHKAAVFSN

SEQ ID NO: 513514 - protein, 692 aa, unidentified
MVEAVITVRTGDGTVRTGHYRLITTLLDPQLAPARELAATYARRWAAETGFREIKTFLRGSHRALRATDPEVARQELWAYLIVYQAIRLIICQAALRGENADPSRISFTAARNAVRHSITTTPRDTEAHCEQLYQDLSRCLITKHVTCRTCPRMAKRPLFHFPSRQASSAPASQNVTYDLTITTPETADTQVPPEAEQQDPRYVLGGPARGPLASGPGMTVSPCRTDDLGGGVTGPGRCSSETLMRGPATVRSGAMPGSSRAAGLHNVDARVRHRCRGRHVQLPGKGAMFDTEDVGVFLGLDVGKTTHHGHALTPAGKKVLDKQLPNSEPKLRAVFDKLAAKFGTVLVIVDQPASIGALPLTVARDTGCTVAYLPGLAMRRIADLYPGEAKTDAKDAAVIADAARTMPHTLRSLELTDEITAELTVLVGFDQDLAAEATRTSNRIRGLLTQFHPSLERVLGPRLDHQAVTWLLERYGSPAALRKAGRRRLVELIRPKAPRMAQRLIDDVFEALDEQTVVVPGTGTLDIVVPSLARSLAAVHEQRRALEAQINALLEAHPLSKVLTSMPGVGVRTAAVLLVTVGDGTSFPTAAHLASYAGLAPVTKSSGTSIHGEHAPRGGNRQLKRAMFLSAFAALHDPASRTYYDKQRDRNKTHTQALLRLARQRISVLFAMLRDGTFYEPRDPKDVELAA

SEQ ID NO: 513515 - protein, 319 aa, unidentified
MLSYCGVDVSKDRLDVAVLPQGQSWSVTNDAAGWITLIERLREFSIEAIGLEASGGYERGVARALCAAGMSVRHVNPYKLRQFARASGVLAKNDPLDARMIASFVAVMPTRSAQRAPEADQLAEILAVRRQLSAEKIAAENASRLLEDAMLQRLSRRRIARLAADIALLDKRLIEIVTANPAFDQRYRLLTSVPGVGVVLACTLIALLPELGQLGRREIAALVGVAPYAFDSGKLKGARCIWGGRAPVRGVLYMAAMSASNWNPVFKAFHDRLRATGKKPKVVIVAVMRKMLTILNAMVRDDLVWADRCSGRHSVLAAR

SEQ ID NO: 513516 - protein, 404 aa, unidentified
MWYAGIDWADDHHDVVVLDDSSRQIASRRVAHTAAGLAELTTTLSQICGTTAKDQLACIVETNRGLLITALLEAGFAVYPVNPKTVDRRRNAAGVKTDQIDAYLLAKTGRSDLADLRRLTPDSPLIQELKALTRDQDGLIQSQTRLVNQLTACLKAYYPVALTLFGKLHQKSTLAFLRAYPTPDAARSASMDDLIQTLKAAGHTRASQIAPTLWHTLQQPQLQADVVTTRTKTRLMLALLAQLQPVMEQIAAYDEEIEHLFLSHADSVLFASLPRAGKRLAPRLLAEIGEDRTRYADAAGLQALAGTAPVLFQSGNYAKAHRRIACLKPLRNAMQHFAWQSTLAESWALTYYQRKRAEGKSHSVAVRALANSWLRIIYALWRDRTPYQVDIFTTAQQQQQRKAA

SEQ ID NO: 513517 - protein, 418 aa, unidentified
MLVAGIDIGAELHHVAVVDDAEAVVVKATSFAEDAAGYQKLFELLGRAGARGGADLPLAPASAPPERTLVVMEATGHYWQNLFAALVAEGYAVALVNPLRTHRFAGEELARTKTDNIDCLQIARFGAQKRPPPTCLPEMAAEELRELVRLRTRLIQETVARVNQLHRLIDLGFPEFTRYLSDLNTELANAILRQYSTAQTFRALSPRRLAKLSYDGRHRVGEEIARNLIEAAKISVGSQHSPAHQTGVRYACEDLQTLRTRLKRLEAEIFGKLEQHQVGKLLTTITGIGDCTAAMLLAELGDPARFQSAGALAAYVGLCPGHKHSGKHQPRSSSLAPFGNRRVRQALWMPTLGAATQRNPWLMAFYRRLMERGKPHKVALIAAMRKLLAAVYSVAKNRRPFVPFLNTQPAARFDYEKA

SEQ ID NO: 513518 - protein, 346 aa, unidentified
MLYAGLDLSRKRLDFHLLDREGATVEVGACPPDADGLRGLTERGDRHGAPIRAAIESMNGARFVHDQLELAGWQVEIADAQKVKGLAPLACKTDRIDAWVLAQLARRDLVPAIWLPDPQVRAERERARWRLHLVRHRSSLKQRVHAVLLTHGTPSPVSDLFGVRGRQLLAGLGLPEPWQATIEASLRLIDDLDREIGACERELRRLGADHRYVPLLCTVPGISWVLAYTIAAELGDINRFPTPRKLAGYTGLCPRVYQSGDRDLRGPLAKQGPRYLRWALVEAATHACTHPIYRERYQQTKARIGKQRGAKVAQIDLARRLSEAIWHMLSRNEAFAPKGATDPLAA

SEQ ID NO: 513519 - protein, 406 aa, unidentified
MEVVHERCCGLDVHKKKVVACVLTPEGKEIRTFGTMTEDLQAMCQWIRQHGCTHVAMESTGVYWKPIYNLLEDQGLEILVVNAQHIKQVPGRKTDVKDAEWIAQLLQHGLLKGSYIPSREQRELRELIRYRKSLIRERASEVNRLQKVLEGANIKLASVASDVLGASGRAMLEELIAGNTDEQSMAALAKGRLRNKTKELEQALKGIVRPHQRKLLAIQLQHIDELDELIEEVSAEIARRMRPFEEDLARLEGIPGVGRKAAEMIVAEVGTDMSRFPTAAHLASWAGLCPGNHESAGKRYSGKTRKGDGWLRETMIECARAAARGKNTRLSARYHRIAARRGTKRAAVALAHTLLVIVYHLLKHKVAYQDLGPDYYDRQNREALIRRHVHRLKQLGVQVVITGEAS

SEQ ID NO: 513520 - protein, 440 aa, unidentified
MSTKANRANKAKKIKTKTGLSLSIVNPNAAGIDVSSTEMQVCVPEDRDGDNNRKFGTFTEDLHYISSWLKACNIDTVAMESTGVYWVQLYMILEADGFDVLLVNAKAIKNIGEKKTDEVDAEWIMLLHSYGLLKASFQPDNYARSIRNLSRHRDALLRSSSKEVQHMQKAMELMNIKLTNVISDILGKSGQSIISAIILGERDASKLASLADPRCKSSKEIIEKSLVANWDEDLLFMLKQSFELYHYLQNQMKSCEEKMEKILQEYISTLPAEQTKKECPRSGKKKSKKNEISIDIEDYSYKVFGVNLMLMPGISDAAVLRLVGELGHDFTNKFESYKEFCCWANITPNNKISGGKLLSSKVSKRKNHVGLILRSSANSLKMNNTPLGFYFRRIQAKNGYIPAVIATANKLGRILYTLVKTKTEYDESLLKTNENERVVS

SEQ ID NO: 513521 - protein, 402 aa, unidentified
MPTALSTVWAGIDVGKTHHWIEVVDAAGATLLSRRVLNDQLEIEALIAAVAPMSDQAQWAVDIVGAPSALLLALLAQAQQQVRYASGRVVSVMSAAFTGEGKTDAKDAHVIAETVRLRRDLPVVDQSTDLARNLAVLTAHRADLVADRVRAINRLRDLMTSVFPALEREFDYASCKGALVLVSGYATPDRLRRVGRARLAAWLRARHVRGYVELADRAVTAADTQRVVLPGQEITASIISRLADSVLAIDARIKDVDAQIAATFELHPQAAIITSMPGFGPFLGASLLAAAGDLRAFPTAGHLAAAAGLVPVPNDSGRRSGNLHKPRRYSRPLRHVFYLSAQTAMMRPGPNRDYYLKKREHGRTHTQAVIALARRRIDVLWALLRDQRTYTAQPPVKARAAA

SEQ ID NO: 513522 - protein, 361 aa, unidentified
MFSERTSVGLDVHARSVVVHAVDWETGRHVSGVLVPVDAEVVAWVRRLPSPVAVAYEAGPTGFGLARAFAAAGIRCVVVAPSKLERPPGDRVKTDRRDAARLARLLHIGEVPGVRVPSEVQEAARDLVRAREDVRGDLMRARHRVSKLLLRHGIVYSGGQPWKGPHERWLAGQRFDRSGVQIAFDEALDAVLATTGRRERLDTAIETMAAEAQWAPVVGRLACVRGVATLTAFGLAVEIGDWDRFTGATIGAYLGLVPSEASSGSRRSQGGITKAGNTHARRLLVEAAWQHQRPLRTANTSVRARRKTATPAVRARGEAADRRLHQRWLTFNARGKIGNVAAVAIARELAGWCWSLAVMTE

SEQ ID NO: 513523 - protein, 400 aa, unidentified
MLSIGIDVSKGKSTVCGMKPGGEIVYTPFEIQHTREGMSDLVSLLRSSGEEVRAVLESTGSYHCPVVAALLENGIFVSVVNSLRMKRFCSQSIRKVKTDRIDAMQIALYGLAYWQELQPTKLPEDTYRELQLLARQYYQMTSLLIKAKVDFNAICDQVLPGMQELMSDHAGRHKLSDFVLRYCHTTHILEMGETRFRKDYCKWAEKKGYRNCERMAALIFATAQNGIPVLPNAPSTQIVITEAIRVLHTVEASRDAILTQMQALAKTLPEYSLVREMPCIGDTLAPRLIAEIGDVRRFHSKRALIAYTGIDAPPYQSGKFCANNRHISKRGNRYLRKTGYEVMQSYVMHKPTNDPIFTFIEKKRGEGKSGKLAMVAGLNKFLRVYYGKVTELYRSLPTIE

SEQ ID NO: 513524 - protein, 344 aa, unidentified
MEVAVLGIDLGKNVCSIVGLDGSGAVGLRRRIRRDKLVELAGKLPTCIVAMEACCGAHHIGRLFAKAGHDVRLMSPEYVRPYVKAQKNDDRDAEGIAEAATRPTMRFVELKTQEQLDVQTLHRSRDRLVGERTALINQVRAILLERGIIVPQGKRKLEQHLRFVMDPQEAPQLSPRMRLLVADVRAQWRDLDRRIAAFDAEIAAFVKENEDARRLVSIPGVGVLIASALTAAVGKAEAFESGRDLAAWLGLVPRQSTTGGKPRLLGISKRGNKYLRKLLIHGARAALPHIAVRETALGRWAKGLLARVHPNIAIVALANKLSRIAWAVLRRGEKFTTAELPVVA

SEQ ID NO: 513525 - protein, 320 aa, unidentified
MLSFCGIDVSKDRLDVMVLPDEYSSSVPNDPAGWAILVEQLRGFSITAIGIEASGGYERGAVRSLQAAGMPVRQVNPFKLRQFAKASGVLAKNDPLDARMIASFVGIMPTRPAQRTTPAAERLVEMLAVRRQLSAEKIAAENASRLLEDPMLQRLSRRRIARLAADIELLDKRLVEIVATDATLAHRYRLLTSMPGVGPVLACTLIALLPELGGMSRKQVAALVGVAPYAFESGTLKGRRCIWGGRANVRQVLYMAAMSASNWNPALKLFHDRLKGAGKLPKVVIVAVLRKMITTLNAMVRDDIAWADRLSGRHSVTTAR

SEQ ID NO: 513526 - protein, 409 aa, unidentified
MKKKSKQSYSIPLRLQRVAGIDCHQPTYEVAVCVEGEAPIIYTFGTFTEDVYELRDTLIAHDIKNVIVESTGVYWRFLYRVLSEAGIKVVVVNPFTVKQIPLEKTDKRDAIWLATILMNGMAKPSLVVGEQQEAIRGLTRQRIHYTQQMTRIKNRIIQVLESCNLKVMSIISNISTKTGMKLVEKLSNGITDINELIECCHHSVIKRKGELLPKAFTGKLTANHQLQLKLLLDDWKHIESQQNKVNNAIKALFTEDQKKMIENLDKVEGVAQESAEVIMSEMGINAKDFKNEDSASKYAGFAPGVHESSKKKIIVKCHPGNKYLRTILIQVAWAAVRDKKGYWWAVYQHLKKSHGAKKAIVAVAHRLIKVIYKVIMKGHNYEKWDAKRFYENRAKVFEFKKASEVKKVS

SEQ ID NO: 513527 - protein, 355 aa, unidentified
MRILSLDLGKYKTVACDYEAATGRHQFVTVLTTPKALHDLIVDREPDRVVIEICSIAGWVCDLVRSLGIEMQVASTNDERWHWRKVKTKNDRRDGLKLAQLSARHELDLVHVPGSEMRQWRALIAYRQHLVQRRTKIKNHMRELLLREGQLLPRHRSAWTQIGIEALEKLAKPLGEVSMDELWRGELEVELAQFKAVQAQMTEVVAKLDALGAANHNVRLLQTASGVGPRLAEAVVTMFDDPRRFRRGASVSAYIGMVPKQWDSGETERLGHITRHGNRLVRSLLVEVAWCALRHNPWARETYQRISGGKKSRKKIAIVAVGRKLLVRCWAMLRDQTAWHWEGQSAVLTPRAPTA

SEQ ID NO: 513528 - protein, 371 aa, unidentified
MKSILSVGMDVHKNSFSLCAYDGYTGEIVSESTFASDVKLVIKFIETLKSRYENDVEIKCGYEAGCLGYSLYKSLTARGVDCVILAPTTMQVSAKNKMVKNDRMDALNIAKNLASGSYKSVYVPDEEDVEIKEYIRMIHDFKKELKRVKQEICAFVLRHGYQYDGKSKWTIRYMNWIRELEMSEIQRETLNEYIAEMENLNDKINRFMNRIDEMYQSERYHEKVSKLRCFKGIETFAAMTVQVETADFERFPSAKAYASYTGLTTGEHSSGDKNNRIGITKQGNTVIRKTLVECAQSLVKGNVYEKKSQGLKSRQKGMDVNIIAYADKATERLKKKYQKLIERNVPRNKAIVAVARELACFIWGMETGNIH

SEQ ID NO: 513529 - protein, 345 aa, unidentified
MPIVGGLDIHRKQITFDYLDTVTGEVRRGQIAPADRGHVRAWLARFAGHGDVAFAVEGCAGWRYVAEELAAAGIAAHLGEPADTAALRGRKRHAKTDKTDARHLRTLLAEGRLPECWIPPAQILEYRALLETYHDLRRAHTAWVQRIHAVFFHQGAPPLSEGALRTEPGLAALRAAAATHLSAAGQQQVATALDMLAATEAQLGPLRHQLRQAAAHLTGAKVLAARLYGVGPVTALALTCWLAGKDRFSSSRKAVRFTGLDITVHSSDRKGPPGRLSRQGPPVLRWALYEAGKTHARTSAPDHGYYATVADRKNSKRAALSEARKIVRQACHILTELGDDALTAA

SEQ ID NO: 513530 - protein, 361 aa, unidentified
MSNGSKEQPRVTAGLDLGDKYSYLCELDTESGELIEEGRLRTTPEAFRCHFSSAEQLKIAIEVGTHSPWVSRLLEECGHKVLVANPRQTRLIYGHKRKTDKLDAHKLARLARADPELLYPIEHRSEDSQAHLALIHSRDALVRNRTQLINHVRGTVKSFGARLPRCSARSFHKKVRNQLPSELAEALGPVVETITSLTEQIEDYDRRIERLATERYPETELLRQVQGVGTLTALTFVLTLEDPQRFSESRAVGAYLGLVPGADQSGERDAQKRISGEGDEMLRSLLVGSAHYILGPFAQDSDLRRHGQKIACRGGKNTKKRAVVAVARKLSVLLHHLWISAEVYEPLHNARRLGTRREEVA

SEQ ID NO: 513531 - protein, 356 aa, unidentified
MITIGIDTHKRVHQAVAVDDRGAEVARWRGGNHPDAWNELMAWMVRLAADRQVGIEGAWNYGRGLAQHLVIGGETVYEVNPRWTSAMRRAARRRGKSDRLDALAVALCVRQEGPGLPRVGLEDETVILQLLTGERENALAEATRLRNQIHAHLMQLDPQYQDAMRSIKTRRALDALKAYTTDDDRPVQRARAEIVRALAQRLELALSQAEEIGKTIRELAAARYEALTRICGVNLLTAGILAGILGPGRRFRSDAELAAYAGAAPLEASSAAHVRHRLNRTGDRGLNAVLYRIALTQAHYSPEGKAYLARRMSEGKTRREAVRALKRYIVRAIYRIWTEIIPLSANPTPCATCGCT

SEQ ID NO: 513532 - protein, 358 aa, unidentified
MKHYIGCDAHKKYSVFAGISEAGEIIPSQRVEHDRESYRSFLKGLPPASKIAVESVGNWYWLIDEMEKAGHIPTLVNAGKAKLMMGNINKTDKLDARGLAVLSLNGTLPAVWIPPGELRDQRELARMRIFLVHIRTGLKNRIHATFAKYAITFQEVSDLFGVRGRNLVENRLVELPPETRHSMKEQLKLLDQLQKQITEVEKRIWQIVKITPEMQLLMSLPGVGPILAILIAFEIGDVARFGDGAHLASYCGAVPRVKSSGGKTYYGKTRPDVNHYLKCAFTEAGNAIVANQHRMTGRHVVALYQRISRTKGHAKAIGALRRHLAEATYAVLKSGQPYHEPVPSRKSLVAKEVCARLA

SEQ ID NO: 513533 - protein, 328 aa, unidentified
MTTNNAGSAFNHIVAFDVAKHTLSVHILPGDESQTIANKPKMIRKLLIAQKRRNAGLNIGPLLVVCEATGGYERHLLEICEELEIAAHKAHGSRVRHFAKYLGLIAKTDPIDARVLAFYGLKTENLRLYAPLTPELVALIDLRTRRDQIQAMLFAETNRLEHVRHASVTRSLKEHTAILRKALAALDVQIAAHLQACETLARKAALMRTLKCIGPGTATVLLAYMPELGTFSRAAAACMAGVAPFDDNSGKTSLPRHIEAGRAAVRKALYMAALTAIRHNRIMKSYAEKLRRKGKCAKVAITAVMRKLIVTLNAMLRTGEPWRHALTA

SEQ ID NO: 513534 - protein, 326 aa, unidentified
MSSPYLARITSLSMKETNTLYIGIDISKDTFDASLDAETSVSFSNDPSGYHRLLKMILSHEDSTPHIVCEPTGGYEKNLLSFLWERSISLSLVNASKIRSFARAQGRLAKTDKIDAHIIREFGLAMNPSRTKAPSAKLEELAALMQRRKQLDLMYQQEQQRFAQARAAIIKRSHKQIMKMLQKQLDDIQKLIEKLFDGDDDLRQKKERIEQVKGVGPITSATLLAELPELGTLSRREIAALVGVAPMNRDSGKFRGRRTTQGGRFDARKTLYMSALVASRHNPILKAFYQKLIQKGKAPKLALTAVMRKLIILLNRILKNPNFTLD

SEQ ID NO: 513535 - protein, 405 aa, unidentified
MEVVYEQCCGVDVHKKSLVACLLTGKQKETRTFGTMTADVKSMSEWLSENKCEAIAMESTGVYWKPVYNVLEVFGWDLIVANAHHIKNVPGRKTDVKDAEWIANLLKHGLLNPSFIPDRDQRETREIARYRKSLVEERSREINRLEKVLEGANIKLSSVASSLVGLSSRNILHKLVDDTLDKKSLDGLLHGQLKGKADELLLACEGVLSKTQKVLVKAILSHIDDMTSRIEEMDDFLNGKLEEYDDALKRLQEIPGIGERSAQVIIAELGVDMSRFPSSKHLAKWVGICPSNNESAGRKKSGKTGQGNKALKTTLIQSAQTASKKKDSFFKAQYDRLVVRRGANRAKVAVAHSMLIAIYHMLKNGKPFIDLGENYYIQFDPEKKIKYHMKKLNQLGWVPPVGVTA

SEQ ID NO: 513536 - protein, 351 aa, unidentified
MLIIGCDYHPSFQQIAWVETDNGEVGERALMHSTGEAERFYRKLKEQGVKVRVGIEATGHARWFERLLAELGFELWIGDAAEIKAKRVRKQKNDREDARLLRTLLIENRFPRVWLPDVSNRDLRQLLWHRHRLVQMRTRVMNQLQAVALNEGVRRKRGLWSQAGRAQLESFQLMPWATRRRKDLIELLDNLTPRIAGLTAEVEKQAEQHREAQRLMTHPGVGPLTAVAYVLIIGSPDRFRCGKQIGSYLGLIPSEESSARRQRLGHISKQGNALLRFLLIEAAQAATRSNPAWRREFLHLTLRRGRQIAVVALARKLAVRLYWMWRNGWDYEKSLKFGSHVGQPGTGYGVK

SEQ ID NO: 513537 - protein, 352 aa, unidentified
MSYYLGVDLHKKTQTWVLLNEDDDTPVFSREYSVSPSEVSRACKDIGKFGNIVAAIEPVCGWQWQVVQMREAGMTVHVSNPRKTVLIAKSLQKTDKNDALTLALLVRTGLLYTSIEVTPETKKLRALVRERSFLVQLRASMQCRLEGVVTREGRHLLEGATSSKRGASVILAGENHEWKRAIHIKLDIMKYINQIEAELRQEIQTPLIKLLATIPGVGVITALTWVAEIGDFSLFKTPEKLCAFAGLVPTERSSGGVHKLGHITKAGSTHLRYMAVEAAMHIRNEPKTERLYAFYEKIKSKKGAMCARVALGRKMLSIAWHMVKKNEPYTPQPLTVLSSVHLPMRGDLAHTL

SEQ ID NO: 513538 - protein, 360 aa, unidentified
MFCERTSVGLDVHARSVVAAAIDGRSGEVFRARLTPSHAEVIEWVGKLPGPCAVVYEAGPTGFGLARALSAVGLRCQVAASSKLLRPAGDRVKTDARDALNLARLLRLDEVVPVRIPSAAEEAARDLVRTREAARADLMRARHRLSKLLLRHGIVYYDGKAWTERHDRWLHHQRFDAAPTQSAFEDAYEAVVLATARRARLDEKITALAADSEFSPLTRRLACLRGISTLTGFALAVEIGDWDRFTGASIGAYLGLVPSEYSSGTSRTQGAITKTGNTHVRRLLVEAAWHHRSTYRPGPVLRHRWDQAPAAARARAHAGNQRLHARWVGLNLRRKPAVIANVAVARELAGWCWSLAVLPD

SEQ ID NO: 513539 - protein, 345 aa, unidentified
MELHTIGIDLGKTVFHLVGLDLRGDVVVRKKFSRTQLLRFTANVHVRLIGMEACGGSHFLGRALREQRHEVRLIPAQYVKPYVKTNKSDYIDAEAIAEAVARPTMRFVPIKTDDQLDLQSLHRVRERWVMRRTAVVNQIRGLLLERGITLRKGRHHVDAALPLILEDADAKLSGAVRLLLAQLKLDLDQLSVRIDEADEVIKKTADENEACRRLVAIPGIGPVTATALIAAIGNGGAFHKGREFAAWMGMVPREHSTGGQQKLLGISKRGNSYLRRLFVQGARAVLQQRTKQSSGLSAWLAQLTSRTHHNVAAVALANKLARIAWAVLAKNEQYRPSVVADVAAA

SEQ ID NO: 513540 - protein, 354 aa, unidentified
MKYFAGLDVSLEETAICVVDEVGRMIKEARAASEPDALHATLASFNLSFERVGLEACSLTAWLHGELRSAGWPAICIESRHAKAAMGAMPNKTDRNDAHAIAQIMRTGWFKAVHVKTPICRSWRSLLVARRAVLNEMRTIENVVRAILRETGLKLGTPARKDFIVRARELIAGEQTLASMIEPLLEILGTMLREFARLTKQVLTIVRDEPICRRLMSAPGVGPLTALAFRATIDRPERFRKSRDVGAHLGLTPRRYQSGETDIQGHVSRCGDELVRTALYEAAHSLLIRSKKWSSLRAWGMKIAKHRGMARARVAVARKLATILHRMWIDNAEFRFGQEHNIAPTVKAIAGAAA

SEQ ID NO: 513541 - protein, 447 aa, unidentified
MKKAILTFLIWNQLGKLEIQTEERSIAVKIKPKKNRTVNQNVLIATVDGGKDKHYGYYRCPDGTECKAFDFWNNGRGFQEFGERISTAAKDHGLEEIIVGFESTGPYMEPLVQFLRGKKGVRLVQVNPMHTKRLKELPGNSPLKTDRKDPKVIADILELGHALTVVIPEGPAAELRRLTQGRERTIESRTRLFNQLQCLLASIFPEFLQVMKDVKTASAQHLLRQYPTAQDIVSLGEPALAAVLRKVSRGKLREDRARALFEAASESVGVQEGRSSMLLEIGLMLDTAATYDRFIEGVETEMVRHLEQISYSDLILSLKGIGPVTAAGLIGEGGDFTKFGTISEVLKLAGLDLYEVSSGKHRGKLRISKRGRPLMRKLLYFAALRAVRKGGAMHEWYQRALGRGMIKTKALVAVSRKLLGIIFALVRDHSVYVENYAKQKLILQEAA

SEQ ID NO: 513542 - protein, 415 aa, unidentified
MDVVHPRCAGIDISKRDAKVCVRIQGAGRARARSTVTTWEAVTNRILALRDHLIAEEVTLVVMEATSDYWKPFYYLLEDAPFEVMLVNARHTKGIPGRKTDVSDAAWLAELGAHGLVRGSFVPPEPIRQLRDLTRTRTAIARERGREVQRLEKLLEDAGIKLSSVASDITGVSGRAMLEALIAGDRDPAGLADLAKRRMRSKIPELTEALTGRFSEHHSFLARLHLDLIDGHSRAIEELDERIEQAMQPFRAARDLIVTIPGISTVVADVIIAETGGDMSRFPSAGHLASWAGTCPGSNESAGRVKSTHTRPGNPYLKGALGTAAMSVAHSKNTYFAAKFRRIASRRGPVKALVALEHAMLVAIWNMCSTGAYYADPGEDFFTRLHPDKARDRALEQLHRMGYAVTLEPLPAKAG

SEQ ID NO: 513543 - protein, 349 aa, unidentified
MSQTLNTAIAVIGIDIGKNSFHVVGLDARGAIVLRQKWSRGQVEARFANMPPCLVGMEACVGAHHLSRKLQGFGHDARLMPAKYVRPYSKGQKNDFRDAEAIAEAVQRPTMKFVATKTADQLDLQALHRVRERLVSQRTGIINQIRAFLLERGIAVRQGQRFLRAELPRILATPSNALSPRILQMIQDLTSDWRRLDERIEGLSGEIEAIARHDIGCERLMSVPGVGPIISSAMVAAIGAGDAFSKGRDFAAWLGLVPRQMSTGDRTILGKISKRGNRYLRVLFVQAAWVVLIKPKSWERYGLKPWLEAAKKRLHHNVLAIALANKLARIAWSVLARGRGFEASKLRVA

SEQ ID NO: 513544 - protein, 346 aa, unidentified
MITVSTAVMGCDTHLDSVTVAVIDPAVENTLGVVTVPNRSEGWEQVIGLCRQARVRRVGVEGASGFGRGLATTLIEVGVEVIEIPTRLTARIRTIDGGSKSDPGDAVAIARATSRGEGSVWTYQPATETLRVLTHHRQSLITDQTRAINQLRALLIEIDPDLSTKIPRLGRSRKPFKQLAAINFDTNTHHQTVGWLINQLAGDCLRRIDQIHQLEARIRHAMPPAGWALIEQVTGCGLITAAQLLSELAGTDHFHSDAQLAAWAGTAPLDASSGKQQRHRLNRGGNRQANRAIHTIVVTQYRCGGPAADYIDRRISEGKTRKEAIRAAKRHTTRHLWKIIRDHQLT

SEQ ID NO: 513545 - protein, 343 aa, unidentified
MQIRTIGVDLAKNVFQVHGVDSAGKVVITRQLRRKQVIEFFSKIPPCLVGMEACGAAHHWAREVSKLGHTVRLMPPSYVKGYVKRSKNDAADAAAICEAVTRPSMRFVAVKSTDQQASLMLHRTRDLLIRQRTQLINALRAHLAEFGLVAETGREGVAQLAALITDESDREALPFAMKQALQAIVDQLAALELQVGTLDRAIHAHHRANDMSSRLETVPGIGVIGATAIASAVTDPSNFKSGRDFAAWIGLVPRQHSTGGKERLGGISKQGDRYLRRLLVVGATAVVRHARQHPQKHPWVMRLLAKKPAKLVAVAVANKMARIAWAIMAKGGYYRAPELAAAA

SEQ ID NO: 513546 - protein, 387 aa, unidentified
MSQVDDLSRSLAAFDQNTTLTVVVELSEASWLVAGLVPGVDRQPLKKQEPDPRALLRLLERWRAEATKTGRMIERIVLAFEAGRDGFWLARWLRARGIEVYVIHSTSVAVSREHRRAKTDRLDTGMLMRVFLGWLRGERGHCRMVAIPTLEEEDAKRPSRERESLVGERTRIINRMKSALARLGIRGFKPALRKAPQRLEALRTPEDTPIPPNMLDEVRRDMIRLAVVREQIDAIERARLVRLEQAPASGSHPMVRLLARVIGVGIETADMLVQEVLSRKLRDRRAVARYVGLTGSPDESGKRRREKGLAKAGNARVRRGLIQLAWRFLRFQKDSALALWYRARTEGPKGVRKTTMIVALARKLLIALWRLVMTGEIPVGVVLRAAA

SEQ ID NO: 513547 - protein, 355 aa, unidentified
MARLARIGIDTSKSVFQLHGVDEKEQAVLRKQVRRREFLAFMAKLDPTSVALEACGASHHWARDLEKLGHQVVLIPPQHVKPYVGRNKNDKIDAAAICEAMSRPKVRERLVPIKSIEQSAAQMLLGVREGLINRRTQLSNSIRSHAAEFGLVAAKGLDKIEPLLERIETDDTLPALAKEVFAALGQEFRDIKLRSAAIEKKMVAYQRANEVTRRLAEVPTVGPVGACLAVTKIVNPHGFRSGRQCAAWIGLTPQDRSSGGKHKHGGITRAGDESLRAALVCGATAYLRHVRSGRITPSPWLAGMLKRKPPKLVAVALANKTARIIWKLMTSGERYDPQRASARHDIAADAIAIAA

SEQ ID NO: 513548 - protein, 381 aa, unidentified
MKEIRTFSTMTAALLALADWLQEAGCTHVAMESTGVYWRPVYNLLEGQFELLVVNAQHIKAVPGRKTDVKDAAWLAELLRHGLLRGSFIPSKPQRQLRELTRYRSTLVQERARTLNRLQAVLEDANLKLASVVTDINGVSARAMLEAILAGQRDVEILADLARGRLRAKRDQLKEALEGRVTAHHSFLLTEHLSTLEYVDEAMERVSREIDQRLTVDQEAIVLLDTIPGVGQRAAEILMAEIGTDMSRFPSAKHLASWAGMCPGNHESGGKRLSGKTRKGNRWLRQVLVDIAPVASKTKNTYLAAQYKRIAARRGKKRALIAVGHTILTIVYMMLTRKQPYQDLGAAYFDQREQERVERRLVHRLERLGYEVSLQPRALAS

SEQ ID NO: 513549 - protein, 450 aa, unidentified
MSTLNSAEEKKPSYAAHIGLDWADQKHFWTMLTADGKRTRGELKQTPEAIEVWAVELARTFGGRPVALALEQVRGALVAVLSKYAHLHLFPLHPTKLAHYRLSVCPSGAKGDPSDADLILDYLVKHPERLRCLEPDTVETRSLQFLVEERRKLVNQHTCQLQILIYWLKQIFPQMLEWFDNMSTPLVGDLLKRWPELPKLQKASAKTLCTFFHRHNCRVEERIQQRLEEIGQAVPATTDAALLRTGNLCIQLSVQLLAGLRAGIAEFDSQIEAIYQTHPDRFITASLPGAGPALEPRLLAALGTIRERFESASNMACCFGIAPVTEASGKSRWVHWRWGCSKFVRQTFHEWANCSIRTCGWAREHYDRQRLKGKGHHACVRSVAFKWIRILFRCWKDRVPYSEQRYLEALRTHGAATSTPAAIVDEPTPVLSGVQWESCGDFSKLAKVSS

SEQ ID NO: 513550 - protein, 411 aa, unidentified
MEQIHDRVAGLDVHRDTVAVCVRTPGPRGGAQTEKARFDTTTAGLAALAEWLAGHAVALAAMEATGVYWKPVYYALEGRFELWLCNAHHVKNVPGRKTDMSDAEWLADVAAHGMVRPSFVPPPPIRELRELTRYRKTQIDVRAAEIARLEKVLQDAGIKLTSVASKVLTQSGRAMIEALIAGQRDPVALAELAKGKLRPKIPQLTAALRGHFGAHHAIIAARILAHLDFLDETIGALDARIAARVAERYQSAARLLADVPGLERRSVEVIIAETGADMSRFPSPAHLASWAGLCPGNHESAGKRRRVATTPGNQWLRRTLIESARAAARTKDSYFGAQYRQIARRRGPNKAAVAVAHSLLDVIWHLLTTGEVFTDLGADYLISRQDKEHQARRLMRQLEKLGFTVQLTDAG

SEQ ID NO: 513551 - protein, 444 aa, unidentified
MEHCSEIFVGIDVSKARNAIAVADGERGGEVRFIGEMDASEESMRRVVKRIAAGHERAHFCYEAGPTGYGLHRLITSLGHPCTVVAPSLIPRKPGDRVKTNRRDAIGLARLLRAGELTAVWVPDESHEAMRDLVRARAAAVETQRVHRQQVSSFMLKHGRSFPRKTTWGARHLRWLQEQKFDHPAHQIALQEMAEAVRASRERVLRLEAAIEEFVPQWSLAPVVRALQALRGVDLIVAVTFVSEIGDLGRFDNPRQLMAYLGLVPSERSTGDTVRRGSITKAGNGRVRHMLVESAWTYRHPPRIGKMKLYKLEQTSPKVREIAWKAQTRLTGRYRALSAKGKKTTIVCTAIARELVGFMWSVARRSQHDRRYPLLTRRQVHSSRTGGGGAAAGELPPDALWPASVDARSKTGNAPDAYSEMRYPTRASELDHRRPSGPASTCAR

SEQ ID NO: 513552 - protein, 385 aa, unidentified
MTNRSESFKIVPHDYDIFTGMDVDKRSMLTTFTDHGKLLSSKRMPYRSQHLLNYVQKYFPGKRIAFVYEAGPTGFGLYDELVANGHRCLVVAPSMVPSPPGKRVKTNRIDSKKLSEGLRGGQLEGIHVPTPKYRDLRHLVQLRDTQSRQLTATKCRIKALLLYEGIPFPSENGKWSLRVIAQLKQLPCSGAVRFKLNQLINTLKFHFESASTAQKEIRRFCQEDPELQESIRLLTSIPGIGSIIATHLVARLGDWREINNVRQIAGFLGLVSREDSTGDRVRRGEITRVGDSRLRNKLIQGTWVAIRRDAELRAFYRRIYQRNPKNVAAKKAIVAVARKLTTRIYAVLKERRPYEFRPDNSRAPLTAEETACLRERLAGAQSEQP

SEQ ID NO: 513553 - protein, 370 aa, unidentified
MSNATTFVGLDVHARSVKACAFVPETGETIRRSFGYEPCEIASWASSLPQHAKCVYESGVTGFHLCRELRSMGVDCVVGAVSKMHKPAADRGRKTDRRDAQFLAVQLALGVVTEVHVPDAECEGARDLTRALADARDDAVRAKQRLSKFLLRHGFVYDERNSAGQRRNRWTRDFWAWVGRIDLGDGAAMATLDHYCVRVREADAAKAALEAKVKELAQQPRWKPTCDALKCLKGVDAVTAVSIACEADGFARFAAASGFAAWVGLVPSEHSSGESQFRGGITKAGNKHLRKLLVEAAWHYKGASRSPKGPAKGQIVDEATRRHANAGVRRLVDRRRAMDDAGKQSSVANVAVARELACWCWAVGRMAEGA

SEQ ID NO: 513554 - protein, 483 aa, unidentified
MKSKPEEQNKRATNHPTQHQWHEMNRKQRREITRQIQSEDLSLEVIHPDAGGIDIGNESHYVAVPPGRDNQSVRRFGCTTAQLKAMAAWLKQCRIRTVAMQSTGVYWVAVYDILEQAGLEVYLVNARDTKNLPGRKSDVQESQWLMKLHTYGLLRNAFRPSQEIREMRTYWRQRNDLVQSAGRHILRMQKALTQMNIQLANVLTDISGTTGQAIIKAILAGERNPHKLAEFRDPRVKASEEQIAQSLEGNWQEDLLFVLKQEHKGYEFCQKQMAECDRQLKQYLQQREDRSHGAPLPEEKRKGRLKKKKGNAPQFDLREGLFRMTGTDLTRIDGIDVMTATTIISEAGWDMSKWKTEDHFVSWLRLCPDNRISGNKVIGKGRLPTNNPITIALKMAATTLRLSKTYLGAQFRRLRTRLEAPIAIKAMAAKLARLVYRMLRYGMKYVDQGAAVYELRHRELQIKRLKAKAQKLGYRVTPIPAAA

SEQ ID NO: 513555 - protein, 359 aa, unidentified
MSKCSTKTQKVYVGFDVSEKKIATFAICGEKTSKDNPEISNDPEAIKQFLKIFPDPKNVCVVMETGTHSLWMSELIRKQGFEVIVAHARDLALIYGTDKKNDQLDAEKLARLAQADRKLLHPVEHMTMERRTDLMVVKSRDLVVRQRVQTINAIRGFLRSCGCKMIEAEYTADSIKKCCSALPAEVKPAIIPLLQHICYCDRIIKDYDRQIRKLCQKYHETDILRQIPGVGELTALAFVLIIGNPRRFKNAQRLCAYLGLVPKQDQSGDTDKQLGITKQGNKLGRRLLIQASHYIMGPFGKDCKLRSFGLRIQARGGNSAKMKSFVAVARKLVTVMFALWMNPDVPYGPNFKKHGKAAA

SEQ ID NO: 513556 - protein, 326 aa, unidentified
MYASLDLHKEYSQAVVLDFDGTVLREERVENEDPTEMERFSESLPPETEVVIESSSTWYWVYRILSRRHRVILSNPLKTKAIASAKLKTDRVDAMTLANLLRRGYIAESYVPTQKVMELRELVRYRANLVRMRSSIKNRIHAHLLMNNVRVEAGPFTKEFIQQVRAIEDTKVQGYLRLIDSLNQEVRTASAEISREAMSNEEARLLMTIPGISFYSALLIASEIGDVNRFADSNGLVAYAGLVPSTHSSGGTTYHGRITKTGSPYLRWVLNQCVRANIRTEPDGTVASFYNRLVRKKGGAKSAVAASAKLLRIVYWVLKERRPYHS

SEQ ID NO: 513557 - protein, 345 aa, unidentified
MNKLMAGIDLHSNNLVIGIMDMDGKRVASQKLSCKLKEVVGFLSPFKQRLEQVAVESTYNWYWLVDGLQALGYPVVLANPAGMEQYSGIKHADDTNDAFFLAELLRLKILPTGYIYDPHLRPVRDLLRRRLTLVHQRTALMLSFKSLYTRTTGHEMSLGELKELAIKEAQDLYDHPANQLIAGMQIKHIEQLTGSIEKIEEAVLDCARELPFYSKLTTLPGVGTILGMTITMEVGEIKRFAEPGHFASYCRTVAAQRMSNHKKKGENNSKCGNKYLAWAFVEGAHFARRYDPQCRRWYDRKVAKTSTVIATKALACKLAKAAWHVMAEGTDYDSQRMFGQAASRK

SEQ ID NO: 513558 - protein, 419 aa, unidentified
MTPHKDFFLDSGPSVPTPMLPPSPGLSDALQVYHPHAAGIDIGEAEHWVAVPPGCDPQPVRRFGTFTADLDALADWLLDCGVTTVAMESTGVYWIPLFELLEARGLQVLLIDPRQAKRVPGRPKTDRLDCKWLQRLHTYGLLAGAFRPEAHVCVLRSYLRHRQMLLTYAAHHIQHMHKALEQMNLKLTQVVSEITGVTGLAILKAILAGERDPQRLAKLRNPHCHHDEEDIAKALQGTWRAEHLFALRQAVELYAFYHQQITQCDQQIAAHLKTFGDKSAGQPLPPKAHRHKKTNEPRFDARTPLYRLAGVDLTTIEGIEEGTALVILSEIGTDMHRWPSVKHFCSWLGLCPQHTISGGKVLSRRVRPGAHRVTVALRLAARSLHHSQSALGAFFRRMKARLGTPKAITATAHKLARLV

SEQ ID NO: 513559 - protein, 346 aa, unidentified
MRFYQQQHRFYCGVDLHARSMHVCIVDQEGQTKVHKNIDATPDRFLPLVRPYREGLVVAAECMFAWYWLADLCAAEGIPFVLGHALYMKAIHGGKAKNDKIDSQKIALLLKGGMLPVAYAYPKAMRATRDLLRRRNKLVHIRAEALAHIQNTVSQYNLPPLAKKLTFAANREGVAERFADESVRRMAESDLALIGHIDEQLQSLELYLVRHAKVDDPQAYHLLQTIPGIGKVLALVLLYEMHDAGRFGDHRHFVSYCRLVRPSHESAGKKSPSKGHKIGNAHLRWAFGEAACLMLRELPTAQVYVARLEKQHGKGKAISILAARIARTAWLMLKRKEAFDATKFLN

SEQ ID NO: 513560 - protein, 458 aa, unidentified
MKNFYLGADVSKGYSDFMLLDAKKRRIEEDFQMDDTFDGHQKLYHILSALCDQNPDAQIFAAVESTGGYENNWFNALVKFQSNLPLKIARLNPCGVHNNSKAGLERNITDPISAENVAKYMIEHPENVTYQQQDPLASLRKQWSFIKMLLKQKTQLLNQLESNLYGANPEILAYCKNGVAKWVLSVLVRFPTAAKLAKAKKSSLVSIPYVTEQKAKELIQTAKKTVASANDQITAQIIKATVKQIQQLTEVIEVQEKILAETCSIPEVQLLKTFPGISDISAIGLILEIGSVERFATAKKLSSFFGLHPIYKKSGDGIWGFHMSKKGRVVPRQILYMVAMVAIQCNPLIQQIYLKHTEKGMKKKAALGLCMHKICRIIYGMLKHNMAFDANVDRNNRKKSIKADTKKIRSDKRRRYQRFDAKAPISGRHNKKRKERKQSQSDNIANNGIIKASVPVSV

SEQ ID NO: 513561 - protein, 345 aa, unidentified
MKYFIGLDAHSTTSTFAVVDQTGKCVHRSTVKTSEKNLSYVISQINGERVLTFEESTISQWLYLQLREYVDDLIVCNPVYVAKKQGAKTDFRDALHLAQELRTGHLTPVYHDSSHWIQLRVSVSGYLDVVEEIVRTKNRLKAVFRAEALNTDENSFYKNKHRTVELHNESARFVAERLFAQIEYLEEEKLKYIDLFRRNQKKYRPIRNLMTIPGISIIRANIIVALVCQPARFKNKHQFWGYCMLVRHIQKSGGRIYGNKRVFGRRELRDIFIGAAENAMRTKTTLRDHYDALKARGVNHKDAKVSLARQISSISLSCLKNNEIYQDDYRERLKERKKVRQMLSQ

SEQ ID NO: 513562 - protein, 351 aa, unidentified
MKYYQTTTEFNCGIDLHTRQMYICVMNRAGEVLVHRNIRDNDFEFFLKLVEPYRHDLTVTCESCFICFWLADACEDAGIKFVLAHAFYVKSIAANKHKNDKEDARELAECLRTNRIPPAYVCPRDLRPVRKLLRRRNKYVKNRAVLTGHSTCEVMAAGNQPLKISANSKERWREGIRDSFDDPLDSFTADAELFMIESYDRVIQQMEQRIEKHARDFKQQDYRLLRTAPGIGKILALTILYETIDIKRFPSEKDFLSYSRLVAGTNESGGKDFGGKGRKMGNPYLKWAFMQAAILSKRADSKMNTYYEKLARQKGKHVANAIIAAKLARAVYFMLDRKTGFSLEMMLKGKR

SEQ ID NO: 513563 - protein, 369 aa, unidentified
MADRITYVGLDVHKESIVVAVAEGGLRGEVREYGRIANTATALDRLLRKLGSDGMTLRFCYEAGPCGYGIQRRLSAQGHECAVVAPSLIPKRAGDRVKTDRRDAASLAKLHRAGELTAVWVPDARHEALRDLVRARLDAVHSLRRARQQLSGFLLRQGCHYGRPAWTKLHRRWLAGLNFEQPVHHIVLEDYIAAVEAAAARRDRLTAQIEAMLPDWTLAPVVEALQTMRGMALVNAATLIAELGDLTRFTNPRQLMAYLGLVPSEHSSGASVKRGGITKAGNGAARRLLIEAAWSYRFPARLSRELLLRQENQPKQIRDIAWKGQMRLCARYRRLARTGKPANVVTTAIARELSGFVWAIARQVMATAG

SEQ ID NO: 513564 - protein, 312 aa, unidentified
MNDKKTSVYAGLDIAKASLQLHLQGKSYDLSNTTDGHAQLIKRLAAIPGVHVICEATGGYERAVVAALHVAQIPVSVLNPARVRQFARASGELAKTDPIDAAMLTAFGQAFAPEPTPPRTATELKMAALVTRRVQLLELRVAEAQRADTCADLDLRKLFTSWLAQIEKQIAKVEALIAALLKAHAPLADQVQRLDDIMGVGRLTAVMVLATMPELGTLNRQQAAALAGLCPYNRDSGQWAGKRCISGGRAEVRRALYMAALSASRSNHLLKPFYDRLIAAGKPAKVALTAVMRKLIVLMNHVLKNPNFSLAH

SEQ ID NO: 513565 - protein, 415 aa, unidentified
MVVCRANNTSCRTEKDVAQPTLWAGIDAGKAAHHCVAINTGGQRVLSERVINDEGALLDLIRAVKELADGGSVQWAIDLNSGGAALLITLLLDDDQDLLYIPGRTVHHASGAYRGDGKSDAKDAAIIADQARMRRDLLPFRHRDKTAVDLRILCARRTDLASDRNRAINRLRAQLLEYFPALERAFDYAHRKAALILLTGYQTPDGLRRMGAPRLERWLRDRQAYNAGDLAARAIEAANLQRTTVIGQHVAAAVVARLAQTILDLNTELADVDTMIEETFQQHRLAAIIVSMPGFGSLLGAELLAATNGDLASFNTADRLAGISGLAPVPRDSGRISGNLKRPRRYDRRLLRVFYLAANNSIKTCPESRNYYDRKRSEGKRHSQSILCLARRRLNVLWAMQRDNTTYQPGLPRAA

SEQ ID NO: 513566 - protein, 402 aa, unidentified
MNSVGIDVSKGKSMIAVMRPFGEVVVSPFEVRHTANELNELAGLLKSLDGETRVVMESTGNYHAPVAWLLHDAGLYVSVVNAMLVHDYGNNSLRRGKTDKKDAVKLANYGLDHWLTLPKYVPEEDTRLMLKTCYRQYQQYSKVRTMLKNNLISLLDTAFPDANRLFTSPPRADGSEQWVDFVAAFWHCECVCGLSKKAFTTQYQKWCRKHGYNFSEVKALDIYASACGHFGVMPKTDTAKLLVEQAVSQLRATSAALAALKQEMQSLAVSLPEYPVVMEMFGVGPTLGPQLIAEIGDVRRFHSKKALVAFAGIDAPPYQSGQVDVRSRNISKRGSASLRRTLFLVMGVLLQCAPMDEPVYQFMNKKRSEGKPYRVYMMASANKFLRIYYASVKAYLDSLEHG

SEQ ID NO: 513567 - protein, 335 aa, unidentified
MKVFYLGVDVSKKKLDLCLRSNGKDILYDVIPNDLSSIKSWLTRTFEKFFLSEDSLVVCAEHTGQYTYPLVCATKSIGVYLCLEDAAKIKYCHGIPRGKNDKIDACRIAMYAERYNDCLQPYTASELIIQKLKNLSTERSMLVADRAKYQSQLKDQVDYMEHSIYIAKCNRVEGIINTFTDYIAQIDLEIKELINQAPVIAHQMDLLMPVDGVGERVALKMIMETDAFTSFTDPRKFCCHAGVVPFVYVSGSSQRSKNRVSNRADKSIKHLLHMAALSVSQVKNSPLKKYYDRKVEEGKNKMSVLNAVRAKLVTIMFAVIRTDAFFSRNYQNSLA

SEQ ID NO: 513568 - protein, 341 aa, unidentified
MDKIASQPVAWCGIDVSAQQLVVALQRGDRAVQHRTFPNGSVGHQALIRWLARSTGTVRVCLEATGLYSLDLALSVHAVPSIELAVLNPKAVCRFAETLRRSKTDPADAVVLLDYARRMPWQSWQPPSATALVLRSITRRFAALTKQHTMEANRLHAAEASKTVPRCVRQDLKQSLRQIECRLKRLQSEARKLVARDAELEQRYTLLRSIPGIGESSALQIMGELEVLAPDLDVRQWVAHSGLDPMQHTSGSSVHRAARISRAGNRHLRRVLYMPAVVGVRFDPYLRTFYERLLARHKTKLQAIIAAARKILHAIYGMFRSRSRYDGSKLFPLLQPTAQAA

SEQ ID NO: 513569 - protein, 401 aa, unidentified
MNAVGIDVSKGKSMVCVMRPFGEVVLEPFEVLHTAQNLHDLAEKLKALDGETRVVLEATGNYHKPVAFVLHDAGLFVSVVNPVLIHDYDNNSLRRVKTDKKDAVKIANYTLDKWTRLRQYLPEDDTRLALKNCYRQYQQAVAIRTMLKNNLISSLDLTFPDANKLFSSPVKNNGCEKWVDFIGDFWHSECVSSLSANAFAKKYLKWCQKHGYVFTRSKSDEIYACAVNSASLPKSPTSKLLIQQQVAQLKAVSQSVAAFRQEMLRLSQQLPEFDTVMEMYGVGPSLGPQLMAEIGDVRRFSSKKSLIAFAGIEPQPNDSGKVVGNDKGISKVGSAVLRRTLFLIMTVILQTQPQDEPVFQFMDKKRSEGKPYKVYMMASANKFLRIYYARVKTVMDSADSN

SEQ ID NO: 513570 - protein, 347 aa, unidentified
MKILALDLGKYKTVACDYERENGKHRFRATSTTPAALQQLVKEVKPDRVVIEVCNIAGWVCDLLRGMGVEIQVANTSDDAWRWRKVKKKNDRCDALKSAQLSAVNQLREVHIPTIDVRQWRALIAFRQQLVRRRGRIKNHIRDLLLTEGQLLPRGAKCWTQLGVARLEAMAKPLQEVGMSELWRGQLQIELQQLREIQQEIAVAEEKLDAIAAADPRIALLRTIPGVGPRLSEAIVALLDRPERFHKAREVSAYIGMVPKQFDSGESERPGRITKHGSRLVRSLLVEVAWAGLRYNPWVRQTYQRISGGKKSRKKIAIVAVGRRLLVRCWAMLRDGTSWRSSATAAA

SEQ ID NO: 513571 - protein, 334 aa, unidentified
MKKRYFMGIDVAKATLDFCLLSKNATLLWQGQLQNDSHAIEQFLAQLQARGYKLAQIHFCCESTGVYGQRLAASLHQAALALSVLNPAQVKFFAISVLRRTKNDKVDAEIIARFCRERQPLATRPLRPIESQLKLLVHERESRVNEQIRERNRAKKDPYQIALPKLISQQRQSRLKQLAKEVAQFDAAIDSLIASDEGLKEKSRLLCSIPGIAKVTAAKLLCELAGKEFQSARQLAAYAGLTPQECRSGYSSYGKTVLCKIGNAFLRKALYLPAAVARRWCKPLRPWIALLESRKLHDLAIRGAIMRKLLHIAFGVLAHHQPFNPMLVFIPKTP

SEQ ID NO: 513572 - protein, 334 aa, unidentified
MLYVGLDVHSRQSSLCILNSGGGTVNEIQLKGPRSSVVDRLRELKEPFSICYEASCGYGHLYEQLKPLAAHVAVAHPGKLRLIYRSKQKNDRVDAQKLAKLLLLDMVPPVHVPSMDVRAWRSLILLRQRVLVQVVRCKNQIRGVLREHDIAGPKWLWSRKQLVWLESLELHPIAKLRLELAVEEFKSLRAKIRRIERELQKYADAHPAVKLLMTIPGVGIRTAETFLAWVDDIVRFRNNRQLGAYFGLVPCQDASADRNRLGHITRDGPSVMRKLICEATWTAIKKCPRFKRFFEQVMSDKSERKKIALVATMHRMLKVMGATLRSGERYDGAR

SEQ ID NO: 513573 - protein, 346 aa, unidentified
MENIALDVHKHYTWARVENSEGRELYASRLAHSRGCIKNFVQRWTPGSAVAVETVGNWYWVVDEIEAGGGKPQLVNARLAKLMMGSVNKSDKLDAKGLNRLQRTGTLPTVWIASSTVRDARELPRTRMVFSRQRTQLKNRVHATLGKYGYVVDEVSDAFGKRGREIIQELSTKLPLHTGRSLQRVLDQLDDVIENLRPIEADMIKVFAPCPQITLLQSLPGVGQILAVVIWTEIGSIERFGRAEQLASYSGLVAREHSSGGKFRYGPIRRDVNVYLKWAFVEAANSALLNAERCGYKHISQLYQRVKARRGHNRAKVAVARHLSEATFWMLKKGESYREPLLSTQP

SEQ ID NO: 513574 - protein, 348 aa, unidentified
MDYYAGIDVSLEESSVCVVDSDGRIVREAKVLSEPEALIAWFCALGLGLSRIGLEAGPLSQWLYAAMKQAGLAVELLETRHVRDAFKAMPVKTDRKDARGIAQLMRLGWFRPVHCKSMSAQEVRALLTARKLVQSKLLDVEMSLRGILRGFGLKVGVTKPNRFGNRIEELVAGHVTLEVVAKALLAAHEVLLRELNGFEKRVRAMARDDKRVRLLMSAPGVGSIVGLTYVAAIDDPGRFKSSKQVGPHFGLTPKKYQSGEKDISGRISKIGDAAVRTALYEAAHIILTRPIKGASNLKSWAMKLAGRAGMKKAKVALARKLGVILHRMWVDGTPFAGEPAGALKPASA

SEQ ID NO: 513575 - protein, 430 aa, unidentified
MKSNTQNAKIEAITEKTLVLGIDVGSETHYARAFDYRGIEYSKKPFKFSNTEAGFVTFKEWILDLKERHEKDKVVPGMEPTGHYWFNLGKFLQDNEMKPVLVNPHHVKKSKELDDNNPTKNDRKDPKVIAGLVREGRYMIPYLPDGVYADLRTASNIRFQLQAELTRIQNRISRWFNIYFPEYKTVYGNPDAKSGMLILKSAPLPEDILTLGIDGVNQIWRDAKLRAVGKARAKTLIEAAEHSVGSKEGAVSARMEIRMLLEDYESRNIRLQEVMTLIEGLVKQIPMAEKLLKIKGVGIKTVSGFLAEVGDISRFNTPKELQKLAGLALVESSSGKHKGETTISRRGRKRLRYLLFEVAMSLVAKNPEFRELHNYYTTRRLNPLKKMQSLMAIAAKLIRVFYAMLTKGVDYDPKKMVSDIKRPAVYLQAA

SEQ ID NO: 513576 - protein, 427 aa, unidentified
MSYTLAGIDVHKKILVVVVAEVTEEGEWNYKRGKFGTTAPELQRLADWFQQLGVQEVVMESTAQYWRPVWSAREQFGTPVMRQREGAGPMAGRLHLAQAQSNRGPRGRKNDHRDAERLVHRLVSKELVLSFVPDPEQRLWRTLTRRKQQLGQDRTRFQNRLEALLEQMHVKLSSCVSDLLGLSGRRMLEALAEGATDPLAVAALADAKLRATPEQLGDALAPCAHLSPVYRRLLKMELKPLQFLEQQMHELEQEITRLLRPYAGAVERLAEVPGLGVESAQQIIAEIGPTAEVFPSEKKLASGVGVCPGEEVSAGETHSSRSPKGNRALRGLLNQAAHAAVKMKGSIFEVAFKRLQPRLKYKEAIGAIAHRLCHLIWKILHQGVRYEECGPAVSAKRQQARLAKMVRQLKKAGYQVITPALLPPKTI

SEQ ID NO: 513577 - protein, 418 aa, unidentified
MSAEIKIVYPVCCGMDVHKSFIVACIAVTDQYGQTKHHIRRFSTFTGDLRKLAEWLASYNCKDVCMESTGKYWIPVFNILEKTCNVCLTHPKYVKAIKGKKTDKRDAKRIAELFKCDLVRSSFIPPLDIRQLRDLCRYHAKLTYMNTSEKNRAQNCLTTSNFKLDDVFSDVFGKSATLILDKLFEQGNSDFDVAPLLDKRCKATVDEVTAALDGEFNVSQSEKLKLIRKHQECISELKTNLEAVILRLAEPFQPQINLLMSVPAISTKFTAIRIIAEIGTDMSVFQTAKHLISWAGLCPQNNESGGKKKTTRIARAGAYLKPLLVQLVLAVVKSDKHPELKNKYQALKKRRGGKKAVIAIARKLLTAIWHILDKSEFYNADLYHKADKPPVNRVLTPEQAFALLRSKGYEIIKPDTAA

SEQ ID NO: 513578 - protein, 423 aa, unidentified
MEVMHRRVAGLDVHKETVVACVRVMAGRRPTRECRTFTTPTQGLLELLGWLTASRVTHVAMEATGVYWTPVWKILSEGDFTLIVANAAHIKQVPGRKTDMNDAMWIADLLACGLLKASFVPPEEIQELRSLMRTRKQLVREQTRHVQRIEKTLEEANIKLGTVLSDLMGASGRRMIEAMIAGERDPHRLAALAERSVKASPKALHDALHGRLREQHRFLLQLHLRQWDALDAAIRQIDEQVAGHIARVDQQAADGQPPFGELIARLCAIPGVSFLSATAILAEIGRDMSRFATAGHLIAWAGLCPGQNESAGKRKSSRLRKGAPWLKTMLVQCAWAAKRAKHSYYSAQFHRLCGRRGPQKAICAVAASILTAIYHMVRSGASHRDLGADYFDRRTPQARAKRLVAQLAKLGFAAQLQPLAEAA

SEQ ID NO: 513579 - protein, 307 aa, unidentified
MEKFAGVDVAKDTLEVFVTPDTRRSFTNENEGRKELARFLAEVCPRLVVMEATGGYQIPVVETLALRNLPVVVVNPRQVRDFARATGRLAKTDAIDAEMIARFAQAVKPQARPLKDSDAHRLQTLVARRRQLVEMITMERNRIGTAPEWTRPDVEAHIEWLTGCIEKIDKDISSFIRKTPLWREKENLLRSVTGIGPVNASILLARLPELGKLDGKKISALVGVAPFNRDSGKSKGKRTIFGGRADVRAALYMAALSAIRHNPFIKTFYERLIHAGKLPKVAITACMRKLLVILNAMVKTNTPWCAR

SEQ ID NO: 513580 - protein, 353 aa, unidentified
MAIVGGLDIHRKQITFDYLDTGSGEVRAGRIAPADRAGLREWLARFAGRGDVAFAIEGCTGWRYVAEELAVAGAEVHLAEPADTAAARGRKRRAKTDRGDSRHLRDLLESGRVPECWIPPAHVLGCRALLEAYHDLQSEHTAWVQRVHAVLFHQGAPVLPGMRAGQDRAALAAAAAAHLTWSGQLQVAVAADVLACMEEHMNDLRARIRAEARAMPAARELAARLYGVGPLSALALACWLGGSGRFSSSRQAVRFAGLDITVWSSDGKGPPARLSRQGPPVLRWALYEAGKTHARPGAPDHACYAQVKDRCNGKRAALSEARKLIRQATHILAALGDDALTPGPRPRTSRLAA

SEQ ID NO: 513581 - protein, 362 aa, unidentified
MFIRYVGLDVHKDSIKIAVADAGQDRARYFSSIPNDSNKLLQRLHKIGSKDSIQCCYEAGPGGYTLHRALSSADIDCRVIAPSLIPKQSGRRIKTDRLDAENLAHYLRSGDLVEVWVPDEKTESMRNLVRLREDARISRHKSRQHLNQFLLRKGRIYPRPSRWIKSHMLWVRQQHFEEAADEITLKDYLRTVELADSRIENIEEDIRLQCRGWTLNPLVRNLQALHGIGFLSAVVIAAETGDLRRFGSAGKLMSYYGLVPSEHSSGSKEKRGSITRCGNSFVRRILVEAAWHYRHQPNNSRALKSRSEGLSQKVLDIGWKAQKRLHRKYMKLLMSGKLKNKVCVAVARELTGFVWAIGREVY

SEQ ID NO: 513582 - protein, 430 aa, unidentified
MKSNTQNAKIEAITEKTLVLGIDVGSEMHYARAFDYRGIEYSKKPFKFSNTEAGFVTFKEWILDLKERHEKDKVVPGMEPTGHYWFNLGKFLQDNEMKPVLVNPHHVKKSKELDDNNPTKNDRKDPKVIAGLVREGRYMIPYLPDGVYADLRTASNIRFQLQAELTRIQNRISRWFNIYFPEYKTVYGKPDAKSGMLILKAAPLPEDILTLGIDGVNQIWRDAKLRAVGKARAKTLIEAAEHSVGSKEGAVSARMEIRMLLEDYESRNICLQEVMTLIEGLVKQIPMAEKLLEIKGVGIKTVSGFLAEVGDISRFNNPKELQKLAGLALVENSSGKHKGETTISRRGRKRLRYLLFEVAMSLVSKNQEFRELHNYYTTRRLNPLKKMQSLMAIAAKLIRVFYAMLTKGVDYDPKKMVSDIKRPAVYLQAA

SEQ ID NO: 513583 - protein, 343 aa, unidentified
MNIASVGIDIGKTTFHLAAIDEHGSIVIRRKFSRKSLLAYTAKLASSLIGMEACGGAHCLARAIRDQGHQVRLIPGQFVKRYRESNKNDYLDAEAIAEAVTRKNLRFVPVKTEDQLDVQGLHRVRERLVHNRTEVINQIRGFLLERGITFNRGPLSLRKEMPYLLEDADQNLTPSLRILLSHLWHEWQYLNEQVDRIGASIGAVAESDAACQRLRKIPGVGPLVSTATVAAIGNGAAFRRGRDFAAWLGLVPKQHSTGGKPKLLGITKRGNRYLRKLFVHGARAVLLRVKYDTGGFGQWVHRLAARAPRNKVVIAIANKLARIAWVVLSSGNEYHHQPAATPA

SEQ ID NO: 513584 - protein, 430 aa, unidentified
MKSNTQNAKIEAITEKTLVLGIDVGSETHYARAFDYRGIEYSRKPFKFSNTEAGFVTFKEWILDLKERHEKDKVVPGMEPTGHYWFNLGKFLQDNEMKPVLVNPHHVKKSKELDDNNPTKNDRKDPKVIAGLVREGRYMIPYLPDGVYADLRTASNIRFQLQAELTRIQNRISRWFNIYFPEYKTVYGKPDAKSGILILKAAPLPEDILTLGIDGVNQIWRDAKLRAVGKARAKTLIEAAEHSVGSKEGAVSARMEIRMLLEDYESRNTRLQEVMVLIEELVKGIPMAEKLLEIKGVGIRTVSGFLAEVGDISRFNNPKELQKLAGLALVENSSGKHKGETTISRRGRKRLRYLLFEAAMSLVAKNPEFRELHNYYTTRRRNPLKKMQSLMAVATKLIRVFYAMLTKGVDYDPKKMVGDIKRPAVYLQAA

SEQ ID NO: 513585 - protein, 370 aa, unidentified
MKQRLLYVGLDVHKNTTDVAIANGRSNGKVRSYGKIDSTLDALNKLIKKLQDGDKELRFVYEAGPCGYQIYRYLDAKGIHCSVVAPSMIPQRSGNRIKTDRRDAINLARLFRAGELTSIYVPTPEDEAIRDLLRCRDDMKRFERKARQRLLSFLLRHGHQYSGKKNWTKGFYTWLATVRFSYSAQQVTLQEYIDVTNECSERIQRITQQIQVHVEEWNRAPFVKAYQALRGVSIIVATTVVAEIGDMNRFQSPKQLMAYLGLIPSEHSSGKTVRRGPITKTGNSHVRRVLIEAAWTYKMQARVSNILLKRQKGLPKSVCDISWKAQTRLCARYRRLYARGKSRQTVVTAIARELSAFIWAIDKEIQLAVL

SEQ ID NO: 513586 - protein, 294 aa, unidentified
MNFYTQPHTHYCGIDLHARALYVCILAQHGTKLVHKNLPTTPAAFLRVSAPYRAELVVGVEGMFTWYGLADLWAKEGIAFVLGPALSMKAIHGGKAKNDKIAAHKIAVLLRGGMLPQAYVYPAEMRATRDLLRRRCPLVRQRAALLAPIQHTNSPYNLPEIGKKLAYKANREGVAEHFPEPSVRKTIAVEVSRIAHYDQWLGEVELYLTRTAKAHDVQTFSRLQSVPGLGQMLALVLLYELQDRARCPRVQDFVPSCRWVKCAKESGGKRLGTSGKKIGTVPLRWAVAEAAVLC

SEQ ID NO: 513587 - protein, 379 aa, unidentified
MVSASTPASLAETASATLFVALELSRSTWRVALHAPLTNKVSQHRLDGGDADGLLALITRKRSQAEEKLGRPVRVVCCFEAGYDGFWLHRWLYARGIENRVLDAASLLVNRRARRAKTDRLDAAGLLRTLMALERGEAQVCRVVRVPTPEQEDARRRSRERARLVVERGQHTSRIKGLLMTQGIRDFEPTRRDWRARFEALRTPDGLPLAPCLRAELLRECRRLWLVMEMIAEVEAEQKAVAEAEDGPAARLAQLRGIGLTFATVLGNEVFFRVFRNRREVGGYLGLAPSPWQSGAVRRDQGIAKAGNSRARRTAIELAWLWLRHQPESALTRWFHERVGSSKGRMRRILLVAMARKLIVSLWRYVTVGIVPEGAVLKI

SEQ ID NO: 513588 - protein, 413 aa, unidentified
MRLFVGDDWAEDHHDVELMDAGGRRLAKARLPEGVAGIARLHAMIGEQLGEDADEDDAGQVATGIETDRGPWVAALIAAGYTVFAINPLQASRYRERHGVSGAKSDAADAHVLADMVRTDSHQLRPVAGDSALAAAVKVVTRTHKTLIWERTRCTQRLRHALRDYFPAALEAFEDLDAADTLELLARAPDPASAAKLTTAQISAALKRARRRGVAAKAERIQAVLRAAHLGQPDVVAAAYAASVRALTAVLITLNEQVKTLHGQVEAYFGQHPDAEIIASQPGLGGVLGARVLAESGDDPTRYASAKARKNYAGTSPITRASGKKKTVLARHVHNDRLIDALMSQAFTALRVSPGARAYYDLQRARGSGHNPALRQLANRLTGILHGCLKTRTLYDEATAWPQHPAATEKTAA

SEQ ID NO: 513589 - protein, 407 aa, unidentified
MEVLYPRCAGLDVHKDTVVACVRCVTEPEHREVRTFGTTTSELFALGDWLESYGCTHVAMEATGVYWKPIWHMLEGRFELVLANAQHIRNVPGRKTDVNDAMWIADLLAHGLIRSSFVPPSRIQELRDLTRTRKQIVREMSQHTLRIQKTLEDANLKVASVLSNVIGTSGRAMLAAIIAGEADPERLADLAVGTARRKRAELVEALRGRVTEHHRAMLKLHLGLISALQGALDELDGAAGKLLAPIQERAALLTTMPGVSDIVAQVIVAEIGVDMSRFPTAGHLVSWGGLCPRNDESAGKRRSTRVRKSGTWLKTTLVTAAWAAARKKDSYLKAQFLRLKARRGAKKAIMAVAASMLTACYYMLRDGVEYRDLGSAHFDHRDKTKTIRRLIRRLTDLGCKVEVPHAA

SEQ ID NO: 513590 - protein, 324 aa, unidentified
MMTPALGIDVSKDRLDVEIAACGKPRSKYFANSPDGWRHLIAWLKELKIKRVHACLEATGRYSLGIALALWEAGHIVSIVNPAQIRDLARTKLGRNKTDAVDAGHIREYAEIFKPQPWTPPSPAMQRLGELQTIRAGIVSSLTEWKNRCGSGLADDTALALVKATITHFAAQLAEVDKAIAGTIDNDPDLSAKRDLLLSISGVGEVLAGLVLSELPGTDVLRSSAQAVAYVGLNPRSHRSGSSIDRPTRISKIGNATLRNALYMPALSAMQHNPVVAALAKRLKAQGRLKGKQIAVAAMRKLLVLCFGVLKSGKPFDPALAMPN

SEQ ID NO: 513591 - protein, 384 aa, unidentified
MPIAAASRSDAPTAIRIDLGAIFVSLELSRSKWLITSLLPGGGEKMSKHAVAACDVVGMLAWFAELNRKAEARTGRCFPVIVIQEAGLDGFWIHRVLQAEGIESHVVDPASIATSRRKRRAKTDKIDGEALLRALLAYKRGEPRVCAMVRVPTPAEEDRRRISRERKALTTERVRHLNRIKGLLFAQGVSGYEPLRRDRRKRLEELKTGDGRPLPVHLKAQIGRELDLLELLLEQIKAVDAERDAMFAAAEAVSPAPAMLLNLKGIGLEFATVLWSEGLSRHFDNRRQVAAYAGLAPTPWQSGKIDHDQGVSKAGNPRLRTTLIQLAWLWRRHQPRSALTLWFEDRVKQNGGFSRRRRLLRSPASCSWRCGNTSTRASSSRAQP

SEQ ID NO: 513592 - protein, 326 aa, unidentified
MTASHSADNIFIGIDVGKASLDVQWHRGDSAQYANRPDAIASLVQRLQSGAHVRRIVIEPTGGHEKPLVAALRQAKLPVELVHTSRFKGYRLMVGANAKSDTSDARLLAAYAGAPDEVRGRKADRVELPEDAVREELRELASRRDQLKHMIHAESCRLAITRHAALRQSILAHLETLRAEDKQVLQMMRALVRQRLDLRRDQQLLRTIKGLGTVSVLTLIGAVPELGHLDNKQAAALVGVAPFVHQSGTLTAPARIHGGRAAVRRVLYMAAVTASRHNPVLKSFYERLIAKGKPAKLALVALMRRLVVFANAVLRSGQPWKGATPA

SEQ ID NO: 513593 - protein, 407 aa, unidentified
MDVIHQRCAGLDVHKDEVVACARTVSGRKVVRTSARFATTTRGLRALSEWLSTHQCQTVALEATGVYWKPVWHILEAQFTLVLANPGHVRAIPGRKSDMNDAAWLADLVAHGLIRGSFVPPAAIQELRDLTRTRKQLGRQIAQHSLRLQKTLEDANLKIASFVSDLLGVSGRAILRGLIEGETRPDRLLARTTGLLRADPDQLQAALEGQVREHHRFLLRLHLTQIEAIEAGLRTLDARLELLLSPLRGVVERLSTIPGVSTLVAQTIIGEVGVDVRRFPTPAHLRSWVGLCPRLDESAGKRRSTRVRHGAPWLKTVLVQAAWAAIRRRDAYPHAQFQRLKAKRGPKKAIVAVAASLLTAVYFMLRDEVPYHDLGVHYFDRHNTARAAKRLTKRLEALGFKVALSAA

SEQ ID NO: 513594 - protein, 308 aa, unidentified
MLTWIGIDVAKASLAVCLLPQQQLLTLPNTPYGYAQLLHHLHGLSIGNVLLEATGGYERAVMTALTQAQLPVTRINPRRARAFAIALGKTAKTDPIDAALLARMASLVQAPARAPEPLREALRALVQRRENLVQQRDDERRRLHQATHPLVRESLLDNIRHLRLQLRHLARAIVTTMRQLDDASSQRLLAVQGIGEVTAASLLAYLPELGQLDRRQIAALVGLAPYNVDSGQFAGKRRIRGGRAPIRRLLYMACWSVIRTQPLFQARYQQLRQRGKCAKVAVTACMRVLIIRLNAMVRDQTDWNPSPV

SEQ ID NO: 513595 - protein, 370 aa, unidentified
MPQSSTLYIGMDVHKEAIAVAYVAQDHDADVISLGTLGTRHVDIDNLIRTLQSKAKHLIFVYEAGPCGYGLYRDLTTQGDVCGVVAPSWIPKKAGDRVKTDRRDAMQRARLMRSGDLTPVYVPQVQDAAIRDLTRAREDTIRDLKAAKFRLKAFVLRHDIRYTGRATWRPAPLRWLREVVCPTPAQHSVFQEDVRAVNDPPERLQRLEQELHAQVTSWRLQPVVSALQALRGGQFTVAVTTLAELGDLTRFDTPRQLMKFLGLIPSEYSSGERRRQGSSTKAGNTHARRALVEGAWAYQYPAKVSRHLQLRLETPPKAIQDISWKAQGRLGKRYRKLIARGKHVNQVVVAIARELVGFMWAMAKQVAVTP

SEQ ID NO: 513596 - protein, 375 aa, unidentified
MGRVFGLDVHNRYVHAYAWHAGQGRHFRFANTPEDWHAFLSTLTAEDEAALEATGSAFALYDRIAPHVRRVVVANPLAMRRLGSGRHTDRVDAERLAVMLLLGTLKAVWVPPAPIAELRRLLRYRERIQSAITRLVNPIGATFRGLGVATAGGDPLQRLSREDVEALPAGDRVIVLSALRRLEAERRELEILDAEIARQTQGVPAGRLLLSIPGVGRMVAAQIYAALGDARRFRRPQPVAGLDPAVIQSGDQNYRGHISKNGSRLLRRALIEAAHSIARHDHGPLGAFYRRKVDQLGYPKAIVALARKLLIIAWRILVTGEPYRSVCASLWERKWRQLTRLAAARHQDADTVLAHLPTRGPSSVTSVLTRQAAAG

SEQ ID NO: 513597 - protein, 342 aa, unidentified
MKIHAIGIDLGKTSFHLVGLNERGEVVVRKRFSRAQLLRFTANRKVHLIGMEACGGSHFLGRALQEQGHDVRLIPAQYVKPYVKTNKSDYIDAEAIAEAVGRPTMRFVPIKSDDQLDLQSLHRVRERWVMRRTALITQIRGLLLERGITLRKGRRYIEEALPGILEDADAKLSGAVRFLLAQLKLELEHLALRLEEADALIEQTVQENEQCQRLDAIPGIGPVTATAVVAAIGNGAAFRKGRDFSAWIGIVPREHSTGGKQKLLGISKRGNRYLRKLFVQCARAVLQQKTKQSPGLKQWLEKLTARTHYNVASVALANKLARMAWAVLATGEAYRAPLVAAA

SEQ ID NO: 513598 - protein, 411 aa, unidentified
MVEVVYERCSGLDLHKQTVVACLIVPGPDTAPRKEIRTFGTMTDDLLQLADWLTAAGCTHVAMESTGVYWKPIYNLLEGSFELLLVNARHIKQVPGRKTDVRDCEWIADLLRHGLLRASFVPDRPQRELRELTRYRTALIRERAAEVNRLQKTLEGANVKLSSVATDVLGVSGRQMLAALVAGTADPASLAELATGKLRTKLPQLERALTGRVGAHQRFLLAQQLAHVDALDELIERLSAEVQERLRPFVATVARLDTIPGVGLRTAETLVAEIGTDLGRFPTSGHLASWAGMCPGNDESAGKRRTGTTRKGDQWLRSALIEAAQAAGRSRGTYLAAQYHRLAARRGKKKALVAVGHTILVIAYHLLTEQTEYRDLGPLHFDQRDQPHVARRLVNRLQALGYTVTLARPAA

SEQ ID NO: 513599 - protein, 391 aa, unidentified
MIYVGIDVAKDKHDCFITNSDGEVLFKSFTISNNRDGFETLFQKIESVSDDLTKVKVGLEATGHYSYNLLGFLLDKSLTTFVINPLHTNLYRKSLSLRQTKTDKVDAHTIASMIMSDVNLKSYSDTSYHNEELKSLTRYRFDKVKERAKLKSSVSRLVCILFPELEKLVPTLHMASVYALLSEFPSAHAVASVHLTRLTNLLSESSKNRYGKDTAVRFREAARNSIGSNMPAKSLELKHTIKLIQEFTSEIDEIETEIKSIMDTIHSPILTIPGISYRMGAMILAEIGDFSRFDSPDKILAYAGMSPSTYQSGQLDNCYSHMEKRGSRYLRYALYNATKYVCHWDKSFGTYLAKKRAEGKHYNVALSHATKKLVRTIYAMEKSGQAYNKAS

SEQ ID NO: 513600 - protein, 353 aa, unidentified
MHVVGIDGHKKTHTLVAVDQLGRRADDITVAATPAGHAQALKWVARFGQVVLAIEDCRHLTRRFEADLLLAGHAVVRVHTRLMAGARRSARERGKSDPIDAEAVARVALREPDLPRASLAGPARDVKLLVDHRRRLVRSRTAAANKLRWFLHEIDPELPVPSRGLRRLCVFDLLDAELDGHQGVVAEIARDLVGECRRLTVQINGLEVRLRRLVEALAPSLLDIPGCGVISAAVIIGEAAGASRFKSKDAFAHFTGTAPIPVWSSNKVRVRLNRGGNRSINHALHMIAVTQVRRGGEGAEYFAKQLARGKTPKEAVRLLRRRVSDRVFRALIADESDTQPAASPADLRLSVAA

SEQ ID NO: 513601 - protein, 407 aa, unidentified
MEVLYPRCAGLDVHAGSVTACARIAAGPQVTYEHLTVATTTRGLLALAEWLTAHGCTHVGMEATGVYWKPVWHVLEEHFTLVLGNAMHIRNVPGRKSDMNDATWIADLLAHGLIRSSFVPPAPIQELRDLTRTRRQLVHEVSRHVLRIQKTLEDANLKLTHVMSDIVGVSGRAILKALIDGDTDPGRLADLTRGRLKATRAELLDALHGRVTDHHRFMIKLHLDQIDAVERAVAAIEARIGDALGPFRAAVSLLTTMPGLSETTARVLIAEIGTDMTRFPSVGHLISWAGFCPRLDESAGKRRSTRTRQSAPWLKPTLVNAAWAATHKKDSYLRAQFLRIKSRRGAKKAILAVASSMLTAAYFMLRDGVEYHDLGHHYFDQRDKEQLAKRLLQRLRDLGVNVEVKAA

SEQ ID NO: 513602 - protein, 403 aa, unidentified
MNSVGIDISKGRSTIAVMRPFGEVVISPFEVRHTGSELSKLAKQLKSLDGETRVVMEATGNYHASVAKLLHNAGLYVSVINAKLVHGYGNNELRRVKTDRKDAVKLANYGLDRWLTLPRYIPEEDTRLLLKNCYRQYRQYSKVQTVLKNNLISLLDTVFPNANRLFSSPIRGDGSEKWVDFVAEFWHCRCASEKSERAFTSKYLRWCRKHGYNFREAKAHTIYAEASGHIGVMPKSETTKLLVKQAVSQLRATSTALAALKQEMQSLASVLPEYPVVMDLFDVGPTLGPQLIAEIGDVRRFYSKKALVAYAGLDAPPNDSGDVTGRHKSTSKIGASSLRRTLFLVMSVYLQTAPLDEPVCQFMDRKRAEGKLYRVYMMASANKFLRIYYATVKAYLESLEHTA

SEQ ID NO: 513603 - protein, 373 aa, unidentified
MNSRITYVAMDTHKKQHRVAIAYPNDEVIVEFSVKNTPTEIRKMVRKIKRNTPGEVKFCYEAGVCGFTLQRRIEALGCKCSVIAPSLTPRKPGERRKTDRRDAKKLLSLFMSDMLTEVYPPDEHQEAARELTRCREAAQENLKRIRHQLQKMLVRHGYVFRDGQHGTQKHLRWLGAVKFNQPLLQEVFDSYFTEMRHCLQRVQTLDRELEKLAQSEDYRDVVGILRCFYGIETLTAISIIAEVFDFGRLASARAFMSYLGLTPSESSSGEKEHKGPITKTGNKRARRLLTEAAWHHRHAYGVSNVLRKRREGQPQWAIDIADRAGLRLRRRYSRLVHRGKLPCKAVTAVARELAGFIWSALIEYEARRKRKVA

SEQ ID NO: 513604 - protein, 337 aa, unidentified
MSEITLIGVDTAKHVFHLVGVDRRHRVIWRKKLTRGRFLAALAQREVTQIVMEACGASHHWARCLRELGHTVRLIAPQHVKAYRRGKKNDYRDAEAIVRATLTVETHFIGIKSVSQQAEQALHRVRSRLLSHRNAAANSLRGLLGEYGLAFGKGFGPLREGARCFAQTEQAQTLGLVGMIHDVLQEMDDLEVRVKEYEGRIAQRVRSDRVSQRLQDELAGVGVLSASALRTKVADTRDFGNGRNFSAYVGFAPNHSGTGGKVRIGRLSRSHDPYLRQLLIHGARAVVSRLGDKQDAQSRWLREVVARRGFNIACVALAHKNARQAWAILSRQQRMTA

SEQ ID NO: 513605 - protein, 348 aa, unidentified
MRYYAGLDVSLAETSVCVVDEDGRIVREAKVASEPEALAIWLGGLGLPLTRVGLETGALAGWLCEEMTELGVPHVVCMDARHARAAMVAMTHKTDRNDARGLAQMLRTGWFRQVHVKARRTMELRTLLTSRKTLVLKIGDVENQIRGSLHLFGIKLGTAKRRTFSQRVRELTADLPRVAAILDVLLQAHAAMLLSLDRLNRMVLEIAREHTVCRRLMTVPGVGAVVGLTFIAAIEDPARFAKSRSVGAILGMVPRKHQSGEVDRNGRITKTGDGEARAALFEAAHVMLHRVKKWSGLKAWATKVAQRQGNKRATVALARKMAVVMHRMWVDGTTFRFSAVQAPAATAA

SEQ ID NO: 513606 - protein, 365 aa, unidentified
MRIDIGVDLHKTQFTVYTQRGEKSGVNGQYPTTEEGYVTFLRKIGKWKRSGHDIRIGVESTGNTRYFKHRMEEKGYSVIVINTMKFKVINESVKKTDKHDAATIAEFLAKDMLPESKLCSEDSEQLRRLLKVRSTLVRTRVTVKNQIHGLLVSMGMEDTKASLQSKRGRQRILDTLAGAGNGLVVQPLFETIDRLTENVKVIECEIEKLVAGDKVVELLETIPGCGPVTACTIRAYTDDIQRFSNHKKYASYAGLAPWVQCSNETEHYGRITKRGPEELRTAFVQLVVGIRRSRQSASWRLMERYEAMKTVKGSGKSIIATARKLSKIVWFMLMREEVFNVGLMTDDFLESKIDSMRRTLNKISA

SEQ ID NO: 513607 - protein, 329 aa, unidentified
MVEVGIDVSKAKLDCTLLLDVQTLRCRSKSVPNTAEGVKGLLQWIERQSGCTPEQVRAALEPTGVYHEAAALALYEAGVRVVVVNPAQLRDFAKGHAVRTKTDAKDSLVLALCAAQVKLVPWRPAPAEIRELRALMSRLDTVEGELRSEFNRQEKAQIAADPQLVQSSIAEAIVFWEVERKRLQQAIDEHIDRHPGLKSEQARLLSIPAVGEKTANRMLCILHAGQFRRAAQLAAYLGVVPVEHLSGTSIRGRARLSKAGNARIRAALYMAAVTAIRHNPDVRALYQRLLSRGKAKMSALCAAMRKLVHICFGVFKNDQPYRPQIEQIP

SEQ ID NO: 513608 - protein, 366 aa, unidentified
MKKSITPIGTPVGMDVHKRRCKVVEFHQGEIKVRKPMGNTQEDWLELLPELPPDAEIGLEVSTAGYFAMSVLEAAGWRERAHWVHTAGIDSNRRQKNDRLDAERLARKLAAHHVDPLPEAWFPPPAIRALRLRARQRCWLALLRTQAKNHVQSLLEMHGLQIPGSDPFGTTGQRWLAEQKLPPPLTESIPQTLRLLGLLEEEIHTREQYLQAADKQFPELMLIRTIPGIGPILAPVIWSEIGTIERFRSAKALANGTGLVASFYDRGEVKTTGPITHQGSRWLRWAFVTAANVAIQGRNPFARRYHRLRRSKKANVAKAAIAHSLARCVYGVLKHGCPYREDRWGRKVGALEPETRAGARSTKTAL

SEQ ID NO: 513609 - protein, 410 aa, unidentified
MEVVYERCCGLDIHKQTVVACVVVPGAGKQARKQIRTFNTMTADLLQLADWLTAEGVTHVALESTGVYWKPAWNLLEGSFTLLLVNARHIKQVPGRKTDVRDCEWIADLLRHGLLRASFVPDRPQRELRELTRYRTTLIRERAAERSRIQKTLEGAGIKLGDVASDVFGLSGRHMLEALVGGTTDPTLLADLAKGNLRAKRSQLERALRGQFQAHQRFLLAQQLAHLDGLDELIDQLSQEIAQRLRPFEDKIVRLDAITGVGQRTVEVFLAEIGTDVLRFPSAAHLASWAGLCPGNNESAGKRKSGKTGKGDVWLRAALTEAAHAASHTKNTYLASQYQHLAPRRGKNKAIVAVAHSILRIVWHLLDHDCEYMDLGSRYLEDRDRQQIERRLVRRLENFGYKVKLEPTAA

SEQ ID NO: 513610 - protein, 419 aa, unidentified
MSKARKRMRVKSHQLTVGIDIGKYHHVAVGLAGDGRFTKPMKLPNTREGYEQLLLRIMAWKKEYGADEVLVGMESTGHYWEVPARWLTAHSIPVVQVNALHTKRAKEIEDNTPGKTDPKDARIIAQLVAWGKYLDCHLPDGAVAELRQFVRQRSTLTNELTEKRNYLRYLLDCVFPELFTVFKKSSGKTLLHLLALCPSPHELIGADQADVARTLRQHCPTGAAKRLDRVYALARITVGIAPARHAYAVAIRRTATRILALREEKAEVEQQMTKLLIELPEAGSLLSVKGIGPVSAAIIVGETGGLHRFGHAEEVIKLAGLNLFEVSSGTHKGTVRISKRGRPLLRQILFVLATIQAKKGMPFHACYEELLNKKMPRVKALIAVARKMVRVLFALVRDGRCYQDEKPAALKMGRSSRYP

SEQ ID NO: 513611 - protein, 411 aa, unidentified
MEAAVITAVGIDVSKSKSTVAVRRPGGEIVLRPFDVRHTNSDLKKLTSTLKKLGGDIRIVMEHTSTYWRPIALTLKEAGFFVSVVNAMLIHDFSDNTIRKLKTDRADALKIANYALTFWDTLPPFNNEEETRLLLKMQSRANERITATATALRNGLIALADQTFSGVNIAFAPNTKNANGHEKWVDFFLRYWHKDCVCQYSMEAFTESYRGWCKRKNYKFRTDTAHKIYLLAQESVATLPKCESTKMLITQACKSLNAVCEAKQSTQLEIQRLAAMLPEYEVVMQMEGAGPVTGPALMAEIGDVRRFKNKKALVAFAGIDAPPFQSGAFESKSRHVSKRGSPHLRRTIFIVSNIILARSNPENAVYCFMDKKRSEGKHYYVYTVAESAKFLRVYYARVTEFLRFQPSSDAC

SEQ ID NO: 513612 - protein, 469 aa, unidentified
MKKHRQTKTKSETSKPLHEPEPDAAGIDVGANEIWVAVAPDRTEQPVRRFGAFTRELKAIVQWLRNCGIVTVAMESTGVYWIPLYQLLADAGLKVCLVNARHVKNVPGRKSDVRDCQWLQYLHSVGLLRASYRPEQAICAARSIYRYRQNLLSQAAQHVQHMQASLDQMNIKLHHVIDDLTGRTGLAIIEAILDGERDPQQLAKHRDHRIKASEQTIVKALEGDWRSEHLFVLRVAWENWKQAQQQIQKCDHQLLEYTRQLEASTTLTRPIKIMRLSTEVTDPHLLARPSKPRKKLSKNEPPGPWREELSRFFGVDLTAIPSISVLTGITLMTELGNDLGAFKSAHHFSSWLCLCPDNETSASKVLRRATRRSQNRVRQALRMAASSLHHDKSYLGDKYRRLRAKLGAPKAITAMAHQLARIIWHLIAHRVPFDLTIFAAYEKVNQTRRLKRLSSAARQMGYQLTPIAT

SEQ ID NO: 513613 - protein, 362 aa, unidentified
MPQSSDHSQPDGPPEVILGVDTHKEFHVAAVLSQLGTVLGTRSFPTTIRGFRRLLSWSRGFGVVGRAGVEGTGTFGKALTRHLRTAGIVVIEVNQPDRADRRRRGKTDTLDAEAAARAVVSGRATATAKSSDGPVEMLRLFKLAKESAIKSRTQTINQMKSVVISADPELRDELTAMTTAKLVRHCASLPDQPAIDVSTAARYTLRLLARRVQELSSQITDLKRCLTVTVTRHAPTLLDQKGIGPDNAAQLLITAGDNPDRLHTEAAFAALCGSSPVQASSGNTRRLRLNRGGDRAANSALYLIVITRLRWCPRTRDYVTRRTTEGLSKRDIIRCLKRYIARDVYKIITQPRQPPNPLPIAA

SEQ ID NO: 513614 - protein, 332 aa, unidentified
MEHCAIDLGGRKSQLCVRSQQGQILSEFVVATSALPETLREMPRCRVVMETAAETFRVADAALACGHEVKVVPSTLVRALGVGARRTKTDQRDARALSEASCRMELPSVHIPSWRSREWKAICGVHDVLISSRTKMINNVRGWLRGQAKRPRDGAAATFAERVRKLKLATPAHIETELRLIEILSEQIRASEARLEEMAGTDPVCARLMTVPGVGASTAVRFLAALDEVTRFPNAHRVEAYLGLAPGENSSSERQQRLSITKAGPSTVRWCLVQAAWVLRTCCRNAGARPLQEWALEVEKRRGSRIATVALARKLAGILYALWRDGTTYSAH

SEQ ID NO: 513615 - protein, 324 aa, unidentified
MSVEVGAAPPDADGLRMLAARLGRHQQPIRAAIESMNGARFVHDQLELEGWEVEIADAVKIKGLAPLACKTDRIDAWVLAELSRRELVPAIWLPDPAVRAERERARFRLHLVRHRTSLKQRVHAVLLAHGRPCPVSDLFGASGRALLARLELPEPWAGSVEASLYLIDELEREIDACERELRRLGAEHRYVPLLTTVPGIAWVLAYTIAAEIGDIARFPSPTKLAGYTGLCPRVYQSGEHDRRGPLVKQGPKYLRWALIEATTHACKHPAYQERYQRTKARLGKQRGAKVAQVDLARRLAEAIWHMLTRDEPFAPAGATCPLAA

SEQ ID NO: 513616 - protein, 298 aa, unidentified
MNVTTIGIDLAKTVFSIHGTDQHGKVVVRKRLNRPKLLAFFAQLPPCLIGMEACSGAHYWAREMTKLGHDARIIAPRFVAPYRKSSKNDDNDAEAICEAVSRPNMRFVPIKTEDQQATLSLHRIRRGLTKERTAQINQIRGLLAEFGLIIPQGRYAARRRVPEILEDAENGLPMLARRLLNNINQRILQLDEEILAYDREIEAMARRDEQAKRLMAIPGIGPQTATALLASAPDPRQFKSGRHFAAWLGLVPRQYSTGGKPRLGRITKRGDKYLRTLLIHGTRAVIATIDTKEDRLSA

SEQ ID NO: 513617 - protein, 354 aa, unidentified
MHNRQNYLYVGVDLHKEHHTAVMINCWQEKLGEIQFDNKPSAFSKFLLKVETYVCDGITVVFGLEDVGGYGRALAKYLVDHEQVVKEVNPALSFLERKSQVMIHKNDSWDAECVARILINKFNQLPDAKPNDLLWSIQQLVSRRNALVKAQSALKNQLHIQLNHHYPSYKKFFSELDGKTALAFWQQYPSPSCLEGANIKQLTAFLLDVSNNTCSVKKASDILKLVKEDGHTMKEYQDTRDFLVRSIVREIEFKKKEMKYIEKELKQLVNLLDYQLETMPGIELVTASALIAEIGDIRRFLNANKLARFAGIAPVYFGSGGKDKTHKSKQGNRALHALFYNLAVQQVQVAKGSK

SEQ ID NO: 513618 - protein, 347 aa, unidentified
MDYYAGIDVSLEASSVCVVDGAGKILREAKIASEPAALIGWFASLGLDLARIGLEAGPLSQWLYAAMKEAGLAVELLETRHVRTALQTMPVKTDRNDARGIAQLMRLGWFRPVHCKSMAAQETRALLTARKLVQSKLYDIEMSLRGILRGFGLKVGPTTPKRFARRVEELVAGHSTLEVIAKALLSAHAALLRELDMFEKLVRAMARRDKRARLMMSAPGVGAIVALTYVSAIDDPARFSSSKRVGPHFGLTPRKYQSGETDVTGRITKIGDAGVRTALYEAANVILTRPVKGAGLKSWAMKLARRAGMKKAKVALARKLAVILHRMWIDGTAFDARKAAFAGVAAA

SEQ ID NO: 513619 - protein, 318 aa, unidentified
MSHGYDKFVGIDISKDALDVHGLPDGSPSRFDNTAAGRAKLLTLLPSAGACLTVVEATGGYERELVAEAVTTGHHIAVVNPRQVRDFAKALGLLAKTDRIDAAVIARFAETTRPVPEGYDERQEQLRELIVRRRQLLDHRTAEKNRGEMAHSPLVRKSVLKLIEMLNKDLKRIEKAILQLVESNDDWRGRYQRLTSVPGVGEQTAATLMAELPELGRLNRQQVAALVGVAPFNRDSGQFKGRRAIWGGRGSVRNVLYMAALSAKKHNPVIRAFAARLLAKGKPPKLVLTACMRKLLVILNAMLRSGESWGQRIATLTP

SEQ ID NO: 513620 - protein, 357 aa, unidentified
MYSIGVDFHKAYSHMTVMDAQGQVVRVGKVSNTVEAVHAFVAPYRDDAQAVLEATRNWTVMYDMLEQELRAVYLAHPLKVRAIAEARIKTDRIDSKILAHLLRCDLLPTAYVRPREQRVSQQILRQRMFMVRVRTMVKNRIHVLIDRQLDVREVAMQFSDLFGGAGLAWLRTVGLADIERRLLNAELALFEAVQERIAESDSLVRNLAAGDPRVRWVRTIPGFGRFFAVLVVHEIGTIRRFSTPEKLSAYAGLVPSVHASGGKVFHGRLTKQGNKWLRWAVVEAVRPAVTTDPDLRRYYERLRQRKGPNPAKVATARRLLLLAHRVLSQERPYRKPESVTMRPRPRTALMNPLPAAG

SEQ ID NO: 513621 - protein, 477 aa, unidentified
MARTSALNRKQRKALARQLRSDDPGLEVMHPHAAGIDVGNSAHYVAVRPDRDPNSVRRFECFTADLHRLADWLQQCGVMTVAMQSTGVYWIPLYEILDARGLEVYLVNARHTRNLPGRKSDVQESQWLLKRHTYGLLRNSFHPPADIRVVRTFWRQRGDHVQAVSTCIQRMQKALTQMNIQLANVISDLSGWTGQRIVRAILDGERDPQKLATLRHPGIHATQDTIAKSLEGTWQPDLLFVLQQEVAMYDAYQQRIVECDQQLEQHLKQFADKAADTVPADEPSSTTSHARLRSGPKRRRKAGSHTPQFDLGHELHRISGVDLTRIDGIDVGVAQTLISEVGLDMTRWKSEAHFASWLGLCPDNRISGDRVLRRGTRHVVNRAATALRLAATTLLRSQSYLGAQYRRLRARLGAPKAITAMAHKLARLVYRMLTWGQEYVDKGLQYYEDRHREQQVQLLKKKAAKLGLQIAEPTAAA

SEQ ID NO: 513622 - protein, 386 aa, unidentified
MYFVGIDISKYKHDCFICTETGEVIEEHLSFTNTNEGFNQLLNLLKSLDNSQEIRIGFEATGHYGMNLKLFLEKNNYSFMEFNPALVKRFISTQTLRKTKTDKKDAFQITKYLISVDYKLHPKQFYHKYSLKSLSRMREKLVKQRSYYEVQITNVLDIIFPEYKPFFNNVFSKTSLYILNKYITPDKIKNMKDFDSIRKISRGKFTSANFIKLKELAKNSIGISNDIFETELESLLILHAQIEVEINKLETKIESIIKELNPPILSIKGIGTISCAGIISEFGDITRFKSADACVAFAGIEPSISQSGTESHTGHMVKHGSGHLRYFLMNAADYVFMHESIFSEFYYKKRSEGKSHRVALTHVAKKLVRVIYKLESENITFNSNIN

SEQ ID NO: 513623 - protein, 401 aa, unidentified
MTTYLLRNVSKVQPQQPQPKPATAAAISGGPILFIGLDVHTDSIAVSLAPSDSAEVRRYGIIGGTHDDVLRLAKKLQTAHPDCRLRFCYEAGPHGYPLCRFLHARGYECILISPSKLPRKPGERVKTNRRDADQLARLYRAGELTGIYVPNAQDEAVRDLVRARYQAQRQQHRARQQLKMFLLRHNLRYAGTKAWSPAHLRYLATVKMPFPEQQFVFQEMVNVITEAGQRLERYEVQITRVIPGWRWEPVVRALMSFRGLAQLNAVTLVAELGDLHRFATARQLMGYLGLVPSEDSTGDERRQGGITKMGNGIARRALIEAAWNYRSPARIGRELLKRQEGLAKEVTDLSWKAQTRLHHRYKFLTGVKHKKSPVAAAALGRELSGFVWAVGQIVSPHPLKP

SEQ ID NO: 513624 - protein, 384 aa, unidentified
MQKPNDLNQSRIVLKQDSTLIAVIEMSLSSWLVAGIVPGVERQPLKKLAVDESALLKLLNRWREEAEKAGRRIERITVAFEAGRDGFWLARWLRARGIEAHVIHASSVAVSREHRRAKTDRLDTELLKRAFLGWLRGERDHCKMVAIPTTKDEDAKRPNRERQSLVGEQTRIVNRMKAALIRLGIRGFNPKLKKAAGRLENLRTPEGEPIPPNTLAELHRDMERRRLVSDQIRQIEKARLERMEQAPGDGPHPMVRLIARVIGVGIETADMLVHEVLSRKLRDRRAVARYAGLTGAPDESGSKRREKGLAKAGNARVRGGMIQLAWRFLLFQKDSALAQWYRTRTEGGRNRKTIIVALARKLLIALWRLVTTGEVPAGVVLRAA

SEQ ID NO: 513625 - protein, 337 aa, unidentified
MKVTLIGIDLAKNIFQVCGVNQAGKRIFNRQVRRAKLMALLIQHPDATIAMEACSGSNYWGRELKQRGYQVMLIPPQHVKPFVKGNKTDRNDAFAITEAARRPNLRCVEPRTLAQTDMIQVHRVLDRMIRQRTALINQIRGFLSEYGIVVARGKKKLLAAIPGLLEDAGNGLTPSSRALYQAMYDDWRQMNKSIDRIEKVLEGQANTDEAAQRLMKIRGVAKKISTATIAHAGNGHGYKNGRHFSANLGLVPREHSSGGKQQLGGITKRGNRYLRRLLIQGAWSVIRNADKNDDRLSRWARQLVERRGNHKAVVGVANKMARIMWSMLYHQTEYRAY

SEQ ID NO: 513626 - protein, 364 aa, unidentified
MTIQNNFDGFNSLFNSISQFNESFENIKVGLEATGHYSNNILNFLTSKGFNVYVINPLQTNLYRKGQSLRKTKTDKLDARFIATMLISENLKSYSNLSYHISELKSLVRHRFRLVHERSKFKTSLSRLVTIIFPELEKIVWSISQNSVLYLLNELPSVKQISECNLKHLTSILEKYSKGKYSRDKAIEIRELARKSIGTNSRSLSFELKQVIQTVLFLQSQIDDIDKELKTLVNELNSPIMSIPGISYVSAAFILAEIGDINNFDSPAKLQAFAGLDPFTYQSGKYTATHSVMVKRGSKYLRWALLNATRLVCMRDKTFNDYKNSKLAEGKHYFVALSHTSKKLIRVIYYLLKTNKSYQPSKVA

SEQ ID NO: 513627 - protein, 430 aa, unidentified
MNDSNVIRLAEFCQFKKEIRGSTEYLIVGLDIAKERNNAFFGTATGKTLHKGMFFDNTYEGFQKLLIQTDALKVQHGLRKVVFGLEPTANYHKPLGEYLIKGGHLVVLISAAATPKNRELLDGRWDKHDTKDSANVADLISQAKCMYYDCPGEDLRSLRGLLSLKKRLKKEEHGLRVRIRNQLLAQYFPEMDQHFGSLASLNVVQRCLDPSLISIMEYDEFCRTVAPGKVTMAQQRRLTQIWRVAKQSIGCIVGEAVSVEAQIMVTGLHRVRETIKIIDDKIEDICLKFPEYSFLLMIPGFGPDVSSKVLAAIGDPERFTSGKQVLKMAGFDLCANRSGKTSNSATPVISKHGKADLRYALYQAALISSLTNKDFMNYHTNKIKGREREKGIGTKMRVKLAAKLLIIAWTLMKKKVPFDPNYLHQEDGKV

SEQ ID NO: 513628 - protein, 314 aa, unidentified
MSTNIIDTVCVGVDVAKDSFQVNNQQQTCLLRNNSRGHQKLIQQLKGLAAPVLVVCEATGGYEQGLVTALHEAGIAVAVVEPARVRHFARACNLRSKSDRIDAQLLAQFGRQTKPRPQAPPDKSTLALRELGRHRVQLKEILQTALQQSRHLTLPVLRRDQALLVRRLRGHLRKVEQQMDQLVHQDQIIARKAEALQQVAGVGPTTAMSLLAEMPELGTLNRAQAAALAGVAPYVRQSGQWQGKRYIGGGRPLARKALYMAALVASRYHDSFKLFYQRLLQRQKPPKVALVAVMRKLIILLNSKIKYLHSPLAT

SEQ ID NO: 513629 - protein, 391 aa, unidentified
MSMYFIGIDISKYKHDCCIISAADQKVVSKVTIKNNKAGFDELLTIINSLSNPEDIRIGFESTAHYALNLELFLENSLLTFMEVNPVLISVYKKSKTLRRTKTDSVDCESIARWLMTVEYKPHSKGFYHAYSLKSLTRLRDKLIRQRSFYLVKITNVLDHTFPEFKPFFNERFSKTALYLLENYGSAEKMARMNSASYEKLRSLSRGKFSPQQFLKLKALAANTVGVNNSIFDVELNSLLSLYKSLTKEIDTIEKEINKLIEEVHPHYMSIPGIGSLSAAVIYSEYGDISNFSNPGQMLAFAGIEPGVNDSGTESHGGRMVKRGSSQLRYTLINCCLPLIRFDMTFATYYSKKRGEGKPHRVAITHVAKKLIRVIYALERLDIDFNTQKLH

SEQ ID NO: 513630 - protein, 416 aa, unidentified
MDARETYKVAGIDVHKKMLAVVVTDAAAVGEFQFERQRFGAGSAELKKLGEWLTEQGVEEVVMESTAQYWKPVWQSLEEQFELQLAQAHSNRAPQGRKRDFTDAERLVRRYVAGELILSFVPGAEQRMWRMLTRTQKQLGRDRVRLQNQLEGYLEQIRIKLSSHVSDLLGLSARRMVQALAEGETEPGKIAALAVKGLRAGRGELEDALSAARALSTLQRGILKLFLERLDLLDRQIETLQKQTAEALREHQDAVCRLAEVPGLGAGSAHQIIAEVGPKAATFPSAAHMASWVGCCPGREESAEVSASDRSPKGNRNLRHVLAQAANAAVKAKGSVFEVRYRRLVGRLGHFKAIWAVAHSICRIAWKILHEGVRYEERGLRTNPAAVRKTADRLVRMLRRLGYDAQITPRTGDATA

SEQ ID NO: 513631 - protein, 465 aa, unidentified
MAKKAQKIKKGKRSELLIVNPNAAGIDIASTEYQVCVPEDRDTEPNRRFEAYTCDLHSIGQWLKQCGIDTVAMEATGIYWVQIFMVLQEYGFDVVLCNAKHIKNIAEKKTDYVDASWIQLLHSYGLLRESFQPDSQIRQLKDLMRHRERIIQSMSQDILRIQKALEMMNIKVHKVLSDIKGKSGLNILEAIIGGERKPSALAVLVHHSVKATREEIIKSLEGNWNDAQLFILKQSYECYCFALKQIEELDQSIKQLLIAYAYVAGGSKNNKPIERALKRKSVQGNALHFDAEQYSYDILGVNLSRIPGISSLTSIKLISELGRDFTTKFPSNKHFCSWLNVVPNNKISGGKILSSNVPKRKNFAGQALRVAANTLSKSNGYLGDYFRRMKSKLGHNQAIIAVAHKLARIIYQMVKEKVEYDESIDRLKNVNILENKRKSLQKRLAKIEAELNLSACSTGKLILVR

SEQ ID NO: 513632 - protein, 419 aa, unidentified
MTQSDNSKIIGIVHPICCGLDVHKESISACVVYVDTDGADQYDVETFGTFTDELMRMRSWLLEHECPVVAMESTGIYWRPVHNVLEGSFRVILVNARDIKNVPGRKTDIGDSKWLAGLLRHGLLKASFIPPQAVRQWRDLTRLRKKYVQTVGDYRKRTHKLFESANIKIDSVVSDLFGVTGRNLMQLLIKDQKPLALSDIEACVRGKLKGKEAELFRSIQGFFTNHHRFVLKTILETISGLEAQIVALDQQIHSVMAEHSPLLERMKKAPGISDVSACDILAEIGPTLESFPTDTALISWCGLCPGNNESAGKRKSGKSPVRKHHLKTIMIEVAWAAVKKKGSYFKDKYYRLKARRGAKKAIVAIAHRILLGIYHVIKDGVEFRDLGEDYLKNRNQSQKVFNLRKQAQALGFDLVQKAA

SEQ ID NO: 513633 - protein, 360 aa, unidentified
MSQNRTFVGLDVHAWSVTGHALDGLTGEVWQRKLTPDPADVFSWLQGLPQPVKVVYEAGPTGYGLYRHLNDHGVRCVVTAPSKLHRPHGDRVKTDARDAELLARLLKLDEIVEVTVPSVGREAARDLVRAREDVRGDLMRARHRLSKMLLRQGIVYTGGNPWTGVHDTSLRSQRFDHTGQQLAFDSAYETMIMTGDRRDRLDAAIVAMAADSDYTAVTRRLCCLRGVSTLTGFGLAVEIGDWTRFTGSTIGAFVGLVPTEHSSGGSRSQGSITKTGNTHARRLLVEAAWHHAKPYRVPGKTMRDRWEQAPAEARLRGHDGNRRLHQRWQTFTARKKKPVIANVAIARELAGWAWSLAVME

SEQ ID NO: 513634 - protein, 416 aa, unidentified
MKKRSYRAQKVNEVRWEEVPVRVKDKTVVWALDVAKVEQYGVLMDSEREVVVTVKWAHPAETPTVLDQLRGLPCGSLTAVMESTGVYGDTLRRQLREAGMEVHLMSAKRVHDACEVYDGVPSLHDAKAAQVIGRLYFEGASRVWVEASEQQRSHDAIGRLYRLCQKQHQQQQNRLEAALQRHWPELTGYLDLDSVTLEDLLLSFGSPAELSARAEEGRERMRRVSRGKLAAEKIEAVLNSARQTIGVPCVAAEREYLMALGAELRHSREQKERVGLRLSALTQADPELHALGVTIGKVTTGLLIAEGLDPRAYANSGSYCKALGLNLKERSSGQHKGQLKITKRGSGSARRDLYLATLRLIQRNEIVKTWFENKVKSNGGRNKQRIVVALMRKLSRALWYVARGQAFDARRLCAVG

SEQ ID NO: 513635 - protein, 345 aa, unidentified
MELHTIGIDLGKTVFHLVGLNLRGEVVVRKMFSRIQLLRFTANVRVGLIGMEACGGAHFLGRALREQGHEVRLIPAQYVKPYVKTNKSDYIDAEAIAEAVTRPTMRFVPIKSDDQLDLQSLHRVRERWVMRRTAVINQIRGLLLERGITLRKGRCHVDATLPLILEDADAKLSGAVRMLLAQLKLDLDQLALRIDEADAVIQKTAHENEACRRLVAIPGIGPVTATALIAAIGNGGAFHKGREFAAWLGIVPREHSTGGQQKLLGISKRGNSYLRRLFVQGARAVLQQRTKQSSGLSAWLAQLISRSHRNVAAVALANKLARIAWAVLAKNEQYRPPVLANTAAA

SEQ ID NO: 513636 - protein, 439 aa, unidentified
MAHAKKIRKITPHAAGIDIGAEKIFVCVEGQPVRSFDTFTATLHQARDYLLEHAIETVAMEATGVYWIPLYEILEAAGLEVCLVNGAHVKNVPGRKSDVMDCEWIQELHSYGLLRASFIPDAEIRRLRCYVRLRQDHIEMAASHIQHLQKALDLMNLKVHRVISQIQGKSGLAIIEAIVSGERQAEVLVELCDRRILNQKREAVIASLEGHYRAEHVFALKQALECYRFYQEKLLECDRMIEALLEEMTAEMAVPDVVKPPKAMRHNAPAIADLHVRLLQLTGGQDLAHLVGLTDHTVLKLLSETGTDISKWPSEKHFTSWAGLAPGSDQSGKRRRRRRRRHKNRVGQIFRECAQAVGQSKHLALGGFHRRLRARRGVRVATVATARKLAVLYYRMLKYGFAYVEQGLQAYEQQYQQQQIRYLRKKAKALGFAVVAATG

SEQ ID NO: 513637 - protein, 312 aa, unidentified
MIEQCFGGIDVSQDRLDVLLLPQGTGFSVANDEAGWSTLIGRLRGLLLTAIGLEPSGGYERGVLRALLAAGLSVRRINPNRLRQFARARGALAKNDRLDARLIAEYVATMPTHVVRHDPAAARIAEIVTMRRQLCDEHVAIENQAAQLEDAMLRRLAKRRLARIETDIRLLEKRLTETIAAEADLARRYARLTSMPGVGPVLAFTLIALLPELGRMSRKQIAALVGLAPYDFDSGKLRGHRSIYGGRMPVRNVLYMAALSACRYNPALKTFHNRLAAAGKKPKVILVAVMRKMITTLNAMLRDGAGWQPHAA

SEQ ID NO: 513638 - protein, 433 aa, unidentified
MILIREVADAPVIMGISKPAGLKSPCGEVKIMNPLFVGIDVSSRNNVAYLMKPDGSKHSSFSVQNNLGGAKILSERIVSALESVPLSDLVIGLEATSIYGDSLVYALREDGSLGRFQRKIHVLNPKQVRKFKEAYPDLPKNDWVDAFVIADHLRFGRIAKEVYMDDYRYQALRTLTRSRFDIIQNLTREKQRFANYLFLKCSGIAQAKDIQNTSATTIALMERFETVDDLANADLDELTAFIAETGRGRFADPDAAAKAVQAAARGSYRLPKTVNDTVNQAMAVSIASMRALKEQVKVLDKAIEQQFEIIPNTLTSIPGIGKVYSAGIIAEIGDIHRFDSQASVAKFAGLVWHRNQSGDFEAEHSQMIKSGNRYLRYYLLEAANSVRRCDSEFRRYYDLKFKEVNKYQHKRALALTARKLVRLVFRLDRKSVV

SEQ ID NO: 513639 - protein, 424 aa, unidentified
MRSIGLDVGRQFAEAAAIEPGGEVHRLGRITASPAGLRAFAAGLGPNDAVVLEATANTWAIAELLAEHAGRVVVSNPLRTRAIAAAKTKTDQIDAATLAQLLAADYLPEVWQPDAATQALRRMVAHRAGLVRGRTGARNRVHAICARRLLSAPVSDLFGVAGRAWLDKLVLEPDERLALDAQMRLLATLEVEIDAAERAIAAHVLDDRRMRHLLTIPGVGLATAASLVAVIGDVGRFPRPHKLVSYLGLDPRVRQSGARPAFTGHISRAGQAHARGLLVEAAHAAVKVPGPLRGFFVRTRGRRGTGVAIVAVARKLTVLAWHLLTDDVDYRWAPAVRSAEKLRRLELLGGASKRFDLRGRREGVKARRAAELVRERVVLEQAEAAYVALVAARRGAHKKDAAATNGERLDGPALNGPGPAARRS

SEQ ID NO: 513640 - protein, 334 aa, unidentified
MEKITTAGIDLAKRVFALHGVDGAGRVGLRKTVRREQLMQTVAALPPCLIGMEACSGAHEWARRFQELGHTVRLMAPVFVAPYRKSGKNDGNDAEAICEAVSRPNMRFVPVKSAEQQAILALHRVRQGWIEERTATINRLRAVLTEFGVVLPNRAQYVRRGAMVAAEGLPALARRALEDLRSHLGTLDERIAAYDRELQAQARQSEAAQRLMQIRGIGPITAVAIVATVGNARDFRSGRQFAAWLGLTPRQRSSGGKQRLGHISRRGDAYLRCLLVQGARSVLLTATRHSDRLSRWVLSVQARRGYHKALVATAAKNARIAWALLSKNQTLRAA

SEQ ID NO: 513641 - protein, 415 aa, unidentified
MDLVHPRCAGIDVSKRDAKVCVRVAGQGRAGATSTVTTWGAVTNQVLALRDHLIAAQVTLVVMEATSDYWKPFYYLLEDGPFEVMLVNARHVKNLPGRKTDVSDAAWLAQLGAHGLVRGSFVPPEPIRQLRDLTRTRTTIVRGRAREIQRLEKLLEDAGIKLSSVASDISGVSGRAMLEALIAGQRDPVVLADLAKRRLRSKIPGLTEALTGRFGAHHGFLAQLHLDLIDQHSHAIAELSARIEVVIEPFRRFRDLIITIPGISTAVADVVIAETGADMTRFPSAGHLASWAGTCPGSNESAGRVKSTHTRPGNPYLKGALGIAAMSAARSKDTYLSAKYRRIAARRGPIKAIVAVEHAILIAIWNMSTHDVGYVEPGGDYYLRRNPDKTKNRAIDQLHKMGYAVTLSPLQTDTP

SEQ ID NO: 513642 - protein, 373 aa, unidentified
MVDDSEAFVAFDTSKLRNAVAIAEAGRAGEVRFVGEFENHAAATAKLVRKLAGKYARLTFCYEAGPTGYGLYRQIKSLGHDCMVVAPSLIPQRPGDRVKTNRRDAVSLAKLLRAGELTAVWVPDERHEAMRDLTRVREAAVADLRSKRQQVVAFLLRHELRYGGKQAWTKAHMGWLAGLKLAHLEQRIAFEEMLLAVRQAGERIERLEQALRAAVEDWSLREVVTALMAMRGMDFISATAFLAEIGDLSRFQTPRQLMTYLGLVPSEDSTGEKIKRGPITKAGNCRARRVLVESAWSYQHPPRVGKDKQAKVAAAPPAVQAIAWKAQCRLCARYRSLIRRGKLKTVAVTAVARELAAFIWAINRELTTARAVS

SEQ ID NO: 513643 - protein, 350 aa, unidentified
MAIIGCDLHTRYQQIALLETTTGEIVRRRLEHEDGEAKDFYAKLAQPSLIGIEATGYTQWFERMLGELGHELWVGDPAEIRARAVRRQKTDSRDAEHLLDLLLTRRFPRVWVPSAEERDLRQLLKHRDKLVRMRTSVKNQLHFLAMSQGMCRKRKLWSARGRQELEKLALGPWASRRRQELVEMLDRLGPQIKDLEEAVRTEAERRPEVLRLMKRKGVGSVVALAFVLTLGPIERFPNSRRMVSYLGLNPSEDSSGGHQRLGAISKQGNEMMRWLLVEAGQSAAQFDPELRRKYQRLKFRRGGKVAKVALARQLAVRLYWTLRHASPATPPLRMPGSPAEPMVDVSPSTV

SEQ ID NO: 513644 - protein, 387 aa, unidentified
MQKPHDNSKASPAAFMQDNTLIAVIELSLSNWLVAGLIPGVSREPLKKLEPNPEDLLKLLHRWRDEAIKAGRPITRIAVAYETGRDSFWLARWLRKRGIDAHVIHATSVTVSREHRRAKTDRLDTAMLKRGFLGWLRGERGHCTVAIVPTMEEEDAKRPHREREGLVHEQTRVVNRMKSALIQFGVRHFNPKLRKASVKLETVLTPEGKSLPPNTIAALRRDMERLKIIKEQIKAIEQARLQQFEQKPEALANRMVYLLVRIYGLGLETADLLVHELLSRTLRDRKAVARYAGLTGSPDESGSKRREKGLSRSGNARVRKIMIQLAWRMVKFQPDSALVQWFKQRTENAKRSRKPMIVALARKLIIALWRYANDGVIPTGFRLHSAA

SEQ ID NO: 513645 - protein, 359 aa, unidentified
MFNNSTFFIGIDLGDKHSFVTILDSEGELVEETRLPTTRTAFQRKFSSIPACRIATEVGTHSRWVSHLLKDLGHDVLVANARKLRAIYHNPRKDDRTDAETLARLARLDPNLLSPIRHRSPQAQADLAILRSRYALVRSRTLLINHVRGVVKSSGARLPSCSADCFTQKVSPDIPEPLQPALMPILDTIAALTQQIHSYDRQIQDLCKERYPETLLLQRISGVGPLTSLAFILTLENPNRFHKSREVGPALGLVPRSDQSGDHDPQLRITKTGNAFLRQLLVGSAQYILGPFGPDCDLRRWGLQLADRGGKNAKKRAVVAVARKLAILLHHLWKTGEVYNPFFLSRLHAEQPDIVTVAA

SEQ ID NO: 513646 - protein, 388 aa, unidentified
MQFAAAQPQAPTAIRTDLGAIFVSLELSRSTWLITSLSPGGGEKLSKHSVRGSDVAGLLERFAHLKEKARARTGEAFPIIVIQEAGLDGFWIHRVLQSEGIESHVVDPASIATSRRRRRAKTDRIDGEALVRALLAHKRGEPRVCAMVKAPTPQEEDRRRVCRERKVLIVERVQHVNRVKGLLFCQGITGYEPLHRDRRERLEELRTGDSRSLPDHLKAQLRRELDRIELLIEQIKAVEAERDALLARDHAVTPAPAAMLVDIKGIGPEFAVILWAEGLFRHFDNRRQVAAYAGLAPTPWQSGSVDREQGVSKAGNPRLRTTLIQLAWLWLRHQPHSALTLWFEERVKRNGGRLKKTTIVALARKLLVALWKYVTAGVVIEGAVLKAI

SEQ ID NO: 513647 - protein, 338 aa, unidentified
MEGIATVGLDLAKNTFQVHAVNAVGEVIVRRALGRSQVLAFFERLPPCLVGSAHYWAQEIGAMGHTVRLMPAAYVKAYVKRNKTDAADAEAICEAVTRPTMRYVAVKGRQEQAAAIILRTRDLLTRQRTQSINALRGHMAELGVIAAAGAKSCGKLIAIVRDDADDRLPAMAREALAEIADQIETLNEKIAALERKIVATVRQDEVARRLTAIPGVGPITAATVRAAVPHPGGFRSGRDFAAWIGLTPRSSSSGGKERLGSISKRGNPQLRSLLVVGAMAILKLSRNGFGMPPWVTALQQRRPFKVVATAMANKMARVIWALMMKGEQYSAPTAMMKP

SEQ ID NO: 513648 - protein, 343 aa, unidentified
MQTVTTIGLDIAKSVFQVHGVDTAGQVVIRRQLKRRSVLAFFQKLPPCLVGIEACASAHHWSRELQALGHKVRLIPPAYVKPYVKRQKNDAADAEAICEAVTRANMRFVPTKTPEQQSGLVLHRTRHLFIRQQTAVINAIRDHLAEFRIVAPVGRHGVEELLNVLADPNDKRVPELARACLSAFGAQLRRIKEQVLEFDRLIRAWHRSNELSMRLDEAPGVGPVLATALVAAVADPTSFRSGRNFSAWIGLVPKQHSSGGKNRLGNISKQGDRYLRGLFVAGALAVIRYAKIHGTKHRPWLTALLARRPTKVAAIALANKLARMVWAMMVKGERYKEPVALAA

SEQ ID NO: 513649 - protein, 370 aa, unidentified
MGPAVEPLLREAPVMNEGSCVGLDVHARSVVAGVIDVGSGEVRSQRVPPGSEAMVAWLKTLPSPVRVVYEAGPTGYGLARACADVGISCVVAAPSKIRPAADRVKTDRRDAERLARLLRLGEITAVRVPGPDEEAARDLVRAREDARGDLMRARHRLSKLLLRHGAVYDATAWTRAHDAWLRKQRFQGGPLAIVFDECYSRMLDAKARRDTLDKAIAELAASEPYVDVVGRLVCLRGVSTLTAFALTVELGDWNRFRPESLGPFLGLTPSENSSGQRRRQGGITKTGNTHARRLLIEAAWHQRSAPRLSITLERRRTGKSLAVRAQADSSARRLHGRWNALEARGKPRLIVVVAVARELAGHCWALATME

SEQ ID NO: 513650 - protein, 449 aa, unidentified
MSKVNGLTRGDVRRNARKARLREMVPVSNAVLGIDLGDKKQALVLADRDERVLWRRSPQVRVHELGQYLDAAADRAARDGLAGVTVACEPTGARWMVVQELAAQRQMPFVCVQPLVSHVAREQQDLTGDKTDEGDCGLVGRLTWELHCYIPEQLDPGWAELRAAGRDRAVQITRATAAKQLIRDQLALTAPGLLEAHSDPLESATWLACLETIMDPQHGGELAAVTAMGWQAFAAAAAARLAGWDGRRLGPTAAKAFAALAGPQPVPRMLRAVRRRIAGALEDLKYARARRARTEAEMITMLGELGIDCERVCQIPGLTPAGLAAILAETGDLHQYESSSSVVKHAGMSPARNQSADFHGKTRMSRRGRPALRLAAWRATWAVLRHCDVLAAKHAALTSRDQDRLADAQARVACAASLLRWIYALIVHGTSWDPKIAAGELSHDHAIAA

SEQ ID NO: 513651 - protein, 436 aa, unidentified
MEEMEDEPLFADRVAGIDIGKKEIMVTIRVPGDSRRGRRRQETREFRAVRKDLLALADWLRTWGVTRVGMEATGDYWKPVYFLLEREGFDCVLYHASQVKALPGRPKTDKLDSVWLAKITEQGSLAGSFVPPEDIRRLRTHTRYRRHLVQACTAEKARCEKLLEDAHLKLSSVITDIHGVSGREMLTAIIAGERDPKVLAQMARTRMRAKIRALEEALDCSFFTSQHAFILKMMLANIDHLEDQVKELTAKITELCEPYARQISQLDAIPGFGVITAQDIIAETGVDMTVFPTAGHLCSWARRAPQVRESAGKRKGKNATGRGNPYLGGALGEAAANAGRTQTFLGTRYRRLVRHMPKKKAQGAISRTQLVITYELLSDPEAEYQDLGTDYYERRANIRREVRSHARAIERRGYKVILEPLEPGLDPGILPVTKAS

SEQ ID NO: 513652 - protein, 286 aa, unidentified
MRFANNAAGIRKLVARLGRLDDPRIVVEATGGYEETLLEACCDAGLWICRANPRQARDFARATGELAKTDAIDAALLALMARLLHERLRRHEAPHPWQRELRDWLRRRGQVVVTLQAQKQQTALTSPAVRQLMARTIAALKRELAAIDAAMQALLKTHASPALRSAKGMGPIFQATSLALLPELGRLSRQQIAKLVGVAPMNRDSGQTTGKRRIRGGRAPVRVALYMATLSAVRWDPVMRAHYQQLRARGKLGKVALVACMRKLLTIVNARRRDELRAQEGDVIAA

SEQ ID NO: 513653 - protein, 335 aa, unidentified
MKHKFIIGCDISKKTIDAFLSNGKDLGLHFKFGNSVKAVKAWLTKSLSEQNIKINQCLVCMEHTGVYNNHLLAVLTSMKVATAVIHPLEIKRSMGFSREKTDKIDAAIIAGYGCRFYDKLKLWKPKRKVIVRLKYLTSLRERLLKVKTTIEVANKEITSFESAGLSNCIDTHTKGSIQAILNDIKSIEVEIDKIIKEDVKLFTLRKQLTSVPGIGIVTASEIIIRTNEFENFTCSKKLACHVGVVPFKQQSGTSLNKRPRVSHQAQKRLKTLLTLGALSAIRNNEKIRNYYDRKVAEGKNKMSVINAIRNKLIRTAFAVVKNNTTYQTNYNINLQ

SEQ ID NO: 513654 - protein, 342 aa, unidentified
MVIIGIDAHKYTHTVVAVDAQGRQRAAKTVATTTADHLALLNWARRHDEELLWAVEDCRHLSRRLERDLLAAGERVVRVPPKLMTNMRDAARSFGKSDPIDALAVARAALREPELPVAHLDGPEREVRLLVDHREDLVAERTRIISRLRWHLHELDPAWQPSARGLDRPRALNQTAVRLEGQPGLVARLARELVERLRLLNAEINELADEITTLVEKLAPSLLAICGCGPLTAAKILGETAGVTRFRSNDAYARHNGTAPLPVWSSNRARHRLSRRGNRQLNAALHRIALTQANPGARAMIARRRANGDGGLEAIRVLKRRLSDVVYQALLTDATAAIAQST

SEQ ID NO: 513655 - protein, 421 aa, unidentified
MKSLTDPEFTAFVGLDWADKKHDICLQAAGCEEREFDRFAHQVTAIEKWALSLQQRFGGRIAVALELSKGPIVYALQKYEFLVLFPINPSMLAKYRDAFTPSGAKDDPTDAELALDLLLRHRERFTPLQPQSEQMRTLAYLVEQRRRLVNDKVRFTNRVGDALKQYYPQALDWFANRDTVLFCDFIARWPTLMQVKRARKTSLVAFFRAHNMRFPKLIEKRICAIKAAAPLTQDGAVITAHKLQAQVLVEQLRVTLKAIDRFDQEIAATAAKLPDYALLFKPLPGAGPVLAPRLLVAFGEQRDRFAGADEFQQHTAIAPVTERSGNKTWVHWRWQCSTFLHQTMVEWAGQTINQSFWAGAYYRQQREKGSSHNAAVRTLAFKWIRIVYRCWQTRTPYDESRYLEALRRRGSPLLKLIGETM

SEQ ID NO: 513656 - protein, 341 aa, unidentified
MNSSKNVVGIDIAKRVFQLHWIDMETGEIVSIQLKREKFLEHFANRQACLIGMEACGGAQHWARKLKAMGHQVKLLPGKAVKGFVTGNKNDRQDARAIWTAVQQPHVKAIAIKTEEQQAILALHRMRSQLVKFRTAQINGLRGLLTEYGEVMPQGKAGVRKGIAEALARLADRLPAMVIDTLREQWARIEKLDDEIATIERRIKQWLKQDDACKRIAEIPGVGPLTATAAVAIMGDAKAFKSGREFAAFAGLVPRQTGTGGRVKLLGISKRGDTYLRTLLIHGARSVLTHAKDPGPWMTELRRRRPLNVAVVALANKMARTIWAMLAHERTYQKEFVSQPV

SEQ ID NO: 513657 - protein, 369 aa, unidentified
MGQCIIYVGLDVHKDTIAVAVAEAGLRGEVREHGKIANTPAALKALAERVARRGRELRFCYEAGPCGYGIQRQLSAVGHECAVVAPSLIPRKPGERIKTDRRDAINLAKLHRAGELTPVWVPDQAHEAIRDLVRARQAAVRSLRQSRQQLSGFLLRHGHHYHRPAWTLLHRRWVASLKFDQAVHHIVLEDCIAAIEAATARRDRLEADIEAALPEWSLAPVVQALQALRGIGLVAAATLMAELGDITRFTNPRQLMAYLGLVPSEHSSGRTRRQGGITKAGNGAARRMLIEAAWSYRFPARISREQLLRQERLAKPIRDIAWKAQERLCRRYRALARAGKLPTVITAAIARELVGFIWAIAKQIPSAAS

SEQ ID NO: 513658 - protein, 456 aa, unidentified
MLLVGDDWAEDHHDVEIMDPAGRTLAKARLPEGIAGLARLHALIAGQRGDDAEQVEVRIGIETDHGPWVAALTAAGYTVYPVNPLQAARYRDRHAVSGAKSDAADAHTLADMVRTDAHQLRPIAGDSPDADAVKVVARAHKTLIWERTRQTQRLRHALREYFPAALDAFDDLDAVDTLELLAKAPDPTAAVRLTRAQISAALRRARRRDVDTKTTAIRAALRTPQLGRPAVVVAAYAATTRAAVAVLATLNAQITALEAQVGAHFRRHPDAEIILSQPGMGPVLGARVLGEFGDAPGRYADAKARKNSAGTSPITRASGRRKTVHARHVHNDRLVDALMLQAQSALQASPGGACLLRPPACPQARPQSRAAPTRQPARRHLARLPEDPHPLRRSHRLVASQSTNCRLTFQLLGCLKERGRSRPWPLLICFYFGFRSPCLCAPKEASGSRLGRSPTA

SEQ ID NO: 513659 - protein, 359 aa, unidentified
MKMAANTSVETNVILGVDTHKDNHVAVALDGLGRHLGILSVPTTTAGYRKLLRWARGLGTIEQAGVEGTGSFGAGLARFLKAEGIQVREVIRPKRRDQYRSGKSDPIDAEAAARAVLAGTATGEPKGADGTLEMIRALRAARRSAVKVRTQASNQLKGMLLTAPEELREELRALSTAKLVSRAARFRPGESPQSVEAATKYALRSVARRYQHLQEEIKELDEQLDRLVQQAAPELLRVDGVSTDTAAALLIAAGDNPQRLKSEAAFAHLCGVAPIPASSGKTIRHRLNIRGNRDANRALYVIAFGRMGRDERTRAYVAKRTAEGRSKREIIRCLKRYIARELYRILVSPLRTTPSFSVP

SEQ ID NO: 513660 - protein, 391 aa, unidentified
MFYIGVDIAKNNHEASIIDSNGKLVSESFSFSNSIRGLEKFQKFISSFSIDFNNCIIGMEATGHYWLSLYSFLIDLEFSCIVINPIQSDAFRKMYIRQTKNDSVDSFVIAQILRFGEFSVSHFSDEDTFALRNLSRFRFALVDEASDWKRKLVAILDQVFPEYSSLFSNIYGVTSKELLSKYPLPEDMISIPADELAKLLSKCSKGRFGIDKAKEIQEKASNSFGIKFALKSFSFQIKQIIAQISFLEDQIFEIEDEISSMINSLCPVITSITGIGDVLGAAIFSEIGDISRFERANQLVAYAGLDVAVKQSGNFNATDTKISKRGSPYLRRAIWLAASVAAFKDPALSVYYQKLRQRGKAHGTAIGAVARKLTNIIFAVLRDNKAYIPNI

SEQ ID NO: 513661 - protein, 352 aa, unidentified
MKQYIGCDAHQRYSVFVTVEESGRAGPAVRVENDRPELRRFLGSLPAGAPVAVEASGGWYWLMDELEAAGLEPHLANPKEAQQRMRGRNKTDKLDATGLAILLRNGTLPEVWIPDPKLRDLRGLLRTRLAMRRLTTFLKNRISAAIRRYGLREDQCSDLFAGKGRVQLSYYIGWLPEQTRHASIQEWELLDEIENHIRTLELRIQERVGSIGHTRLLKTLPGVGQILSATLYLEIGEVKRFPSAAHLASYAGLVPTVHASGGKAWLGHTPPSANHYLKWAFIEAANCVVRHRKKYVLAHVIRLYERLQPPKGHAKAAVAVARHLAEASWWMLTKQQAYREPAPATITSSKNG

SEQ ID NO: 513662 - protein, 330 aa, unidentified
MHFYLGIDVSKAKLDCALRLSNGKYRNKVIDNNPVGFKDLQTWLHKHKVQPVNAIHVCMEATNIYWEAIALHLANLGMKVSVVNPAQIKAFGASRLVRTKTDKVDAQLIAEFAAERDPKAWEAPSKSEQQLRALVLRRDALQAMRTQESNRLGVAQETVRSGIEEHLLWLEEEIKAINKKIRDHINKDPDLKAKKDLLEGIPGIGKSSSASLLSFYADTKRFDNARKAVAFAGLDPRQHESGSSVRGKAKLSKVGHSFIRKAMYMPAVVALYKTTWGIAFYERLKTSGKCNMVIIGAMMRKLIHVVFGVLKSGMPFDVSKHMKVSEKALA

SEQ ID NO: 513663 - protein, 414 aa, unidentified
MDVLIDRVAGLDVHRDTVVAAVRLPGRGGGRRGEVRTFPTTGAGLGRLAEWLTAQRVSLVGMESTGIYWKPVYYMLENSFECWLLNAQHLHNVPGRKTDVADALWIAQLLEHGLVRPSFVPPKPIRALRDLTRHRRTTVEDRTRAVQRLEKIMQDCGITLTSVASELLSRSGRAMIEAMLAGEDDPDVLADLARRRLRAKIPQLREALAGRPLADHQKLLVRQLLAQIDLCDNAAAELDHRIEVMLAPFSELVQRVTTIPGVGRRTAQCLIAEAGMDMTRFPTAGHLASWAGICPGNHSCAGTSKTGRTRQGSTWLRTALTEAAHAAAMTRDTYLAAHYAQIRGRRGVQKAVGAIRHDILIAYWHIVHDNTEYRELGPDWAQRRHGVDAQQERLVAQLEKLGLKVTVEPEKPAA

SEQ ID NO: 513664 - protein, 339 aa, unidentified
MSHSVIGLDIAKSVFHVYTIQADGKVLKKMLRRQQVLEFFANYPVSLIGIEACGSSHYWARELIALGHEVKLLNARHVKAFVKGNKNDFNDAEAIFDAVSRPNVRTIAIKTVEQQDIQLIHRIRQEAVKRRTALVNQIRGLLGERGIVIGQGIHQVRKHLPELLEDAENALTTLSRAAFAEQYERLLELDKEIKRYDQKMGELCKANELSKRLAEVPGVGPMTATIAAADLGEGQHYTNARHYSASLGIVPRQSSSGGKSVLLGISKRGNCYLRSLLIHGARAVLRTCHNKEDKLSLWLQKLIKRRGFNVAAVALANKNARILWALANKNEHYEMPVSA

SEQ ID NO: 513665 - protein, 480 aa, unidentified
MQVATASARTHLLSIPPPCSHPYSEAPRKHYKLQQLLARRHFIQNRFIVGIDPAKARHQAQILSADGLPVGSSFSFAHSFSGFNHHLWKHLYARLPDLAHLKRHRFNECLAFAIETSCNLWANLTDYLHREHACIVLVSPLSTCHARPSKSGDFSRTDAKDAYLIADLARDARFHFHTCYTADQQAMHCLAITYDKLRKSLQQHYARLRASIERLFPELLGVLKLRSRTARHLLGSYLFPEDFLALDVEREAAMLMQISRAQHGRETLLKLQVRARHTIGVSLSQAEQHAERRSVSAWLRLVEALEAEIRETTVHLIRLSKETPYHAQLVSIKGISDLLAALFLAEVRDPSQITHTGQVERLAGLKLYMHDSGTYSGRRRISHRGNARLRWVLYRMASETAKYVPEVRLKYLRRKLNGHTNRNKNLVAVIPKVLALILALVREDRPYEEREATLLEMHRLEAELERKHPSKRHRPARAAA

SEQ ID NO: 513666 - protein, 385 aa, unidentified
MPRYIGLDLHKEYVHGCEWVPDANPGHKERHFRFPNTSASWSRLIAQLTCDCWVAIEVTGSAFEIHDLLSPHAGRVLLANPVELKRLGSGRHTDRSDALRLAKLLATDAIPAVWVPPVPVREVRRLLHYRERLLTHHHRCIYQARAVLRRHGILIPHGADVGRWATEVPETVPLGDRLIFESALRQVAMLAEELAGLDIHIARVVADVPAVELLLTITGYGLIAAAATWAAIGDPRRFIHPKQLTRYAGLDPSVLQSGEEHYQGRISKNGNSLLRTVLVEAAHTVALHDTGALRQFYLRKAKQIGHMKAIVALARKLLIVAWRMLLTGETYRAAKPHLVTRKHRHLQKLSTARSGANGDRVLAALVRQYWNPRVREARSRTKAPA

SEQ ID NO: 513667 - protein, 424 aa, unidentified
MKRTQNEKILQIKNETMVVGIDIGKETHYARAFDNRGIELAKLLKFSNSAQGYKALDDWMQSILQKREKTGAIVGFEPTGHYWFTLGDYLRSKGYALGIVNPFHVKCTRELDDNSQTKSDRKDPKTIAMLVKDGRYRDVYIPADLYQELREAVAERERLQNQLIGISNQVIRWLDIRFPEFSEVFKDWSAKTAIITLKHLSLPAKVAAVGAEGVLAIWQDNLKRSSLKKAERLVQVATGSIGRTAGSEAAEAALQNLLTQYELIEAQRQQIEMLMAELLLRVPHAGKLLEIKGVGMVTAAVIVSEIGNIRRFQDPRQILKMAGLSLKENSSGKHKGKTTISKRGRRRLREGLFRVMIPMLATNEAFRAIHQRNLTREKNPLSKMQSIVALCGKLVRVIYAILTKGCAYDAAKLTYDMNLSMKAA

SEQ ID NO: 513668 - protein, 312 aa, unidentified
MVTIGLDPHPDSHTVAALDENGTTLASLTVSNDTAGLARLHEFAGSFPRYRWAIEGAANRFILPFVSALIAHGETIHHIPPNLTSQYRTRLGRKKNDVVDASNAARALLANPELPVFHPGAGQREFQDLTRTQRRLSEQLKANRMALQALDPGSSARSALTQVIHVLEEQLAELSEQMKKLVKTLAPALLELLGVGPVVASVILGEVGTIERFANEGQFASYCGAAPVERGSGKNSRMQLNHGGNRRLNWALHIIALTRSRCDERTKTLLAKLKARGKTQRASLRILKTYIARELFRHLHQTVTPVLNSGST

SEQ ID NO: 513669 - protein, 459 aa, unidentified
MSQAKKGKTKTSRGASELPVLRPNAAGVDIGATEIFVAVPPDRDPQPVRAFPTFTEDLHRLADWLKACRIETVAMESTGVYWIPLFQILEARGFEVCLVNARYFQNVPGRRTDFSDCQWLRYLHAVGLLRPSFRPTDQVCVLRSLARHRESLIQTAATHILRMHKALDQMNLQIHHVISDITGLTGLKIVDAILAGERDPKKLAALRDGRIKATEETIIKSLVGDYRREHLFTLRQSLAAYRNYQKLIAECDREIEGQLKTFDARVDCKAKPLPAPKVRRHKTFGNEHQLDLRKQLYRIFGVDLTEVPGMSILTAHTLLAEVGPDLSRFPNASAFASWLGLCPDNDITGGKKVAVGTRHVNNRAAWALRMAANALRNSRSGLGDYYRRMRAKLGAPKAITAAAHKLARIIFHLLTTHQAYDETVFARRDEQTRRRTEAVLRTQAKALGFQLIPASQTQA

SEQ ID NO: 513670 - protein, 336 aa, unidentified
MVQIYGIDLGMSSFEVSFLSESGSVRHLSGVKNTVHGISKFLLSLPSAAVLCAEHTGVYGDLLLRLCTLNRICLCFVPGYQIKHSLGLQRGKSDPLDACRIREYAERFYDLLRPCFYAGEEMSELQELYRTRSLLVESRKRLDTLNIGDNCKSSVSLAAVHARRAVLAELNTQISGLDHEIEALIQNSSEFSRNYQILTSIVGVGPVTSCELIIKTENFRKLDTAKKCAAYAGIAPYPKESGKMKCGHKISPMGDKQLKTLLFLCARSAKEHNKEIRLYFLKKHKVEKKHFFVAMNNIANKLLRLIYSLIHKQQTYDRDYIQRDPRCVVISDTHKC

SEQ ID NO: 513671 - protein, 547 aa, unidentified
MYHDKTMGTESAPAGAETDSFPTVPRECGIICDVSVMTAADAPHSIGANCPTCRLSSARPMFNGRAAAGIRDGFLPRQDFTSIPPKPSPCSDRKGQDMARKTNRFEEVRRFVAGVDLAGHADHYVCGPRKDDGTHDVEHFGTTTNELLRMAAWMKERRVESAAMESTSVYWIPVYDTLESAGIEVVLVDTRTVKMVPGRKSDVKDCQWLQRLHSCGLLHGAFRPPERFNAVRSVIRERGNVLQMRTQSIQAAQKALDQMNIRLHHAVSDIDGVTGMRILGAIVDGERDPRVLARLRDKRCRKSEAEIAEELTGNWREEHLFNLKQAYRTLCFLDERVAEYDRQIREMYAKIAEGFPPVDPPPGGGKKPKDKEDAKAKADLARICGGFDMTGIDGIGYDSAASILAELGPDLSAFPTERHFVSYIGTAPSLGKSAGKNVSTRRNHKNTSRVGLTLKMSASSLFRSESALGARIRCVRSRTCSRTAIKDVAREMGKRIYRGLKYGQAYVDEGEQAYMSRTRERTIKSMKKKISKLGISAEELGIYAVAV

SEQ ID NO: 513672 - protein, 361 aa, unidentified
MHATTVAVDLAKSVFQVAIADAHWKVIEQQRLTRSQFERWFHNRDVGLVVMEACGSAHHWGRWLNGLGIEVKLLPAAYIRAYVKRNKTDAADACALLEAARCADIVPVRVKSGEQQALQGLHRIRSRWMGTRTARINTLRGFCREFGLVVPQGARTGVEAMSRALADPNSAIPLLIRESMKLLIEEIRLLELRISQLERELTALARQSPACTELLTIPGIGLLTATAMVAATGGSVSHFKDARHFASWFGLTPKEFSSGNSRKLGRISKKGDRYLRMLLTHGARAVLRAAELARRAGKPLDGLRTWATEIQARAHHNKAACALANKLARVCYAVLRDHTPFGSPQPRQEKKLTRTAFAIAA

SEQ ID NO: 513673 - protein, 422 aa, unidentified
MEKIQTKKIKSVNNKTLIATIDIGKGLNMGYARCPDRSEVKPFEFANNRAGFDKFWSRLVEARNAKELDTIVVGFESTGAYGEPLQHFLKNKPVRLVQVNPMHTKRVKELQGNSPNKTDSKDPKVIADIIELGHALTVVIPEGAAAELRRLTHARERTIKRRSALYNQLQDLVFISFPEFPQVVKDVKTKTARHLLQYYPDPQDIMDLGLDSLGTVIKRVSRGKLGPAKAKDLFAAARASVGITEGRFSVALEIQATLEAIAACDNFIIRLEEEMSRHLEEIPYSHLLLSMKGIGRITAAGLIGEVGDFNNFDTQRELLKHAGFDLFEISSGKLRGCRRISKRGRPLLRKLLFFAALNTIRKGGVMHEHYQRHLAKGMKRIKALVAIARKLLGIIFALVRTGQEYQLNYQELQSHSNMAEAA

SEQ ID NO: 513674 - protein, 406 aa, unidentified
MRVVHERCAGLDVHKSSVVACALLPEGKQLRTFGTLTWQLEQLAEWLRGLSVGVVAMESSGVYWKPVFNILEVAGLELLVVNARHIKAVPGRKTDVKDAEWIADLLRHGLLRPSFIPGREERELRELTRYRRTLIEERAHEVQRLQKVLEGANIKLEEVISNVVGLNGRRFLSALIAGDYDPEAVAATANYGLQRKRELLAQALQGTLGTHQRFLLDQLLSHIDFLEQRVAALDQEVKQRSRPFEAAIARLDQIPGVGIRAAEEILAEIGTDMSRFPSARHLASWAKVCPGNNESAGKRRSGYAGKGNRWLRSILVESAWCATRKKDSYFKVQYHRLAARRGRKRALLAVGHSLLTVIYHLLNDGVIYQDLGPNYFDQRDRSHITRQAVRRLERLGYHVSLTEGAA

SEQ ID NO: 513675 - protein, 344 aa, unidentified
MEHFAGLDVSVKETSVCVVDDAGKIVREVKVASEPAALLAVLMNPTYHFKRIGLEAGPLSQWLFSALAEAGLPAICVETRHMQAVLKAQINKTDRNDARGIAQMMRAGLYRPVHVKTLRSQKLRMLLTHRKLLQAKAIAIENDLRATLRNFGLKVGVVGTVKFEARIKELVESIPDLAELVEPLLVVRRTLREQIGILHRRLLAIVRDDDVCRRLMTVPGVGPVVALTYRATVDMPIRFRNSKAVGAVFGLTPSKHQSGESDRTGGISRCGDEMMRVMLYEAAQIMLVRSVKWSWLKAWAVKIARRRGLKKAIVALARRLAVIMHRIWVDGTEFRWTREKAVAA

SEQ ID NO: 513676 - protein, 291 aa, unidentified
MDHFAGLDVSVKETSVCILDDAGKIVKEVKVASEPQALLKVLGNPIYSFKRIGLEAGPLSQWLFSALAEAELPVICVETRHMQAVLKAQINKTDRNDARGIAQMMRVGMYRPVHVKTLRSQKLRMLLTHRKLLQSKAIAIENDLRGTLRNFGLKVGVVGTVRFEARIQELVETIPDLAVLVGPLLVVRRALREQIVVLHRRLLAIVRDDEVCRRLMTTPGVGPVVALTYRATVDVPARFRKSKSVGAVFGLTCSRYQSGEIDWSGRISRCGDEMMRVMLYEAAQSMLRSKK

SEQ ID NO: 513677 - protein, 400 aa, unidentified
MRTVFGIDVSKASSEVAILVNGERVHGYTMPNDIIGFSRLLEDLKTVSNHEIIFEATGVYSRRLQAFLEENSYDYTRLNPLEAKKQLDGLRVRKTDKIDAEKLASSQFVLNRKPTYVQEEVYQNLHDLSRFYQNLTEDIVRTKNRLHKVLQVAFPEIENLLSTPTGEQYWNLVSIFPTKHWVLELSEVELKEAIRNSTSKRISENRVGNLTEKLVGLAKQSYAGISKTSPMVEEVKYDAQELIRLTNRREQVLQQLIALAEPLPEYKILLSIPGIAETTATSIIGELGDIRRFKSANQINAFIGIDLKHYESGDFLGQEHITKRGNPYARKILYKCIHNIASASHTNPCHIADFYEKRKRQSQITSTKPHTIASIHRLIRTMYYLIMHNKLYDYTLAQSH

SEQ ID NO: 513678 - protein, 436 aa, unidentified
MLSYVGLDVSQQEAAVCFLLGDGREPVPRWTAPNSLPGADALTERLATLAREHGVNELRIGMEATGLYWWHLACTLKDAPVLAPYRPRVYALNPKLVHDFRKHYGALPKTDRADAYVIAERLRFGRQLPPPFELNLRYAPVQRLTRFRVHLAETLAREKSYFLTFLFLRFSGFGQAAPFHDPFGTTSCAVLEEFTTEELAQASLDALAPYLAEKGRGRFKDPAALAATLQRAARDSFRLDRVLDDPLTVVLGTTMATIRTLQTQLRTVDKAIAQELKAIPQTLTSVPGLGPVWVAGLVAEIGGITRFSDEAALAQYAGLVWKAHESGTFQAEDTAMSKSGNVYLRYYLVEAANSVRLHCPEYAAYYRAKFAQSTKHAHKRALVLTARKLVRLVDALLRTDTLYRTPAQRQDRQEGTTPTARRPGRSRRSRQAAAVG

SEQ ID NO: 513679 - protein, 322 aa, unidentified
MSGPSVMVGIDVASTYVEVAAMGAELATTLSRVSNDAEGHSALADGLSRLQPALVLMEATGGYEAELACALQAAGLRVAVVNPRMARDFARAMQRLAKTDRIDAATLAEFAGALAQRPDSERFIRPLSEPEQQDLAALVTRRRQLVSMQVAERQRLQLARPVARASIEALLEAIARQLDDVEVEMTRHVEQHHAQMAKLLQSVTGIGKVVAATLIAELPELGRLNRRQICALVGVAPYAKDSGASRGRRRIVGGRFEVRRTLYMATLTATRYNVAIRVFYERLVAAGKLKKVALIACMRKLLTHLNAITRDHLNVQGHAPIA

SEQ ID NO: 513680 - protein, 334 aa, unidentified
MENIALIGIDLGENSFHIHCQDHRGKAVYRKKFTRPKLIEFLATCPATAIAMEACGGSHFMALKLEELGHFPKLISPQFVRPFVKSNKNDFVDAEAICEAASRPSMRFVQPRTESQQAMRALHRVRESLVQDKVKTTNQMHAFLLEFGISVPRGAAVISRLSTILEDSSLPQYLSQLLLKLQQHYHYLVEQIKELEFQLKRKLDEDEVGQRLLSIPCVGTLTASTISTEIGDGKQYASSRDFAAATGLVPRQYSTGGRTTLLGISKRGNKKIRTLLVQCARVFIQKLEHQSGRLADWVRELLCRKSNFVVTCALANKLARIAWALTTRQQTYEA

SEQ ID NO: 513681 - protein, 264 aa, unidentified
MQQELFVGIDVSKARLDGCLWPAQESVAVPNDTDGIEKLVSELLEKKPALVVLEATGGLETAFATAACAAGLPVAVVNPRQVRDFAKAVGALAKTDALDAAVIGRFAATIKPIPRPLRAEQTDALARMVARRRQLVLMRTQEKNRLGPAKGRQRDGIKEHICWLDEHIDQLDIDLTATLRQSEAWRVKEDLLKSVPGIGPVACVTLLSLMPELGKLNRAEIAALGGVAPFNRDSGKYRGKRMRKLLTILNVMLKTNQPWNPKIA

SEQ ID NO: 513682 - protein, 368 aa, unidentified
MVIPTLHLLKYICQRITINKGGITMYYVGCDLHKFSTYFYVVDNKGKCILHRSIPNEAALLHKFLRSLPKPFKLAVEATYNWYFFIDIVACYTDEYYLANPLYLKAFAKRNKKTDKIDAKLIADILRIGYLPEVYIVDKKTQREREVLRQRMKIIQDRCRAIFRLKALLDKLGENSTGNFATKKRLDNIETKHLPEEYQHIIKENCRQIIELLQAETRTDSVVRKLVAADFEAKLLTTIDGIGEFSALLIKSEIADVSRFKNFDKLCSYAGLAPRIHQSGNKCIIGALSKNRRKHLQWILLEISYQFMSRNEKYRYKFEKIREQKPYNKAKVVIARDLLKIIYRVLKTKKPYYKEQNQTMASCAVCGV

SEQ ID NO: 513683 - protein, 368 aa, unidentified
MAHCIIVGADVHVKSILVKAAADRDEPVQRSFRNTVSGRTALLGWLACWSERLGGARVLVVYETSSLGYVLYDEVMAAGFECMVVATSRLARSWRHRRNKTDERDAQLLLELGRSHVLAGNPLPAVWVPDPELRDHRELTRARTDLANKITRVKAQVKSLLHRYGLERPAGTGKGWTKGFAAWLDGLAEGPTLGWGARVALCTLLAQLGSLVKEAAYVDDHLVALSAHPRHAAAVEAMDAGYKGVGLKVALTVLTELGDLWRFPNRRSLASYAGLAPSSHESGEANDRKGHITHQGPSRLRRALCQAVQHWVRWDPEAKARYRRLVARGGRRAKKIAKVAMMRRLLIRLWHTARKAQAAARTAQDRCE

SEQ ID NO: 513684 - protein, 376 aa, unidentified
MKTKTNTNTKTTTPSVVPTLTPAPAAPGGFTLGLDLGDRSHYVCVLDAAGEILHEGPMLNERVALALLLVKYPAATVALEAGTHSPWISRYLTGLGATVIVANPRKLHAITRHERKCDRRDAVMLARLARADVALLHPLQHGSAQAQHDLLGLKLRDSLVRTRVNLINTVRFTLKSLGHAVANPSSEAFHKSILTAVPANCLPVVQPVLAVLTLITEQIKTLERDLVARSKRDYPVTQRLQQIAGVGPLTALCFVLKIGDPTRFGRNRDVGPYLGLCPGRDQSGGTDKQLRISKCGDGLLRRLLVSAAHYILGPFGPACALRAYGQHLIGTSVREKKRAVVAVARKLAVLLLSLWKHGTDYEPRVPTPAPLVMVAA

SEQ ID NO: 513685 - protein, 315 aa, unidentified
MSVVPCFVGIDVAKAQLDIAVRPSGERWAVSNDTSGIVTLVDRLQTLPPTLIVLEATGGLERAATAALATAGLPVVVVNPRQARDFARATGQLAKTDALDARALAHFADVIRPTPRPLPDAQTQALRALLGRRQQLIGMRTAEQNRLAGTSEHLAKDIEAHIAWLNDRLATLDDALETLLRASPLWRANDDLLQSAPGIGPVCARTLLLELPELGTLTRQQIAALVGVAPLNCDSGTLRGRRMIWGGRAHVRTVLYMGTLVATRYNPRIKAFYERLLAAGKLKKVALTACMRKFLTILNAMLKHRTPWQTQEVQG

SEQ ID NO: 513686 - protein, 323 aa, unidentified
MNKYKETFGVDISKDVFDVHGSSSGHNQFKNDEKGFKSFLKILPNDSIVVMEATGYYHYRLAQFLYKNNVAVSVVNPLSVKRFIQMKLAKVKTDKSDAKAICEYALANEVPLYNALTNVQAECLQLFRLMDSYLKKRTATKNKMHGEETLGIPSKFVYRSLKRDKKHLDRELEGIEARLLELVKQEQQQQLTLLQTVPGIGAKTALFLIVITDGFSKFETGAQLCSYVGITPTIRESGSSVRGRSRISKVGNKKLRNLLFLCAFNACKHNKACRELYERIVQKGKSKKLALIAVANKLLKQCFAIAKSGLPYDAEFVSILTVK

SEQ ID NO: 513687 - protein, 329 aa, unidentified
MSKNSMVCAGIDTSKHKLDVAIKGVKGQLLELLVENTADGHKVLSGWLREHKVKRVGIEASGGYEQAVVLYLRKKKFVVVVFQPKQVRAYATFNLQIAKNDKLDAALIADCTAAIKEINAPPDERVTAFAKRMTFIDQITEDIARIKTRCESCRDKQILHYWREEIARLARRKKAELKALVAAIREHDDLGKRLDLIESVDGVGLVTAVAILVRMPEIGTVTREEVAALAGLAPYDQESGNHVGERHIKGGRGRLRKSLYCAALPASMRWNHQLVSMYRRLIAVGKLHKVALVACARKLLIFVNTVVERGSPWEKSRAPGKFELGLRAA

SEQ ID NO: 513688 - protein, 320 aa, unidentified
MDAVLGIDIAKAKFAAALLRPDGKVRHKSCANTPTGFADLAAWLQRQHVTRVHATLEATGTYGEALALWLHDAGHVVSVVNPSVIHAYARTQLARSKTDRIDAELIARFTASHQPAPWTPPAPEIRQLQALVRRLDALQGMRTQELNRLASGVTVAEVRASIETVIASLDAQIAHVHQLIRDHLDRHPGLRAQRELLTTIPGIGEATAAVLIAELFDKRYASARQAAAFAGLVPRLVESGTLRGRSRLSKIGPGRLRKALYMPAVAALRWNPTIRAVRARLHAAGKPPMVIIGAAMRKLIHLAYGVLKSGRAYEPTCAHP

SEQ ID NO: 513689 - protein, 358 aa, unidentified
MVDKVTEAAVVGGVDTHKDLHVAAVVDQNNKVLGTQYFSTTRQGYRQMLAWMTSFGTLKRIGVECTGTYGSGLLRYFQNAGLEVLEVTAPDQMERRKRGKSDTIDAECAAHAAFSGIRTVTPKTRDGMIESLRVLKTCRKTAISARRVALHIIHSNIISAPDELREQLRNMTRMQLIRTLGSWRPDASEYRNVTNVYRISLKSLARRYLELHDEIADLDVMIAAIVDELAPELIKRNAIGYESASQLLITAGDNPQRLRSESGFAALCGVSPVPVSSGKTNRYRLNRGGDRAANSALHIIAIGRLRTDAKTKEYVARRVAEGHTKMEAIRCLKRYISREVYTLLRNQNRRINSIPITA

SEQ ID NO: 513690 - protein, 544 aa, unidentified
MVAARLVLFGPSLSMTSASREVLIGGGPALRKGPALPRWRVCMFSQAEPSLGLKFRLKEYVMSQRKMSTFERLNSGRMNRKQRRELARRVAASDPGLSIVHPHAAGIDVGNSSHFAAVPADRDPLPVREFGFWTAELHKMAEWLVACRIDTVALQSTGVYWIPVYDILEQHGLRVVLVNGQHTQNVPGRKTDVQECQWLMKLHTYGLLRDSFRLAQNLEGVRTVWRVRGRHVEEAARSVQHMQKALTKMNVQLANVISDVSGLTGQAIVGAILQGQRDPYKLAELSDPHIQASQEEIARSLEGTWREDVLFELQQAMDSYQFAHTQIRQCDAKLKAYLASLQSRVLPQPVVPAESKPLQPKTRKTRKQGANAPPMDLTAELVRICGVDLTSIDGINIISAMTIISEVGPDLHQFQDEDHFTSWLGLTGNENLSGGKRVKGPKRKVKNRLADVLRMGATSLLNSDSYLGARYRQLRRNAKIPAVAVKAMARHLAVLVYRLLTKGQAWVDRGAQLYQQQRQERELIMLREKARKQGLQLVPLAPAN

SEQ ID NO: 513691 - protein, 410 aa, unidentified
MEVLYPRCAGLDVHKATVVAAVRLVAGGKVVREVRTFATTTASLLELAEWLAESGCTHVVMEATGVYWRPVWHILAEHGFALVLANAAQVKNVPGRKTDVGDATWLAELLAHGLVRASFVPDGPTAELRSLLRTRKQLVRERASHVLRLQKTLEDANIKLDGVLADLLGKSGRAMLEALVAGETDPGRLAALAHPRLAATPERLREALRGRATRHHRFLLRLHLDQVDAAVERVDREVEERLAPFRAAVDLLTSIPGVGALAARVIVAEIGLDMGRFPTAGHLVSWAGLCPRSDESAGKRRSTRLRKGAPWLKTTLVQCAWAASRKRASYLQAQYHRLRARRGPKKAVCAVAASILTAAYHMLKDGTVYADLGPDHFDRRAKEVQARRLVRRLADLGYAVELAPLEPAPA

SEQ ID NO: 513692 - protein, 389 aa, unidentified
MKIYVGIDIAKLNHFAAAISSDGEIIIEPFKFTNDADGFQLLVSKLESFDKNSLIIGLESTAHYGDNLVRYLVTELYQVCVLNPIKTCQMRKNNVRKTKTDKVDTYVIAKTLMIQDNLRFVSFFDLDMMDLKALGRFRQKTIKQRTRLKIQLTTYVDQVFPEIQYFFKSGLHQHAVYALLKEAPSPKEIASMHMTHLANLLKVNSHGHFTKEQAKELRVLAQKSVGANDSAISIQITQTIQQIELLDSQLEKIEAEMTDIMKFNDSVIMTIPGIGYINGGMILGEIGDIHRFSNPNKLLAFAGLDPSVYQSGNFQAKTTRMSKRGSRVLRYALVNAAWNVVRNNATFKAYYDAKRAEGRSHYNALGHCSGKLVRVIWKMLTDNVEFNLE

SEQ ID NO: 513693 - protein, 325 aa, unidentified
MRQNVIGIDVSKDSLAICHLANGKMQHLETGNDKAGFKQLVRRCGTDSLYVMEATGIYYLQLAYYLVEQGARVVVVNPVIIKRYIQMHLGKGKSDRKDAQWIMRYGQQNEVKQWQPEEQVIVECRQLEQVIEQLIKQKTMVTNSIEALERQPVVSSLAVKNLKQTLKMLEKQVKQMQDKLVATLERTFQKEMELLGSIPGIGRKTAGMLLLFAGGFKDMNNYRQLIAKAGLSPREYTSGTSIRGKVRITKMGGSLIRGKLFMCSFSAKKSNAACKALYERLVAKGKNGKLALIAVCNKLLKQAFAIVKSGIPYQADFANIMAARA

SEQ ID NO: 513694 - protein, 406 aa, unidentified
MEGPIITVDVSKGSCHYQPFIENGHPMRKPKQLSATIDGFQKLGQTIKDLEAKTEREDIPVIFEATGVYHRPLQKYLEDHKIRYYIISPLLSATYRKTDLHSNKTDALDCAHIAKAYYCEKELRQYQAQPQEYKRLYQLSRIYESELVHLRKRKVSLRSMLDIIYPRIDKTFKGNQNLYDPIPMEILKRYPHPSLLLSHREDTIVKTVGHRTGHLKGYTERIVHKIYEKAKECYSGCDIDDIEVVKLPSLIENVQEQKKKCDSLLKEMIEIARTCPYFAPIVSIVGIGENLAARIIAELGDVNRFDNRAAIVAYAGLNPKIQQSGDIDGLHLKISKKGNKHLRCLLYLGAQCNYRLRKEDPLYEFTKKKRQQTQCPLSSKAAYTASAHKLLVIIYSLCKNGTLYHS

SEQ ID NO: 513695 - protein, 375 aa, unidentified
MSRIIYIGMDVHSQSFSLCAFEPSFNSKGKYFAETKVAAEPINIKKYVERLRKSIGNNCRFVTGYEAGSLGFSLYNALVSMDIECVILAPSTMLCPKGGKRIKTDRRDARNIAERLAYGGYSPVHVPSEQDVAVRDYIRMRDDHAAMLKALKHQICSLCLRNGFCYTATKWSAAHLKYLRDISLSPLNRECLDEYLATLEQLQGKINAFDARIEEMSHMEEYDVRSTRMSCFLGITRNRAISILSETGDFGRFRSPASFAAYLGLVPGEKSSGADTKRTGITKAGNVHIRKELIEAAQSICRGRVGHKGKALAERQNGNPTDAVAYADKCNERLRRRYYKMINSGKNRNVAVTAIARELACFVCGMMQEYIHGAA

SEQ ID NO: 513696 - protein, 388 aa, unidentified
MPAAERPVAYLGIDVGKSSHSACALDAGGGVAFRAELANRPDDIDRVLERAGSGALVVVDQKRNIGALVLARAHAHGNPCAYLPGYAEKQARGMFPGIAKTDAIDAEVIARTALGVPRALRPAPEEPEGTASLRILSSQREFASSARTRAKNRLRATLLEADPALEGAVDPSSRWQVSMLAEFGGAAGCSAAGWRRFSSAARRAGAPAAGARRLWEALLASSRSGRRLPAGEDVAVRILAREIASLDADIEELDSLVADSLAGDEVYECLLTVPGIGPKTAAALVTSIDISAFRGHDELASYCGVAPSDRRSGSSIRSTSPQHGGNRQLKNLLIFSCNSLIGTDNRFGRYYGECRARGMRHSKALKAVARKRLKVIYAIMRDAVPYAA

SEQ ID NO: 513697 - protein, 418 aa, unidentified
MDRTKYIYIGMDIHKETHTAVLLNYLEEKLGEIKIKNTLQGFHKLEDYILKQKGELIPIFGLEDITHYGRNLSIFLLDRDYPVKEVNPSLSYMERMSYASTRKNDTWDAQCISAVLMRRSHLLPDANPQDYYWTMRHLVNRRNALVKASTKLMQQFHEQIQTAYPNYKGFFRELDCQTSLTFFEHYPSSKHLENISEEELGAFLRIPSNNSCSTNRARKILDLVAEETTKERDYQFARDTVIQSITRQLRAYQREIKELERTERQMYQELGYQLETMPGIDIVTACALVRHIGDIQRFFNGDKLANYAGVAPLRFSSAGKGKDLQNKSQGNRKLYSTLYFLAIQQIYLTNKGEPRNPVFRAYFERKVSEGKTKIQALICIMRKLIKIIYSMMKHKTAYDLPKIEEKMASDEKCAKMLV

SEQ ID NO: 513698 - protein, 418 aa, unidentified
MAFKIFRKNCCGLDVHKTWIYACIGITDTDGRTEYKQARFSSFSKGLGELCDWLAKYHCFEVCMESTGKYWIPVFNILEKAGLSVVLAHPKYTKPQKGNKTDRKDAKWICDLFMCDMVRPSFIPPADIRHLRELVRCRFKLTCMITGKKNRAQNCLTVSNLKLDDVFSDVFGKSSRSITEQLLAHPGEFFDVAPFVDGRCKTPIEEIQAAVDGAISPEQAVKLRQCLNHIDELEKHINETTQEILRLGDRYPDILKLIRTVPGFNSNPLTAVQILSEIGGDMSVFPSAKHLVSWAGCCPRNDQSNQKVKSTRISRAGTYIKPLLVQIANSLLRSKKHPEITERYKRIKARRGHKKAIIAVCRMLLTAIWHMLSDLKPYTPDGFLEPRPVEKSKVLTTAQALSLLKQRGYVISDAAAMN

SEQ ID NO: 513699 - protein, 373 aa, unidentified
MQQNIRVFVGLDTSKMKISVALAEEGRQGEVRFLGDIDNTPEAIRRLVNKLTGKYQQLLFCYEAGPTGYGLHRQITAFGHECSVIAPSLIPRRPGEHVKTNRRDALTLARLHRAGELTAIWVPDPGHEAIRDLVRAREAAMEDLRAKRQHLQSFLLRHGRIYPGLRSWTLVHARWLSSLTFEHSAQYLVLREYRQAIEDAEARLERLTQQVADVVSTWSMAPVVEAYQAMRGVAFLTAVTFVAEIGDVRRFETPRQLMAYLGLVPSERSTGEQVRRGSITKAGNPRARRVLIEGAWTYRYPARLSRPLQVRQESLPKIVRAIAWKAQVRLCARYRRLVATGKRQSLVTTAIAREMAAFLWAIGHEVEPRRAVA

SEQ ID NO: 513700 - protein, 321 aa, unidentified
MNKYKEIFGVDISKDVFDVYGSKSGHNQFKNDAEGFKTFSNKIGLGSLVVMEATGYYHYRLAQFLYKNKQIVSVVNPLSVKRFIQMKLAKVKTDKSDAKAICEYAKKNDVPLYTALTDVQSECLQLFRLLDSYLKKRTATKNKLHGEEVLGVPSKFVYRSLKRNKKHLDTEIISIEQKLLSLVKQEQQQQLTLLKSIPGMGVKTALFLIVITEGFSKFETGPQLCSYVGITPTIRESGSSVRGRSRISKVGNKKLRNLLFLCAFSACKHNKACKEVYERIVNKGKSKKLALIAVSNKLLKQAFAIAKSGIPYDEAFVSVLK

SEQ ID NO: 513701 - protein, 362 aa, unidentified
MTTQDKNSITIGLDLGDRRHRFCVLDGNGKVTEEGTLANSRECLTELSSRYPGALMVMEAGCHSPWISRYLEEAGCEVVVSNPRKTRAIYQHERKSDRRDALMLARIARMDRALLYPVRHGSEQAQEDLLRIKLRDSLVRARVGLINAVRFTLKSLGYRITNPSTERFHKVIEGQIPESVKNVIAPSVQAIEELSLRIKVLDREIMTLAHNYTETAWLQQIPGVGPITALYFVLKIGEPARFERVRDVGAFLGLCPRRDQSGESDPQLCITKRGDVYLRRLLVSAAQYILGPFGPPSALREYGLTLAAGGTARAKKRAVVAVARKLSVLLLTLWKNQSAYEAFPGHEDKMRTSDRERLRSIV

SEQ ID NO: 513702 - protein, 342 aa, unidentified
MQISTIGFDIAKNVFQVHGIDAAEKVVVRKRLRRRQVLEFFKALPPCLIGMEACATAHYWARELTKLGHRLRLMPAKDVKAYVKRNKNDAADAEAICEAVRRPTMRFVRIKSAEQQGQLMQHRTRDVLIRQRTQIINALRAHLAELGLVAAQGNAGVNELRAIVTDEQDTRLPIDARASVIVLAAQLEALESVIGAIEKRIKMQHRSSEASQRVEAIPGIGVIGATAIVATVTDPTIFRSGRDFAAWIGLVPRQDSTGGKQKLGPISKQGDRYLRRILVVGAIAVLRRAQENPGKYPWLTQLLARRPFKVVAVALANKMARMAWALLAHGGTYRAPELAETA

SEQ ID NO: 513703 - protein, 447 aa, unidentified
MSRRQATSHVTMRCVYANAAGLDLSQSEIWAAVPADRTPTPVHKFGTFTPDVLALADWLTACRIDTVAMEATGVLWIPVFEVLEAKGFQVCVVNARHIKNVPGRKSDVQDCQWIQYLHSVGLLSRSFRPDAEMAALRAYIRHRSSLLDSRAAHIQHMQKALQQMNVQLTQVLSDITGVTGLAIIRSIVRGDRDPDHLAALRKPGCARSAADIAKALTGNYRPEHVFALKQALALYDNYTAYVQECDAEIEQYVTSLTPAADDLPPLPPSEKRDSNSKNAPSYDARALLYRLTGVDLVAISGLNETSVQTIVSEVGLDMTRWPTVKHFCSWLGLAPHNDISGGKVLRSRTLRARNAAGQAFRLAAQSVSRSTRSVYGAFYRRVKGRLGAEQAIVATAHKIARTFYYVLKNRTAFHDIGAAEYDRQAQEREVAHLRQRAKKLGFTLVPA

SEQ ID NO: 513704 - protein, 410 aa, unidentified
MEVLYPHCAGLDVHKDTVVACVRHMVNGSVRREVRSFKTTTKELLALSDWLAGEGCTHVAMEATGVYWKPVWHVLSDGDFTLVLANAAHVKNVPGRKTDVNDATWLADLLAHGLIRSSFVPDGQTQEMRTLLRTRKQLVRECSRHVQRLQKTLEDANIKLASVICDIVGLSGRRMIEALIAGETEPGALAAMAHRRIKATPDELEAALRGRVTRHHRFLLQLHLQQIDAVNAAIDQIDQEVDAYVEPFRATVRLLTTIPGIDELSACVILAEIGRDMSRFPTAGHLISWAGLCPKNDESAGKRRSTRMRKGAPWLKTTLVQCAAAAARKKASYLQAQFHRLRARRGAKKALGALAASILTSVYHMLISGELYRDLGPHHFDQRAKAVNTRRLVVRLQNLGYAVQITPLAA

SEQ ID NO: 513705 - protein, 359 aa, unidentified
MATYCGVDFHARQQTITWCDTQDGEIKQTQLKHQPRAAVQEFYARLAPPVIVGFETSGYSLWFEDLLSTLGCELRIGDPREIRRRARSRQKNDRRDADLLFDLLHKDEFPTLFRFSQASREVLQQLRYRHKLVKLRTIARNCLHKLALDAGLSLQSQLLTKAGRAKLEALALRPVAAQQRTEWLALIDQLDERIVGVEKALTPLAEQDARVLRVRTHPGIGLLTGLALVHTLCPVSRFANSRKVTAYVGLEPLEHSSAGQQRWGGISKAGSRLLRFLLGEAAHTACQHDADLRRFYQQLSARRGPQKATVAVARKLLIRAYILLREELDYAEFQRRAVAARPARGNAKPSGLTPGLLDA

SEQ ID NO: 513706 - protein, 341 aa, unidentified
MKPAMNVLGIAIAKHVFHAVGMDNTGEIVFRKRLSRHDLMPFMAKLPPVLIGMEACGGAHDWARRFREHGHNVKLMAPQFVKPYVKSNKNDSRDAEAIAEAVTRPTMRFVPIKDVDQQDIQALHRVRERLIGERTALVNEVHGLLHEYGIVIPKGVAKFRQAVIGKLESEKDKLTSLSQEMFWKLIEEFAGLEKQLAYYQEKLEALATTHPECQRLMTIPGIGPLTATALVAAVSDASAFKNGRQCAAWLGLEPRQHSTGGKDRLLGISKRGDSYLRKLLVHGARTTIRWVGRKTDRRSPWIRQLVERRGKNRTAVAVANKNARIVWALLTSHQDYQLATG

SEQ ID NO: 513707 - protein, 408 aa, unidentified
MKNEATSKHEVRILPQIDKACGLDIHKDKIVVFISDKEGKHQALQEFGAYTKDLYALRDWLLECEVKHSVMESTGVYWMSLYYVLTGCGIDVVVANPAQVKQIPKRKTDRKDAKWLCTLLLNGLVRHSFIPDGTQVALRQYCRSRLGYTQMQSKTYNRIIKIIEINNIKIRSVISNLHTKTAMDIIRLLAAGETDIEKMIQCVKGRAKKKIPQMRLALQGTLQPHDIISMQMLLSDIDHGQQQIDKLESLINAIMEQHYAGIEECLDSISGIGIQSAQIITSEIGDNMKRFPTADHLTAWCGVAPGNNESAGKRKGTATKKGNKYLRTAIIAAAWGAVRTKDSYWRGLFQHLKKRMKAMKAIVIIARKLLKVVYKTIDNKVVYTEKGMDHFVEMHSYAKAKRLSGLVH

SEQ ID NO: 513708 - protein, 410 aa, unidentified
MEPIVERVAGVDIGQARVAATVLLGKAHERPHKETRIFPTHTRSLLEMREWFRSLGVTHVGMEGTGIYWVPVYEVLEDGFEVIVGNARHIKNVPGRKTDVKDSEWLADLTRHGLIAKSYVPPRPLRELRELLRYRRKLVESRTAERNRLLKLLEAANVKLASVASNVFGVSGMLMLRALVETQDDPRQLADLAKGQLRRKRDDLVLALEGRVNSHHRFLLRLQIRRLDLLEADIATVEDSIRRALVPYRREHTLLQQIPGVDWIIAAVIIGEIGTDMSVFRSVKHVAAWAGVCPGNNESGGRRRRAPVRKGNPHLQTALVEAASAAARKKDSYLRDKFFRLKLRRGYKRAAIALAHKILIAAYHMLRDGTHYRDLGATYLDTLGRHHTTRNLVRRLERLGYHVQITPKAA

SEQ ID NO: 513709 - protein, 401 aa, unidentified
MESPIVSIDVSNGNSHYMCFIKNNKRFGKVKKIDHDIEGFKRLLEDIQKLEAETNEKVCAVFEATGVYTKPLERFLSKNSIKIYIINPLESARKRKEEIHNKKTDKLDPISISKVYYDKEEMMELKKKDESYNWLRKKNRLYEDQLNHLRKYKVTFQNQLSICFPGYLDLFRDGYSDIPMTILKKYPHPDLLKNKKAETVARYLEKNTCHNHKVSLEYALKIIEFAKKTYPGCEKDDVEVEIFKILLDKVIETQRECEKTLNEMITVASTLEEYRYISSIDGIGPNLAARIIAEIGDIEEFKSREALVAYAGLDPHIYQSGDQDGKHLKISKKGNKYLRCLLFLAVGCSIRGAKDNPVNRFYQKKKQQSNPLNSKAAKTACTAKLLKIIYGICKNKTTYKR

SEQ ID NO: 513710 - protein, 414 aa, unidentified
MTVAFSFAHFAAIDWAKQTHHAVIVNHTGQIVTEFSFSHTLEGWQQWRQRAARLAPLAVAIETSQGVVIDQLLQTPDCTIYPLNPKAARAYRNRKAPSGTKSDHLDAWSFADALRLDGSAWKPLSKQDPLLEQLHLLCRDEIALIEERTALVNQLLAALHEYYPSALAAFEDWTLPAAWAFVEAFATPQALAHAGKRRWEKFLHTHKLARPETYQKRLELFAKATEFGASEALTLAKSRLSLTRVRQLRVLQIQLDDYRQQIEKLFEQHPDHEIFGSLPGAGPKIAPRLLGELGSDRHRFESPQALQCYGGTAPVSYQSGLVHQVRLRTQCNLVLRSTIHLWADRSRHACPWAEIYYQSLRKRGKTHACSLRCLGQRWLKILWKMWQTRAAYNSELHQQNQLRHGSWVLKLHNA

SEQ ID NO: 513711 - protein, 356 aa, unidentified
MSNYITIGMDLGNRKHTVCALDQTGNVLWRKDVANTPEALKPFFEENAGATVAMETGLCCRWVSALAKSCGCDALVGNARKLAAIWQSKQKNDENDALLIAELARASRRLFHPVELRDDERHEMVQLIELREVAVSQRTQAVNSVRGLCKAHGVFIPKCDASCFHKVAADAIPDGMAWKFKPMLRHLKEVAATIKRYDAMLEEYAQKHFKEEVELLRTVPGVGPITSCAFVALIADPGRFGSARDAGAYFGLTPGQDKSGDKDAPKHITKTGSALMRHLLVTAANHILRASSPDTALKRHGERICARGGKVARRKAKTAVARKLAVVMLAMLKSGKAYDDGIAAVKAGAGESTVAA

SEQ ID NO: 513712 - protein, 338 aa, unidentified
MENIGLDVHKRETQICRLTATGVTERRIPTSRARLTAEFAGQARSRILLEASTESFWVAQVLEQLGHEVIVADPGFAPMYGAARRVIKTDRRDARALAAAAQSGVFRPVYRIAPARHAQRALLTVRETLVRTRTRASNVVRALLRQQGLRLPVGTPGRLAARVATLELTPALATQVAPLLRTWPQLSTELAALDEAVAAEVAADPVLPRLQSVPGIGPVTALAFVATLADPTRFRTAAQVEAYLGLVPREHSSADRQHRGRITKTGPTRLRWLLVEAAWRLRRSRRPEAARLQAWMQRIEHRRGRHVAVVALARKLAGILFALWRDGTTYHGSPPATA

SEQ ID NO: 513713 - protein, 365 aa, unidentified
MYKELNSTGTLIQTTTTEAPQGHMYYIGLDVHKKTISYCVKDASGRVHQEGKLGATRCELDIWMRTLPQPWTVAMEATIFTGWIYDHLHPHATQIKVAHPLMLRAIAAAKKKNDRVDASKIADCLRCDFLPECYMASTEIRDRRRTLRYRYLLVRQMVQTKNRISGLLMETGVTYNKRRLHKVGYFRELLASNEEVNESIRPLLRLSRDTIARLQKTERALVSSLQRDPLLTERIRRLRTVPGVGPITALTWALEMGEISRFRSIRQAISYCGLCGDERSSAEKSIRTPISKQRNKNIQFVLIEAAKLAPRQDPDLALLYEREKQKGNANRATLAVARKMVAYLLAVDRGQRDFVPAEDCRCDAA

SEQ ID NO: 513714 - protein, 343 aa, unidentified
MGKNTMIGVDLAKNIFQLHIASLIGEVLERKKLSRESFMKFMRSFKPAIVVMEACGGAHYWAETLSEMGHEVKLIAPQYVKPFVKRQKNDAADAEAIVIAAQRPEMRFVEPKTKEQRAKAILFRSRERLVAQRTELVNAMRSMLYEYGFVIPQGITNVRRADEILYAQNCDLPDLVREECRDLLLQINEKSERIAHKTALIKQISAQTNLAQQLQTIPGVGPMTAMAIEAFAPPMETFKSGRAFAAWLGLVPRQFSSGGKERLGRVSKAGQSDIRRLLIIGAMTRMNWLGRRSITPGSWLSRMIVRKPRLLVAVALANKMARIIWAMLTKGTDYRDPVTVAAV

SEQ ID NO: 513715 - protein, 408 aa, unidentified
MQVLYPRCAGVDVHKDQVVACMRWVEEREVRHEVRRFATSTRGLLELASWLEESDCTHVGMEATGVYWKPVWHVLDGRFELVLANAAHIRNVPGRKSDVNDAVWIADLLAHGLIRASFVPPQPIQELRDLTRTRRQLVREIVQHTQRLQRVLEDANVKLGSVVSDVVGASGRRIVRALIEGETDAERLAQLGSGRLRCSRQELAEALRGSVTEHHRFLLRQHLRTIEQLEQTVAEFEGRIEGVLEPFRAEIKRLTGIPGISTTAAQILLAEIGPDMSVFPSVGHLLSWAGLCPRLDESAGKHRSTRLRKGAPWLKPVLVQCAWAAGRTKNTYLQAQFLRLKARRGPRKAAVAVAASILTAAYHMLRDRVDYRDLGPAHLTRKDQSRVAARLARRIRELGYEVEIRPAA

SEQ ID NO: 513716 - protein, 415 aa, unidentified
MALKIVYKICCGIDVHKTFVVACIASTDNKGITSYESHRFSTYTSGLKDLLQWLLNRNCRDVCMESTGKYWIPVYNILESDCSIVLAHPKYVKAIRGKKTDKKDAKWIADLFKHDLVAGSFMPPADIRQLRDLMRYRFKLTCFKSSEKNRLQNCLTVSNIQLGNVVSDTFGKSAQAILDKLLENPADTSFDLEPLVFRSLKKKLPELRDAIDGYITPEQAGKLKIIKAHYQNLESRKAELEELILALAAPYQQELAILQTAPGISSDFTAIGIISEIGTNMEAFPSAKHLCSWAGLTPANNESAGKKKSVRVSKAGCYIKPLLVQCANAVVKSSKHPEIRNRYLRLKKRRGHKKAILAIARMLLTALYHMLKNGENYNVELYRKSDLPPADHEITVEQAIIIARNQGYKIKSATA

SEQ ID NO: 513717 - protein, 355 aa, unidentified
MNKIKYIGLDVHQTSISAAVADQEGKQMMQLVLPTRADALIEFLNGLRGTLHLTFEEGTHSAWLYDLLVRRVTKLVVCNPRKNALLKVGNKSDQIDAWKLAELLRAGLLSPVYHGESSTRTLHELGRSYMALTEDTTRIMSRLKALYRGLAIPCAGKKLYTVRHRGAWLKQLTQAGILRRAERLYQELDAVQKLRRQARGELLAERRKHPVCERLRTIPFLGPIRVAVLVARMQTPHRFRSKRQFWAYCGLALETRSSADYRNINGQLQRSRKKVLIRGLNVNHNQDLKNIFKGAAMSASIFPGPLKDFYQQRLDAGLRPEMARLTLARKIAAIALTLWKKGESFEAKKLNPQAA

SEQ ID NO: 513718 - protein, 375 aa, unidentified
MSNHSEAFVAFDSSKLRNAVAIADSGRTGEIRFLGEIENSTTATAKLVRKLASKYERLTFCYEAGPTGYELYRQIKSLGQECIVVAPSLIPKKPGDRVKTNRRDAVSLAKLLRAGELTAVWVPDRHHEAMRDLTRARDTAVDDLRSKRQQISAFLLRQGLHYCAGKKTWSQAHLNWLARQKFEYLEHRLVFEEMMTAMRQAQERLERLEQAIRAAVPDWSLADLVTALMAMRGIDLISAATFLAEIGDLSRFQSPSELMAYLGLVPSEDSTGDHIKRGPITKAGNRRARRTLVECSWSYQHPPRVGKDKQAKVAAAPQVVREIAWKAQSRLNRRYRALVRRGKLKTVAITAVAREFAGFIWAVAREATAARAAAK

SEQ ID NO: 513719 - protein, 429 aa, unidentified
MDDVDDADLVVERVAALDLGKAGLEACVRVPNPQRPGRRMQELRGYATTTAQLLAMAGWLRHWQVQRVVMESTSTYWKGVYYLLEAEGFDAWLVNAREVKNVPGRAKTDRADAVWLAKVAERGMCRPSLVQPPEIRRLRDLTRYRRALVQDRTREQQRVEKLLEDAQIKISAVLSNLHGVTGRAMMDALIAGERDPRTLAGLAKASARKKTDRLEEALRGFFTDHHATILQMMLDNSDRISAQIAALDARIEEAIGPFSHPAARLTDIPGVSTVAAAELIAEIGVDMTRFPSAAHLVSWAKFCPQIHQSAGKSTSKGRAKGNPWLAGTLGRIAFVNSRTDTFLGARYRRLARRRGKQKALVATGNSVLTVIYHLLSDPDARFCDLGPGYYESRINKHRRARDLATQLQALTGQHIAIRDGKAVITDTAA

SEQ ID NO: 513720 - protein, 338 aa, unidentified
MSILYVGIDLAKSVFAVHGVNEAGKPELVRPNVARAKLVELIAALPPCEVGMEACTGAHHWARLFMSHGHTVKLMAPKFVAPYRLSGKRGKNDAADAAAICEAMQRPNMRFVPIKSVEQQARLMVHRARQGFVEQRTATLNRIRGLLSELGIVMPLKAATVRREAALALEDLPGRANLVIGDLLSEVHRLDERIEQYERQIVQMAREDERARQLMRLSGVGETTATALIAMIGNGHEFKSGRQLSAWLGLVPGQYSSGGKTRLGRITKAGDPYLRSLLVMGARAVLNAAKGKNDSISCWAVQLAERRGYWRAIVAIAAKNARMAWAVLSRGERFVMPT

SEQ ID NO: 513721 - protein, 392 aa, unidentified
MEAMIETCCGIDVHQKTIVCCILDGPLDTSKPKKSYKIFGTRTCELREALEWLEENQVTDIFMESTGQYWVPVFNIFSEGNFNMVLANPEHIKNVPGRKTDMKDAEWIARLGRVGLIQSSYIPAPEVMELRLMTRRRQSYTQKRTQSKNELHNILQRSNIKLTGYLSNIFGKTGQALLQLFINGEVLTLESVGACLHGKVKASPKDILQAMDGKISLTDRRLLDDSLDEYQFYTRKIKKIEKDIEQYILYHFPLEYELLQSIPGVKQHSAAIILAEIGPNIEAFRTAGHLASWAGLSPGSYESAGKKKSSRVTRGNKYLKTALVTSGGMAGRSRDPAFGSLYHRVASRGTKMKAVVACGHKLLRIIYKILDDKVPYNEKRALGLRQQGLALN

SEQ ID NO: 513722 - protein, 310 aa, unidentified
MDVIIDKGCGLDVHKETVVACVMGSGIKKEIKTFDTMTGSLLRMKGWLTDLGITHVARESTGPYWKPVFNILEDSFEVILANARHIKNVPGRKTDVKDSEWICKLLRSGLLTASFVPPQAIRDLRDLTRYRQKLIQAASAEKNRIQKVLEDANVKLSSVVSDTFGVSASRMIKAIMSGNFDTDSLAELAVGRLKGKKEKLKEALQGYFRDHHGFMIQASLDHIASLEKIIADLDRQISEKLKDYHRERELLASIPGVKEQGSSSILAEIGAAMNVFPSEGHLSAWAGMSPGNNESAGKKKVERQPTAIKN

SEQ ID NO: 513723 - protein, 346 aa, unidentified
MTYYAGLDVSLREISICVIDAEGTIITRDTIPADVMAVDGWFKNRKLSPKVIVHESGQLSIWLQRGFQELGLPAVCIDARRAHKSLSARINKSDASDAEGLAQLARTGWFTPVYVRSVEADRVRALVGARERLIRLRKDLEGHVRGVLKTFGIRMTGITKGKLRQSFRDQLAAAGETDPVLRTLADSFSDIHTRLCKEAADLEKALKVKAETHPAVRRLMTIPGVGPLVSLSFVALIENRDRFAKSSDVGAFLGLTPKRFQSGDVDWSGRISKQGDKAMRALLVDAAATLIQNVKRFSALKSWAIRLAGRKGFRKATIATARKIAVLMLTLWKNGTDFTPKMEASA

SEQ ID NO: 513724 - protein, 405 aa, unidentified
MSENFSIFVGIDISKDKFNACAIQNPTSIIFESAFDMSKQGFSSFVQKLSVFPKSSVLIAMESTGCYHLNLLSFLSINEFSCVVLNPLLVKKSLPVGLRKTKTDKIDARSIALTIFYTHYLLPASSFLNSDFRDIARKKESITHQISRVKNDIEKLLSLLFPELEKVINIYNDAILDLLSSFPSAKAIQKASIDSLRAFFSKTTGRKLKLSPETLKELANNSIAQYWPMKEKILIQTIKELRFLQEQLNEFDEMLKEYCKCASLNQDIEILTSIDGIGENSALYFLAEVGDISRFSTYKKLIAYCGLDPSVDESGKHKGESRISKRGNAHLRRIIWLMSVNVVIHNEYFKAYFQRKRSQGLVYKKAMMSVAHKLLRTIFAMMKKREKFHIDDTFSSSTQNLILHS

SEQ ID NO: 513725 - protein, 350 aa, unidentified
MLIIGCDYHPGFQQIAFVDTETGECGERRLSHREEAEQFYQDLKQRNATVRLGMESSGHARWFERLLNDLQFELWIGDAAEIRTKRVRKQKTDRQDAQLLLRLMMEDRFPRIWVPDAANRDLRQLLWHRHRLVQMRTRVMNQLHVVALNEGLRRKKALWRPVGRNELESLKLAPWASRRRQDLLDLLDQLTPKIQDLTRQLEQEVERRPVTRRLMTHPGVGPLTALAYELVIGTPQRFHCGKQIASYVGLVPTEESSGDRRRLGHISKQGNVLLRFLLVEAAQVTVRSHPEWRSTFFHLAMRRGRKIAKVAMARKLAVHLYWMWRQGLDYGQMNKLGSHAGEPGHPHGVQ

SEQ ID NO: 513726 - protein, 392 aa, unidentified
MSSTTVKILNNEEQFVHVAVDLAKNYFQVAYKDPVSGKFINRQYKRSEFTEFVTNKDTFKKHFYVESCGACQYWCRLAVSHGHKGTVIPASATKTFISNNKSDCNDAKAIWQLSFVPDIKEIHVRSEANQVMGMVLKCREKLIAEKTKISNWLRGQLYELGEITSLGGSEKVVTLSNEVLSKALDSKKEWADMYQLINSSIESVINSIDAKLEAIDKFMKDYVARDPLCQKLMTMPYIGPVNAYALAYVMEDPKYYKNGREFAAKAGTSPSFTGTGGEVRILGVGKKGCTVLKRTIYQPALMMYQRNKVNCEGSDELKEKRTTNSIWISKMADRKPLKKVVCAICNKMARIAWAIAADKNCCGYDDSKTSLIYKIKRGDTDSIDKSAEEQLN

SEQ ID NO: 513727 - protein, 407 aa, unidentified
MSEYSKVTCNGMDVHYKFSKVTFRDAQGHLVRRERLDHPDREKLRQRLSQWPKGMPVVLEASFGWGWLSDLMEEAGLEVHLSNCYKVERMRQARGEVKTNDKDADLISQLPFEATNWWEVWRAPKEVRDRREQMRYRADLVALQTTTKNRTHALFHRHGIFHEFSDLFGGPGRKFLVDLCQNGSPDLSGEALNALRGQVRLLDHLRGQLTDVLLTLRGQLEKTPLIRLLKSVNGFGVVLAHVLAAEIGEISRFPHHRALASYSLLAPRSNDTGEPDRDQAPKGRRLGRRGNRTLKWTFIEAAHGAVRSGGRWRAMFDRVTDGGKKDRNRGYIKVARELVKVIHAVWKKGVPYTATPPVRPGQSQSQSQSQSQSQSQSQSQSQSQSQSQSRGTPRSGTGQPFRPMVQA

SEQ ID NO: 513728 - protein, 356 aa, unidentified
MSEYAGQEFVGIDLHRRRTVLVRTTDAGEVLEATRILNDVDLLNGVIGRAGADPEVVLEATYGWYWAVDALQAAGARVHLAHPLGVKAFEYRRVKNDFRDAADLADLLRMGRLPEAWIAPPATRELRELVRHRAKLVGLRSGCKAEVHAVLAKCGIGVPMSDLFGLEGTELLDHLSVPAPYGARVQSLQRLIADLEDEIDLFARLARGKLVADPGYTAVQQLPGIGPVLAAVFVAEVGEVTRFTRAGQLASWAGLTPKHHESDTHVHRGRITKQGSRLVRWAAVESVKRIGAHTVVGAYKAQVADRRGKNVGTVAAARKQIEFVYYALRDHHVRALYPPGSPRRQPVPGVVRGAVA

SEQ ID NO: 513729 - protein, 344 aa, unidentified
MSIVETAAVTGGVDTHADCHVAAALDGIGGLLGVSEFPATPAGYARLLGWLQSFGTVCLVGIEGTGSYGAGLARHVAAAGIRVVEVDRSDRQDRRRKGKSDPLDAVSAARAALSGRASGAPRGRDGQVEAIRALMIAKRTARAQRTQTINQARALIITGPDDIRTRFTGQTPAGLVAELAALRPRPGSMVRYHTLLSLRELGRRAQYLDEQLARLDLLISPLVTARAPGLLSLFGVGPDTAAVLLIAAGDHPGRLRSEAAWAHLCAAAPIPASSGKVSRHRLNRGGDRQANHALWRIVITRMGSHPPTRAYVARRGKEGLSKPEIIRCLKRYAARETYRHLRPS

SEQ ID NO: 513730 - protein, 340 aa, unidentified
MTVIIGIDPHKASHTAVAIGCDEQQLSEIRVRATCQQTAKLLAWAEPLGERTWAVESAGGLGYLLSQQLVNAGEEVLDVPATLASRVRVLSTGHSNKNDPNDALSVAIAALRSPGLRSVEPANHTEVLRLLAKRNHEIGRLRNIVVSRLHAALANLSPGGIAKELNASDAVRLLGDFNPKTAVERTRYDLALELLDDVRRLDVQLKESHKRIKTAVQASGTTLTELYGVGPILACELIGYTGDVRRFTSRDKFASYAGVAPIELSSGGRIVHRLSRRGNRQLNHAIHMVAICQIRQTNSEGRAYFERKVAEGKTKREAIRSLKRHVANAVYRQLLVDTNK

SEQ ID NO: 513731 - protein, 344 aa, unidentified
MTLVGCDLHTRKQQVAALDTETGETHERQLVHEGSAVEEFYAALPRPVTVGIESTGYAIWFHALMHRLGHTVLVGDAAKIRAMVVRKTKTDQRDARHLLDLLRHDRFPTVWVPDPATRDLRALLTHRRRLVRIQTMLKNGLHAIALNERLVCGSKLLRHAGLAQLQALPLPPYTAQRRDHSLELLELLHTKIQQLDGAIATATLAHPDAPRLLTHPGVGPLTALATVVVLGPVTRFADAKHVVSYVGLAPSLNASADKYRLGHITKQGRSLLRWVLGQAAPHAARLDADLSRTYGTLRHRRGRAKARGAVTRKLLVRLFIMLRDQIDYAEFRRRGRPPAPVAAG

SEQ ID NO: 513732 - protein, 377 aa, unidentified
MGDYSEAFVGFDTSKLRNSVAIADVGRRGEVRFLGEIENTPAATAKLVRKLAVKYKRLTFCYEAGPTGYGLHRQIKDLGFECVVVAPSLIPKRPGDKVKTNRRDALSLAKLLRADELTPVWVPDGRHEAMRDLTRARETAMLDLRTKRQHISAFLLRLGRPYPESRKTWTKAHAIWIASQKLEHPQQRLVLEEMMLAIRQAQERLQRLEQAIAAAIPEWSLAPVVTALMAMRGLDLVSATTLLAEIGDLSRFRTPTELMAYLGLVPSENSTGDTVKRGPITKAGNRRARRMLVECSWSYQHPPRVGQAKQPKVDAAPPAVREIAWKAQCRLYRRYRALIRKGKRKTVVIVAIARELAGFIWAVARAVTTGGVAAATA

SEQ ID NO: 513733 - protein, 433 aa, unidentified
MLKINYMSTLFVGIDVSSKSNSVYAMDFEENKYISSSFGNNQPGADQLVNMIAECMQKHKNLDTVLIVLESTSVYSVHISSFLSTSEVLMPYKPYVFCVNPKATSNYRKSYIGMEKTDPTDAYLIADFGRVGRTKKLEPWRGGQFIALKRLTRHRMHLSECITREKTYMVSNLYLKFSELQLLEGDDKPFGSLYGATSSSVLTEFLSPQEIIDMPEEDLLTFLAGKSRNRISDLSKTSELLRKAARDSYRLDKCMYEPLNVSLASSFNCIHAYQKEIKLIEQAIEKCINGMNPNALIILQSIPGIGPVWASGILSEIGDITAFHSSDALAKYAGLYWPKGDSGDFTSEDNKMSKAGNPYLRYYLGEAANSVRKHIPEYADFYARKYAEVTKHQHKRALALTSRKFVRLVFGLLVKNQLYTGEKLDAEYNIKSN

SEQ ID NO: 513734 - protein, 412 aa, unidentified
MKRTPRRCCGIDVHKASLSVCVRLRGKGGKVSEEIRSFGTMSEELLALHDWLKAHGVTHVAMEATGVYWKPVYYVLEDGFRVMLVNPADIKRMPGRKTDVSDCAWLAQLLDNGMLQPSFIPPREIRELRDLVRYRSSLKHDHTRIANRLHKVLQDADLKLSSVMSDILGVSGRQILSQLAKGHSDPTALAELARGSLRQKLPALRQALTGRFNPHHAFLLSRLLADLDNVEESMVEVAERIEAQLAPFAVEVKCLCTIPGVKQIAAAAILGEIGTDMNCFPSVAHLASWAGMAPGNNESGGKRRRAKARKGNRWLRTILVECGNAAGRTRNTALSALYRRMIVRGGRKHAAFVVGRHILNIAYHLLLEHTTYRELGATYFEQRRIEQLKRRCLDQLRNLGFQATLTQMAKAA

SEQ ID NO: 513735 - protein, 346 aa, unidentified
MVIVGCDFHPSWQQVAIFDPDTGEIAERKLVHGDGEAEQFYQRLAVPSLIGIESCGNSQWFQELLERLGHQVWVGDAAQIRASYVRRQKTDKRDAAHILKLLMEGRFPRVWVPDTEIRDLRQLLIHRHRLVQIRTRLKNGLQHLALNRGMRKKRSLWSEAGQREFLNLPLHGWAQYRRADLLQLLRCVDEQIRPLDAAVEKAAWSHEQARLLMTHPGVGAITALAYVLTIGDVARFQRGKQVASYLGLIPKEHSSGGKQRLGAISKQGNSFLRMLLVEATTTAIRLEEDMKKKYQHRCHFKLKGVAKVAAARKLAVRLYWMLRTNTAYPEVVHNESSSRCPVAGAS

SEQ ID NO: 513736 - protein, 344 aa, unidentified
MEQVYYVGLDIHKKIIAFCIKQVDGTIVAEGKIDANRKALKQWAESTPGPWIGAMEATIFTGWVYDFLKPYARQLQVGNPLMMKAITAAKKKNDKLDARTIADLVRCNLLPCCYMAGEEMRDLRRVLRYRNLLVRQAVRMKNRMATLLMETGQEYNKKKLHGAKYFRELLEKLSDVPESFKEILQMSRGALELFESCQKRLLKGLVNNEVLRERVQRLMSIQGVGEVTALSWALEIGDVQRFSSIRKASSYCGLCSAQVESGGKITRMPLSKQRNKHLQSVLIEAAKLAPLYNQELADVYNKEQQRGNNHNQATITVARKLVAFLLAVDKSGKAFIKKAEQQAA

SEQ ID NO: 513737 - protein, 402 aa, unidentified
MYNAVGIDVSKGKSTVAVLQPAGVIIRKPFNVNHTSSELDELAKYIGSLEGETRVVLECTGRYHEPVVKTLSEAGLFVSAVNPHLIKNFGNNSIRKVKSDPADAKKIARYTLDNWIELRQYSSMDTTRTQLKTLNSQFSFFMKQKVAAKANLIALLDNTYPGVNKLFDSPVRDDGSEKWVDYAYSFWHVDCVRKIGLKTFTERYQAFCKKHHYNFQPAKPAELFLASKDLIAVFPKEASYKLLIQQSIQQLNLASSHVEELRSKMNELASTLPEYATVMGMYGVGKTFGPQLIAEIGDISNFSHREALTAFAGVDPGVDQSGTHNSKSNKASKCGSNRLRKTLFQIMSTLLQTAPEDDKVYQFLVKKRAEGKPYYVYMTAGANKFLRIYYGKVKECIRNLEQ

SEQ ID NO: 513738 - protein, 337 aa, unidentified
MKVTLIGIDLAKNVFQVCGVNQACKSVFNRALRRHQLMAFLAQYPDAIIAMEACSGSNYWGRSLKAQGYQVRLIPPQHVKPFVKGNKNDRNDAFAICEAAYRPNIQFVEPRTLEQVDMMLAHRIRERQVDARTTLINQIRGLLNEYGIVIAQGKESLKAALPDLIEDAENELTERARVHFTLLHQEWSTIDEAIKSSEKDIKQQAQASEGAKLLMQIKGIGEITATAVVSFAGNGSSYKNGRHFSANIGLVPKEHSSGGKQSLGGITKRGNRYLRKLLIQCAWSIIRHCKTAQDRLSVWVKTLIERRGSHKSAVALANKLARIVWAILFKKTEFRAV

SEQ ID NO: 513739 - protein, 365 aa, unidentified
MSEYTWIGLDVHADSITAAILEGDREQPEIIKLSGDLMKVRRLFRHLSKKAPVRACYEATGAGFVLQRVLTNDGFHCEVIAPSLIPRKPGDHRKTDRLDAVMLARLYRSGHLTPVHVPTEDMEALRRLLRLRYTYQIYCKATKNRISGMLRNHGFVFTEAKSTWTKKHRQWLTKLRLELCGPLQTALATELEHLEYLQTQREALDAELQRFAQSHPYRHRVETLCCLRGVKTLTALTLLCEIDDVRRFRSPRGLMAYFGLVPSERSSGDKERKGPITKAGNIHARRLLIEAAWNNRHRSGADLILKRRRQGQPPAIVAIAMKAQHRLYKKFWRLDQRKHRHVAITAVARELCGFVWAILNAVPQQ

SEQ ID NO: 513740 - protein, 443 aa, unidentified
MSRKKRTHLRGTRGQAFADKIRGIPLDRILCVSLDIHKYFHVVMLHNALGEIVTPTFEIDIFQTGFDQLGQAIGTAVTQTHAQVVLLGMEPSSHYFENLARHLLERPQPVTLINSFAVKQNRDQQMMQREKDDEIDTAAIGDLLRRGEGSPYRPASGVYLQLQQLDRVRLGKVKIRTMLQNQILGHLDRIFPGLVILGDEATERYTPLFKMNFWACQTLQHLIRVCPDPRQLATLPPQALVKMFHAQGYRMGRLAAAKIITYAKTILLPDAELIAIRTELLQHDLALLEEVERHIAKLEERLVALVAETPYHILTKLKGLAAVQVASLAAAIGDPSHYQYAGQVFRRAGLVCGRDDSGTRQRKGKGKHVVKVGDVYLRRALLSALATLILHQPILRTYYHQLKKSKPNGVARVATARRAIGILWATLRDQRPATLVLKRGATL

SEQ ID NO: 513741 - protein, 346 aa, unidentified
MLIIGCDFHPGFQQVAIFDNLTGEIQEKRLQHRAEAEQFYRGLAGQEVRVGMEACGHYPWFERLLAELGFELWFGDAAKVRASVVRKQKTDRRDAEHLLDLLRENRFPQIWVPSLEVRDVRQLLVHRHKQVQARTRTKNQLQAMALSQGVQKKYKLWTKAGREELEQLPLLPYAAQRRKQLLQSLDGLEAEISELDRRVADEARQRPEAVRLMTHPGVGPVTALALVLTLGPSDRFESAKQVGSYFGLIPSEDSSGGKQRLGRISKQGSSFLRFLLVEAGQTAARLDPQLKRFYRRLAARKNRSVAKVAVARKLATRLYLMLREDWTYTQLCQAVMQVSPSHSVAG

SEQ ID NO: 513742 - protein, 340 aa, unidentified
MFKNFIGIDVSKAKFDLALIKDCNKENMIQAVFENTQKGIKAMTRFLEKEYQVQLSDTIFCMEFTGIYCRPLTTFMTEKECNVWLEMPVNIIRSLGLQRGKNDRVDARRIALYAYKNKEDIKLWKPQRDVILKLRDLLSLRERLISSKKSLMAPIDELIAMGDKQGAARVKRGCKLTLSSIDKEIEIIEKDLDDTIKNDPQLKELYNLATSVPGVGKYTALFMICYTNEFSIYNNPKQLACYCGVAPFEHSSGSSVRGKTRVSHMANKVLKRMLHMGALSVISRDPELSIYYQRKIALGKNKMLVINAVRNKIIHRLCAVIKRGYEYQPENLFKERLVLS

SEQ ID NO: 513743 - protein, 344 aa, unidentified
MTIYCGVDFHARMQTVAYCDSLLGEIHILDLHHQTDDLRGFYAGLQGDVIVGLEASGYSPWFELLLEDLGHQVWIGDAAEIRRLAKRRQKNDHRDAGLILDLLINGGFPRLHRSSADSREILSQLRYRSRLVKVRTMAKNNLQALAIRSGLAAKANLLTRRGRDKLSALPMSQSVGLQRDHWLELLKGLDGKVAEVDDWLKQRAKANEKVSRLQTHPGIGLLTSLGLVHTLDPVSRFSNGRKVVAYLGLEPMESSSGEKRRMLSISKAGSRLLRYLIIEAAHTAVRYDPDLKRFYLRLLRSKGKHKAIVAVGRKLVIRGYIMLRDGIDYAEFLRRGVEARLARD

SEQ ID NO: 513744 - protein, 313 aa, unidentified
MSATLYLGLDVAKDTVELASEPAGLHGQFATTAAGLAALVAQCQAQPVTLLVLEATGGYEAPVVAALAAAVLPVVVVNPRQVRDFAKALGQLAKTDRIDAQVLARFGARVQPIPRPLPTEATQALEALVVRRRQLLEMLHAERHRLTLARGRPVRDNLRRHIHWLERSLTDTEAEIAATIAASPLWRVQEDLLRSVPGVGPQLACTLLGQLPELGHLDRHQIAALVGVAPFACDSGQWRGSRHCWGGRAGVRRVLYMAALVGTRYNPVLRAFYQRLRQAGKPAKVAITACARKLLVILNAILRDHRPWIPAHA

SEQ ID NO: 513745 - protein, 411 aa, unidentified
MNDDGMDSDRRGRYECISGLFTRLNSNYVTKEELSLAGFGDIILNPKNPKHKEAQVSRYGMELAEGTEIFAGIDLHERTWTVTVRTREVELFTKGIPGKWLMLRGILERYKGSKIRAVYEAGCFGYWLYDELRANGVSCIVTPPSLVPQEHGNKVKTDRRDSRKLACLLAKGLLKGIWVPMEEDRYHRTVIRRRHQIIQERVRIQHRITSELRVYGIKLPEEVSKWSTAYVSNLKSIRFRDHFMQESFNRLLREYDFFCEELEAQTRLVKELSETGKYRKHVDILCSIPGVGVITAMEFLLEIQDVSRFERADQLAAYVGLTPCQYSSGDKVRMGRITKIGKNHLRALLIEASWQIIKKDSQKRARYENIKMRAGGKRAIVGIARRLILTMRRMLLNTRTYREMKDAKKAA

SEQ ID NO: 513746 - protein, 364 aa, unidentified
MLIIGCDYHPGFQQIALVDTDTGELSEGRLEHREQAEKFYRELKQKNPAVRVGMESSGHSRWFERLLHELGFELWIGDPAEIRTKRVRKQKTDRQDAQLILQLMLENRFPRIWVPDAENRDLRQLLWHRHRMVQMRTRVMNQLHVVPLNEGLRRKKALWRPAGRKELESIALAPWASRRRQDLLDLLDQLTPKIQELTRALEEEVENRPVTRLLMTHPGVGPLTALAYELVIGTPERFPCGKQLASYIGLVPEEKSSGDRRRLGHISKQGNVLLRFLLVEAAQVTVRSQQEWRNKFFHLAMRRGRKIAKVAMARKLAVHLYWMWRQGCDYGQTQKLGSHAGEPGNPDGVQSITDVMIGHPAPSK

SEQ ID NO: 513747 - protein, 319 aa, unidentified
MNTIGLDISQKTIDATLHKTDGSTYYTKVGNNREGFQSLKDWIKANKVRKCVIGMEATGIYYEAAAENLSETYTVYVINPLKIKDYGKSQFNRTKTDKADSNLIAEYTKRHADKIIPYSKPKNRYLQKLINLKQQLKDHQKQIKNRLHSSDDEMIQAIHQDLIQVYQDKIDQTQTAIDAQIGQAETDGHYRNLQTIAGIGKDTAAILYAQLTDKTFQTANQFVSYAGLSPQTEQSGTSVHKKGRLSRYGHRRLKRSLYMPALVAYRVNAFPQLILNLTNAGKPKMVIIVAIMRKLAKLAYYIVKTGKPYDSTRHKAAQA

SEQ ID NO: 513748 - protein, 368 aa, unidentified
MNKLAKVESFFKNVNLTSDDEVFVGVDVHKKSYHVALFLNDTPAIDFRMAAEPKQLNKKLGSMACSIKDIVYEAGPTGYSLARSLIKNNLPASVVATSRIPRPAGGDDKTDKLDSRKLAQYAAKGLLSPITIPTPKQEADRQLYRMRHRQALGFAKVKVQIKSFLLMHGIKEPGGLGNWTIAGVGKLRDIRLLETLRLSLDELLSDYDYYNSRIKVLNKILAAKLDKGKLGQRIALLKTHPGVGSVVACQFATELYHYRDFGSTRQLYKYLGLSPRVNQSGERSSRGSINKAANGRLRNNLIQAAWVWVRSDIDAKKSFWRICDNCGGIKQKAIIAMTRKMSGHLWAMLMSDQPYDKDKAKCRHNTER

SEQ ID NO: 513749 - protein, 461 aa, unidentified
MPENSGGSDRGSRGKAIEGLPVVRPQVAGIDLGSERHWVCAPALEGTSREVADFGATTAELVRMAQWLKQRKVESVAMESTGVYWIAPHEVLEAEGLEVRLVDTRQLARVPGRNQKTDPTDCEWIQRLHSCGLLRGSFRPQEQVCMLRTLIRDKANLVAESGDWMRRMQKSLDQMNVRVHRAVSDLAGSTGMAMVRAIVAGERDARQLAKLRDPRCRHSEEEIAEQLQGHWREDHLFSLQQAVKMYDAVQQRIAAYDKQILRKLAEMTPPERRRGSAPAAKNPQKANAIKMRGQEPMRQALYRMSGVDVTQIDAVGVATVEVVLSEYGPDLSPFPTEKQFVAHTTLALRVPKSGGKPVKKKKRDSASTRVAAALRMAALALRHSPTALGAYYRQIARRIGADVAVFATARKLATLIYRLLRWGQPYVDEGAEVYEKRYQEMRIKALKSTAKQLGYGLVSNA

SEQ ID NO: 513750 - protein, 407 aa, unidentified
MQVLYPRCAGLDVHKDTVVACVRCVTASKAHEVRTFGTTTRELLELSDWLESFGCTHVAMEATGVYWKPVWHLLEAQFELVLANAQHIRNVPGRKTDVNDAMWVADLLAHGLIRNSFVPPAQIQELRDLTRTRKQLVREISQHSLRIQKVLETANIKVASVLSDVLCLSGRAMLAAIIDGEDDPERLADLAKGKARNKRAELIEALRGHMTAHHRTLLKLHLDLIAALETALEQVDAAVGKALAPISYAVDLLKTIPGISDVVAHVIVAEIGADMSRFPTAGHLVSWAGLCPRNDESAGKRRSTRVRKSGTWLKTTLVTAAWAAARKKDCYLRSQFLRLKARRGPKKAILAVAASILTAAYYMLRDGVEYRDLGHDHFDRLDKTKVINRLVRRLGQLGCEVQIKHAA

SEQ ID NO: 513751 - protein, 386 aa, unidentified
MQASTVGTPTASRYGTIFITIELSQKSWLVTLHSPDQDKLSRHQLAGGDHAGLVALIDRIRDRAARALGGVPAVASCYEAGYDGFWLHRLLLAAGITNYVFDPASIAVDQRARRVKTDRIDGETMLRTLMAFLRGEPRVVRIVRVPSAEQEDARRASRERDRLVKEQTAHTNRIKALLRLLGMAIGNPRRRDWLSWLATQRDWQGQAVPPQMLGEIRHEHARLMLVRERLDALAKTPAQADPTPAAAQMIERSELLLSLKCLGPAFATTLTNEVFYKDFRNRREVASYFGLTPSPWRSGGIDRDQGISKAGNPRARCAAIELAWLWLRHQPDSKLTQEYRRRTLDAGKRIKRVAIVALARKLVVALWRYLTTGLVPDGAVLKAVKV

SEQ ID NO: 513752 - protein, 333 aa, unidentified
MLIIGCDFHPSVQQVAVLETESGRRWEGRLTHEGDQVRKFYAELPRPVRVGLECSGYSLWFEELLEELGIEYWVGDAAKIRAAEPRKQKTDRNDARLLLQLLEENRFPQIWVPDRATRDLRQLLMHRHKLVSMRSAVKNQLQAIALNRGVQKHRRLWNKEGRQQLRSFVLPPWTRRRCDELLRLHEQWDEQIAELDRVVLREAQANPDAAYLMKKVCGVGPISALATVLTLGPVERFPNARKVASYAGLVPAEWSSGPHQQLGHISKQGSPFLRFALVEAAGVASRYDAEFKRVYWRLAERRGKSIAKVAIARKLLTRLYWLLRLRSEKAKAR

SEQ ID NO: 513753 - protein, 318 aa, unidentified
MIKEFIGIDVSKGTLDAAAYTSGKKWRASNDDEGIDKLVKAIIGLTPVLVVMEATGGYETQMAYALYEAGICPAVVNPREVRNFAKATKKLAKTDTIDAQILAHFAAVIKPEPRPLSNEQSQELEALIARRRQVINMLIAEKNRLHMARKPVKDAIISHIEYLKKDLSQIDSELKGRIEESPVQREKYNLIQSVPGVGPNLAATLLIELPELGTLNRKQIAALVGVAPLNHDSGTKRGKRSPWGGRPQVRSALYMAALAATHFNPVISQFYKRLCSEGKAKKVALVACMRKLIIMLNTMIKYNTTWHIDQPVLAEVTV

SEQ ID NO: 513754 - protein, 336 aa, unidentified
MDYYSAIDLHSNNSFLVVIDECDKIIYERRLPNDLDKILFVLACYKDHIRGIAVESTFNWYWLVDGLKAAGYALHLVNTTAVQTYSGLKYTDDKHDERWLAHLLRLEILPTGYIYPRETRPNRDLFRKRMQLVQQRTRNILSLKSLYARWLGASFSTNDFYRNPDEFLPKDKAISLIARPNIELFKLMTEQIITIEKMLLSKKFKQRELFLLIKTLPGIGDILAMTVLLEVGDITRFKSVGNFSSYSRCVESKKVSNFKKKGSGNRKCGNKYLSWAFHEAAHHARVFYPEVDKFYERKKRKTNRIVAIRAVAHKLARACYHVLDKQEAFDMSKAFN

SEQ ID NO: 513755 - protein, 328 aa, unidentified
MEREYIGIDLHKAFFQVCAITSTGERQWEQRWPTSDAGIAGLLTRCGRQSRIAVEASSPTWAFVDRLVEHVDAVHVVDSRKTRLKAGYAAKTDRLDARRLADALRRDSVVGIYYPPPAIRDLRELCRYRCHLARLQASLKQRIHALLLRHGVAVPVKRLFGTRGSVWLEALRVPGWGGASLTGLRHVLRDVRAQLVPVLTAIRAIAASDAIACALDARPGFGPVFSVTLRAEIGVITRFPDGPHLASYAGLVPRVERSGGRQWSGRITKAGSPWMRWVLIEAAIHQLRRQDDFGRWARQLAVRKGILKARVAVARALCDELVDAWPRG

SEQ ID NO: 513756 - protein, 349 aa, unidentified
MGEVITIGVDIAKLVFQIHGVDAEGTVVIRRRVGRARVLEFFADLPPCRVGLEACATAHQWARELAKLGHDTRLMPPTYVKAYVKRGKNDAADAAAICEAVTRPSMRFVPIKSVEQQSMLMLHRARDLLIRQRTQLTNALRAHLAELGLVAAKGREGLHQLAAVVTECGNERLPSDARFACQAIVTQLHSVQIEISGLDKRISQTHRANADSKRLATIPGFGVILSTAVAATMADPKAFRTGRDFAAWIGLVPRQNSTGGKERLGSISKQGDRYLRRLLVIGATSVINSARARPYKYPWVIELLGRRPTKVVAVALANKMARIAWAVLAKGERYRAPTRSSNAVVPAAA

SEQ ID NO: 513757 - protein, 344 aa, unidentified
MNTIRVVGIDIAKSVFQVCVWMVDGSIAYNKKISRSKLLDCVRHFEPGTLIAMEACSTSHFWGRTFRTMGYSVRLIPAQHVKAFVRSQKNDANDALAICETALRPGIHFVPVKTAEQQDIKALRNTRQLMVEQRTALANQLRSLLAEYGLIIPVGIQCLQQHLPELMEDASNELTFTVRRLLSTLREDMQALNERVSGLDKEIAALSSQQAAYRHLLTIPGVGPVIAAAFISEVDAGQFSSGRELSALCGLVPRQHSSGGKQRLSSVTKNGNRSLRTLIIHGARSVMRCMKKRDDSLGLWLQRLEARRGFLKTTVALANKLTRIIWRVLTDGVDFNMQKAVAMN

SEQ ID NO: 513758 - protein, 333 aa, unidentified
MSEDQDVTVGVDTHKDVHVAAVLDQTGRVLGTRSFPTTMRGYAQLATWAESFGTVAKVGLEGSGSYGAGLLRFLTDYGLTVVEVDRPDRSTRRRIGKTDTIDAESAARAVLSGRASGTPKTRHAQVEMIRALRVARRGAMKARIQAGGQVEALIVSAPEPVRQLVRGLAGKKLIRVCAPLRPGTVSDPATATKVALRSLARRWLALQAEIDDLDSHLAALVTAAAPDLVALPGVGVDTAGQLLVTAGDNPHRLHSEAAFARLCGVAPIPASSGRTDRHRLHRGGDRDANRALWRITLVRMRCHQPTKDYVTRRTAEWQDQDRDHAMPQALHRT

SEQ ID NO: 513759 - protein, 349 aa, unidentified
MLADQLDYVVGVDTHLDEHVLAVVAAPTGAVVARQTVRANARGYQAALRFAGEAANGTRAWAVEGTGSYGAGLARYLAGRGESVLELSRTPRSERRLRGKDDSLDAIRTARAALASETHALPRSGEQREALRLLLIARRGAVDVRREALVQLRSVIVTAPDPLREQLRGLPVGRLLERCRRLRRSSSARTDELATRLVLRSLARRIEAASSEAAEHEREILAHVRALPPQLLDEPGVGPVVAAQLLVAWSHRGRVRSEAAFARLAGVAPVPASSGQTSRQRLSRGGDRQLNRALHTVVLHRRQHDPQTKDYIARRTAEGKSRREATRLLKRYLARRLYRLLENREPLLA

SEQ ID NO: 513760 - protein, 466 aa, unidentified
MKHNRRRSPGKPRVSPTVFERLNPNVAGIDCGSAEHFVAVPPDRDPTPVQSFTTFTSDLLRLADWLTACGVRSVAMEATGVYWIPVYEILEARGFEVLLVNARHLKNVPGRKSDVSDCEWIRELHSVGLLRGSFRPSDAIVALRAYLRHRQTLIESAGTYIQRMQKALVQMNLQLPLVVSDITGVTGLRILRDIVAGHRDPHQLAEHRDHRCRASKAEIVAALTGHYRPEHLFVLQQNLELFDACQTQLAACDTAIEAHVHTLSASLAAPTAALPAPRVTKKPRDNEPRFEIRAPLHQLTGGVDLTQIDGIAPYTALKLVSEVGTDMRRWATEKHFTSWLTLAPKNKISGGRLLSSRTQPSANRAAAILRMTAMSLGRTQTALGAFYRRLAARIGKPQAITATARKLAILVYRALKGELVYRDPGADAYDIQQRRRVLRQLRQRAATLGFELVDRGTGEVLEPAIS

SEQ ID NO: 513761 - protein, 340 aa, unidentified
MTVIIGIDPHKASHTAVTIGCDEQQLAEIRVRATCQQTAKLLAWAEPLGERTWAIESAGGLGYLLSQQLVEAGEEVLDVPATLASRVRVLGTGRSNKNDPNDALSVAIAALRSPGLRSVEPANHSEVLRLLAKRNHDIGRLRNIVVSRLHAALANLSPGGIAKELNASDAVRMLGDFDPTTPVEQTRYDLALELLDDVRRLDVQLKESHKRIKTAVQASGTTLTELYGVGPILACGLIGYTGDVRRFTTRDKFASYAGVAPIELSSGGRVVHRLSRRGNRQLNHAIHMVAICQIRQTDSEGRAYFERKVAEGKTKREAIRSLKRHVANAVYRQLLVDANK

SEQ ID NO: 513762 - protein, 319 aa, unidentified
MAKNPEGLYVGIDVAKAQLDIAVHSTGLRWRVVNDQEGIGTLVERLRDLAPALIVLEATGGLQAAVVAALGTAKLPVVVVNPRQVRDFAKASGRLAKTDAIDAEVLAHFAEAFKPDPRPLPDAQAQALEALLARRRQVVGMLVAEKNRLGTALPTVHEDIRAHIAWLEERLAKLDGELKDTIRQSPLWREQDDLLRSVPGVGQVLSITLLAELPELGNLNRREIASLVGVAPLNRDSGTLRGKRTIWGGRARLRAALYMATLVATRCNAAISSFYQRLLAAGKAKKVALTACMRKLLIIINAMMKHNRPWNPKFACQNP

SEQ ID NO: 513763 - protein, 403 aa, unidentified
MNNVVGIDVSKGKSMVSVLRPFGEVVAKPFSVGHTGSELKELADYLKSLDGETRVVMEHTGRYYEPVARFLHDEGVFVSAVNPKLIKDYGNNTLRKVKTDKADSRKIARYGIDNWAELRQHTPMDTIRMQLKTLNRQQSLYSKTKTMMKNNLIALLDQTYPGVNALFDSPVREDGSQKWVDFATTFWHVDCVRNMSLTAFAERYRKWCKRHGYNFSQSKAVEVHAGAQDLIAMLPKDALTKTMVRQAIDALNAISASLERLKAEMQALAAQLPEYPVVMTMHGVGDSLGPQLMAELGDVARFTHRNAITAFAGVDPGADQSGTHEAKSTRVSKSGPPELRRALFLVMDCLLKTQPQDDPVYRFMDKKRAEGKPYLVYMTAGANKFLRIYYGRVKEYLAQLENS

SEQ ID NO: 513764 - protein, 354 aa, unidentified
MLIIGCDYHPSFQQIAFVDTETGECGERRLQHREEAEKFYRDLAATGMKVRVGMEASGHARWFERLLGELNVELWIGDATEIARKRERKQKTDRQDAQHILRLLLKDDFPQIWVPSWENRDLRQLLWHRHRMVQARTRIMNQLQAVALNEGLRCKKRLWREAGREQLESFRLAPWASRRRQDLLELLDRLNPTIAELSQAIEQEAEKFPEARWLMTHPGVGALTALAFVLIIGRTDRFQCGKQIASYLGLVPLEDSSGDRRRLGHITKQGSSMLRFLLVEAAQVTVRSLPEWRSKYFHLMMRRGRKIAKVAMARRLAVCLYWMWRKGWDYEQVKKFGSHAGQLGTGRGGQYNTE

SEQ ID NO: 513765 - protein, 427 aa, unidentified
MPFAGLDVHKKEIEAVILDERGAVLLRDRFPSRREALQAFARRRLQDCRVALEATTNTWAVVGLLTPLVKEVVVSNPLRTRAIASAKIKTDKVDALVLAQLLRSDYLPRVWTPDEETRCMRQQTSERANLSADRTRLKNRIHAVLHQRLIEAPVKDLFSKAGLSWLRSLCLDAPGQRALERHMRQLAQVETEFQLLDEELAAHAYQHPQIKLLMSLPGVDYPVAESLLAVLGDIARFPHPDKAAAYFGLAPSTHQSGSHCYHGRITKQGSAHGRWMLIQAAQHVARHPGPLGVFFRRLARKKNRNVAVVATARKLVTIAWHMLKDNEPYRYAQPKTLEAKYRRLRVRVTGKKRKTGCKGQKRPASYGSGKRTRAVAALDEIYAVEGLPPLPARFAAGEQAMLERHRVAEHAAYIRQAHRIARKSLTS

SEQ ID NO: 513766 - protein, 368 aa, unidentified
MHELTTGFVGLDAHAESTAIAVAEAGRAAPRFVGTVGPRLAELTKALSKLGTPQSLCVVYEAGPCGYVLARELTRLSYRCEVVAPSKIPRRPGERIKTDRRDALKLAGLARAGELVPVRIPDERDEAIRDLSRARVDAVRARLKARQQLKALMLRHGRRYSGKTSWGAAHERYLAAVSFAHPAQDIAFTEYRQAISEAEVRVQRLSQSLTQEVEHGRMHSLVSAVMTLRGLDLVAATTVVAELGDLRRFAHPRELMGYLGLVPSEHTSGSKRRLGAITKTGNTHVRRVLIEAAWNYRYPARISRPLQLRQERQPAEIRAIAWRAQLRLNHRYRRLKARGLQHNKICVALARELAAFVWDIGRHVTPSA

SEQ ID NO: 513767 - protein, 392 aa, unidentified
MIYVGIDVAKDKHDCFITNSDGEVLFKPFTISNNRNGFETLFQRIQSVSDDSNKIKVGLEATGHYSYNLLGFLLDKGLTTFVINPLHTNLYRKSLSLRKTKTDKVDSRTIATMMMSDMNLKSYSNTSYHNEELKSLTRYRFDKVKERAKLKSSVSRLVCILFPELENLVPTLHMASIYALLSEFPSAEAVANAHLTRLSNLLSESSKGRYGKDTAVMFRDAARSSIGSHMPTKSLELKHTIKLIQELTAEIDEIEAAIKRIMDEEIQSPILTIPGISYRMGAMILAEIGDFSRFDSADKILAYAGMSPSTYQSGQLDNCYSHMEKRGSRYLRYALYNATKYVCHWDKSFGAYLEKKRSEGKHYNVALSHATKKLVRLIFAMEKSGKAYLPTT

SEQ ID NO: 513768 - protein, 330 aa, unidentified
MKQYNYFFGVDISKKTVDISLLHLQSITHKQFSNDRNGMQELSHWLKELQAVSGETLFCMEATGLYCFTLTHFLAKNAIDIWIEHAAQIKKSTALDRGKNDKVDSKRIAIYCSKNLDRLRLWRPMDATIDKIKHLASLRERLVETQKKILTPINEFEESGNTEMAKLLRKTIKKSIEAIDIDLKSVEVKIIDIVNADENIKQLYKIITSIVGIGFVTAINLIIHTNGFTILKDTRKLACYCGVAPFEYSSGTSVRGKTKVHYMANKKLKCNLHMASLTAVKLDDDLKIYYERKVAEGKNKMSVLNAVKNKLLARVVACVNKQKEYVNKRA

SEQ ID NO: 513769 - protein, 456 aa, unidentified
MAAKKKRRGKSSGQLSTINEHAAGLDVGSTFHVVAVRSDQDDEPVRTFRSFSGDLHAMAVWLKRVGITTVAMESTGVYWIPVFEILEAHGLEVRLVNARDAKNVPGRKTDVNDAQWLQQLHQHGLLRGSFRPRDGVACLRGYLRHRQGVVEYAASHVLHMQKALMQMNVQLHHVVSDITGVTGLKIVRAIVAGNRAPEDLAKHRDVRCAASEKTIREALTGNYRPEHVFALKQALALWDVYQAKIAECDVEIETALKSLNEKRPAPETTLPTRRQPKVKHEPNFDVRTALYTMLGTDLSQIHGFGPYTVLRLVAECGDDMTKWPTEKHFTSWLSLAPGNKISGGRVLSSRTRRSSNRTAALLRLVAVTVGKTQTALGAFYRRLGARIGKAKAVTATARKLAVLFYRALRFGMTYADPGAEYYEERYKRRVIDNLTRRARSLGFQLVRNDAAIEGVS

SEQ ID NO: 513770 - protein, 483 aa, unidentified
MSKKKREYIRGEKEERFKRKIRAIEKKEILGISIDVSKDYHKALIFDFEGRVVDGPFEFDVFKDGYENFKQRVEKAIEKKGAKKIFFGLEPTGPYHENLARHLKEDFQEVEFINPSATYANRAQDMLVGLKTDDIDLGAIGDLLMRGKGYQYNLKEAGVYLSLKEETFWREKKLKMQTRLKNQIKARLNKIYPGLMSKYKANKPLFSDLWNSQAARGLIRSRLTPAQIQSMKAEELIKQFKKRGCSLTQQWAEKILAYMKRMLPPPDEILAIDLDLVNRDLHLLKTLETEMSIVEERMIEAVKETDSSFLLGKIKGLSDIMIASFVGAVGRIENYKLGKQIFSKSGLSSKVNQSGRRNIKGLGIRRVGSKILRSILFKMADSVKRHNPYFALYYSYLTEEKGKFWKKAHIAVSNKMVRVMFAMLRDRADFNPPTAKIDYLEMLFNQRRNRRRQERKKEKENSPSPFFSPKGIRASERIPSPVR

SEQ ID NO: 513771 - protein, 465 aa, unidentified
MGNSRTQQKKLSSQSKGTGMLSKLNLNAAGIDIGSEEHFVAVPEDRDEQPVRKFRCFTADLHALAQWLKACRIDTVAMESTGVYWIPVFQILETYGFEVKLVNARHVKNVPGRKTDVCDCQWLQNLHTYGLLSGSFRPEDQICVLRSYWRQRDNLLRYAASHIQHMQKALTQMNIQLHKVISEITGVTGMRIVRAILAGERNSLVLASMKDRRILCSTEDIIKSLEGDYRQEHMFALKQAVELYDFYHQKIDACDRQIENCLAQFDSKVDIKTNPVPPSKKGNRKPRRNEPKIDLHTHLYRIIGTDLTKIDGLDVMTVQSVITEVGLNPGSFPTEKHFASWLGLCPDNRITGGKVKSSKTRKVVNRAAEAFRMAAESLHHSASALGAYYRRMRARLGAPKAITATAHKLALIFYKLWKNGESYLDPGQDYYEQRYKERVVKNMKAKAKQIGYSIILEPLADSAGS

SEQ ID NO: 513772 - protein, 421 aa, unidentified
MNQLAQMAFTAYVGIDWADAKHDICVQAAGSEDREFDRMAHKPEAIEAWAQALYQRFGGPIAVALELTKGPIVSALQKYDFFVIVPIDPQRLAKYREVFTPSGAKDDPTDAQFALDYLMRHPEKLTVLKPQSVPMRKLSYLVEARDRLKGDQSRFVNRLIQALKQYYPQPLDWFSERNTVVFCDFLIQWPTLEQVKRARKSKLETFFKDHNVRFAHVIEDRITAIKAATPLTHDEAVIHAHRLQVEVLVEQLRLTIQAIKRFDQEIVATAERLPDYDLLFSPLPGAGKVIAPRLLAAFGEDRERYPCAAELQRHAGIAPVTNRSGKSTWVHWRWQCSKFRRQSFIDWSAQTINKSAWAGAYYRQQRAKGASHQAAVRALAFKWIRILYRCWQDRTPYDESKYLEALRRSGSPLLKQLAEAA

SEQ ID NO: 513773 - protein, 317 aa, unidentified
MTQTSMTTAGIDTSKSKLDIALHGRAEQWQVANTLPGWRILTNKLTKAGVSRVGIEATGGYECGVVQYLRAAGFAVQVLQPVQVKAFGRMHLRRAKNDALDAVMIAACTAALDQVRDAPDPRLAELAEQLTFLEQVEEDIKRFKTRLEHTGEPRLRRMVLGEIVRMTARRLTQLRYIARQLRAHRDLAARLDLVLSIPGIGERTALAILIRMPELGRISREEAAALAGLAPFDNDSGQQKGQRRIAGGRARLCRSLYAAALPAAFRWNRALIALYQRLTAAGKAHNAALIACARKLLIYANTVVQRGTPWTERPLGV

SEQ ID NO: 513774 - protein, 330 aa, unidentified
MSDVAGIDVAARKLDVARLSETGSVQLRQFEQSPAGHQKLVAYLRKHKVEAVVMEATGIYYLDAAVALYNAGIPISVINPRAAHHFAKVMLQSSKTDRIDAQLLAEYARRMTLKPWRAPNEDWLALRDIARRINQLTGMRTAEKNRLHALQAQQHTRKTMIDELLAHIEQLEHSIERLTKAAVDVIGQDPVLTRYDACLTSATGIARASAVALLGELCLLPTQLRSSQVSRQAGLDVRLTESGSSIDQPGRLSKAGNTYLRAGLYMPSLSLVRHDPRAKAHYNALVARGKKKMQALCAVQRKMLTGLWACMHANEPFDSAKLFAIEPDQA

SEQ ID NO: 513775 - protein, 347 aa, unidentified
MGYFAGLDVSLEETAICIVDDVGQIVREARVASEAEALVAFFRACGMTMERVGLEACSLTAWLHAGLTEAGIPAVCIEARQAKAAMGAMPNKTDRNDARGIAQIMRTGWYRAVHVKSPSCRSWRALLTARRMVLNKRRDVENGIRALLREVGLKVGTPSRKDFAARVRELAADDPVLASLAESLLAVVEVMTREVERLTKRVLDEVRVEPACRRLMTVPGVGPLTALAFRATIDQPSRFRRSRDVGAHLGLTPRRYQSGETDVQGHISRCGDELARTALYEAAHSLLIRGTKWSALRAWGMNVAKRRGMARARVAVARKLAVILHRMWADGSEFRWGKPAAAPTVAA

SEQ ID NO: 513776 - protein, 387 aa, unidentified
MSRNARVPVPVTMLDQDSTLVVVLELSARSWLVGARVPGIGRMSRYALAPSAEALAAWLGTAKARAGVTGRTVVRVVLAYEAGRDGFWLARYLEARGVEVYVIQPSSVLVDRRARRAKTDALDVEMLMRTLLAWLRGEPGVCSMVPIPDVAEEDGRRPVRERQGLIGERLALLNEIDGLLATFGITGYRPLRQDRRAQLAALRTPEGNPLATNAAARIGRILARLELVMQQIAELEQARDAVLAKEAASGAAETMIRGLARLKGIGAELATVLVWEAYVRSFPNRKALGAYAGLTGTPFASGSTTREQGISKAGNRRLRSSLVELAWLWLRYQPDSKLAAWFRSRTGSAGSRMRKVMIVALARKLLVALWRFCRDGVLPEGAALKAT

SEQ ID NO: 513777 - protein, 310 aa, unidentified
MEHTTVVGIDVSKDRLDVHILPSEQAWAVSRDGDGLAELCRRLAGMSGVVALEATGGYESIVAATLTSAGLPLVVVNPAQIRAFAKALGQRAKTDPIDARVIARFAEATKPVVRPLPDQATRMLADLLARRRQIVEMMASEGQRLRRTEVPRVRKSIERLVVAMKRELGDVDHDIDDTMRGSPVWREKEDLLASVPGVGRIIARTMVADLPELGTLGRKQISALAGLAPFVRQSGKWKGQARIGGGRPTVRTVLFIGAQVAKRHNPVLKAFYERLITAGKSKMAATIAVAHKLLTILNAILRDKKPWQIA

SEQ ID NO: 513778 - protein, 349 aa, unidentified
MQFVRVSKQYYCGVDLHADVMYVCVMTKAGRAVFHHELPTDFPRLLHHLKPYLSSIAVCAESTFNWYWLADGCAQHNIPFFLGHALYMKLIHGGKTKNDRIDAKVMADLLRTGFFPPAYPYPEKMRATRDLLRRRSHFSQQHAEALRHIKTLLYQQGYTDLPTVHNYDAERISETFSGYKLPDDAAYSLQADLDMIRYLDTVTAKLEWRIEKNARGHDNHALALLKSVKGLGTILSLTLLYEIHTIERFKSPQCFSSYARVVKVERSSHGKKLGSKNSKIGNPYLRWAFGQLAVSAQRFYPGVKEYTQKLIRKYGNAKAYTLLAHKFAVAIYYMLKNKTAFDVTRFVAA

SEQ ID NO: 513779 - protein, 423 aa, unidentified
MSYKIAGIDVHKKMLAVVVSDVEVDGEYQFGRIRYASTPEHLRLLAEWLIAQQVEEVVMESTAQYWKPVWGALESYWEPICQERKGAGPMPGTLHLAQAQSNRGRRGRKKDFPDAERLVKRLVANELTLSFVPDAEQRLWRTVTRRKYQLTCNHVRLQNQLEGLLEECHIKLSSLVSDLLGASARRMLKALAEGETNPAALAAMADKNLRATPAQLCDALDACTELKPIYRQLLKMFLEELHLIDQQIGKLDQELASLLSRHHDAVVHLAEIPGLGVDSAQQIIAEVGAGAATFPSAKHLSSWVGACPGDEESAEVSKNHRSPQGNRHMRRILNQAANAAVKSKGTIFEIGYRRLISRLGHNQTIGAIAHRLCRLIWIILHRGVRYEERGPSVSAKSRRHRTNRMIRELRSLGYRVQPLGTTA

SEQ ID NO: 513780 - protein, 348 aa, unidentified
MENIGIDVHKTSSQICILSDDGELIERRIKTTRESFAQLLGARLPARILLEASTESEWVAQCLEGLGHEVIVADPNFAPMYATRDKKIKTDKRDARTLCEACRLGAYRAAHRTSERQRRVRAQLSVREALVRTRSRYISLIGALCRREGLRLPTGSSEAFITRVEQAELPECLRAEIEPLLQVMRAVDEQIEQADQRLAEIVKEDQVVKRLCTAPGVGPVTAVTLAATLDSARRFSGAKQVRCYLGLVPREHSSGERKLRGKISKAGNKRARSLLVEAAWTIMRSKRTETRALREWTAKVAARRGKRIAAVALARRLAGILYAMWRDETEYDPQLLGAKEAGERRMAA

SEQ ID NO: 513781 - protein, 456 aa, unidentified
MAKAKAKSKEKAGLPVVHPNAAGVDVGSQFHVVAVAADRTDEPVRTFSSFTHDLHRMADWLAAMGVTSVAMESTGVYWIPLFEILEARGFEVILANAREAKAVPGRKTDINDAQWLQRLHQYGLLRASFRPASDIAALRAYLRHRERLLDYAASHIQHMQKALTQMNIQLHHVVSDITGVTGLRIIRDIVAGVRDPAVLAEHRDVRCKASQQVIRDALVGNYRPEHLFALTQSLELYDYYQRQVARCDEEIERVLRGLARTAKPRTETPPTPRRKQRQANAPAFDVHGGLYALLGVDLTQIHGLGPYLVLKLIGECGTDMTRWPEAKHFTSWLALAPGSKISGGKVLSARTRRSANRAAALLRLAASTVGKTDTALGAFYRRLSARIGKAKAITATARKIAVLFYNALRYGLRYVDPGASYYEERYRQRIIASLRRRAQALGFVLQETPVLARGVS

SEQ ID NO: 513782 - protein, 400 aa, unidentified
MLSIGIDVSKGKSTVCGMKPGGEIVYTPFEVQHTREGMSELVSLLRSSGEEVRAVLESTGSYHCPVVAALLENGIFVSVVNSLRMKRFCSQSIRKVKTDRIDAMQIALYGLAYWQELQPTRLPEDTYRELQLLARQYYQMTSLLIKAKVDFNAICDQVLPGMQELMSDHAGRHKLSDFVLRYRHTTHILEMGETRFRKDYCKWAEKKGYRNHERMAALIFATAQNGIPVLPNAPSTQIVITEAIRVLHTVEASRDAILTQMQALAKTLPEYSLVREMPCIGDTLAPRLIAEIGDVRRFHSKRALIAYAGIDAPPYQSGKFCANNRHISKRGNRYLRKTGYEVMQSYVMHKPANDPIFTFIEKKRGEGKSGKLAMVAGLNKFLRVYYGKVTELYRSLPAIE

SEQ ID NO: 513783 - protein, 344 aa, unidentified
MDYFAGLDVSVKDTSVCIVDDTGKIVREVKVASEPEALLAVLENPAYHFKRIGLEAGPLSQWLFSALVEAGLPVICVETRHMRAVLKAQINKTDRNDARGMAQMMRVGLYRPVHVKTLRSQKLRMLLTHRKLLQSKAIAIDNDLRGTLRNFGLKVGMAGKARFEARIRELVESLPDLAALVEPLLIVRRTLREQFCILHRRLLAIVRDDEVCQRLMTTPGVGPVVSLTYRATVDIPARFRKSKSVGAVFGLTCAKYQSGEVDWDGRISRCGDEMMRTMLYEAAQAMMRSKKWSWLKAWAMQIARRRGMKKAIVALARRLAVIMHRIWVDGTEFRWTRGLAAAAV

SEQ ID NO: 513784 - protein, 339 aa, unidentified
MELYAAFDLHANNSLLGIIDGDGKRVFKKRLHNERELMLEVLRPHKEHIVGIAVESTYNWYWMVDALMEEGYRVHLANPSEIQKYEGLKHADDNHDAFWLAQMLRLGILPEGYIYPKQERPVRDLLRKRGHLVKIRTSLILSLQNIITRNCGLRLNVNDVKRLRENRVSPLLEENDDLGLAGMVSKETIDFLTHKIRKIERAVEGKIQLKKQYRYLLTLPGVGTVLGLTIMLETGPISRFAKVGNYVSYCRKVSTQWTSNGKRKGKGNKKNGNRYLAWAFSEAAELARRYNSQARAYYNRKMQKTNFMVAHSALSHKLARAAYFIIRDQVVFEPEKLFR

SEQ ID NO: 513785 - protein, 453 aa, unidentified
MARRNARVSLKPDKSRAALTITHPNAAGIDIGSASHFVAVPPDRDDQAVREFSTFTVDLNALADWLDACGVDTVAMESTGVYWIPLFELLESRGFTVLLVNARHVKNVSGRKSDVLDCQWLQQLMTYGLLSGAFRPAEQVCVLRCLYRQREMLLKSQGRHVQHMQKALTQMNIQLANVLADIVGVTGQKILRAIVAGERDGAALGALKNVRVHASADEIAKSLQGNWRAEHLFALKQALALFDFIGTQLSECDGEIEAQLQSLRTHDGDPTKGKKRSRSRNAPKFDLRVQLFQMCGVDLTRIDGVDVTTALAVVSEIGVDMARFPTVKHFTSWLGLCPGTKITGGKVMSGKTKRVVNRAAQALRLAAAALRSSKSALGAYFRRLCSRMDKPRAVTAAAHKIARLIYLMLTKGQEYTDQGQDYYEERYRERVLRALSQRAAKLGMKMVAIEQPA

SEQ ID NO: 513786 - protein, 347 aa, unidentified
MAGGSSMIRFMINEGVTDRRDRGLQKPWGSTGRHVRILNEPEQLRGPVSPHLQGWASKEVDMSNAPVFAGIDVSKAQLDLALRPGEGCSIPHDEAGLTVMVARLRALSPTLIVLEATGGLEVPLTGALAAAGLPVIVVNPRQGRDFAKATGKLAKTDTLDAQVLAHFAEVMRPLPRPLLDEHTQVLGTIVARRRQLIEMLTAEKNRLSRAPQPIRARLRVHIAWLQQEVARTETALAQAIRDSPVWREKDDLLRSVPGVGPLNRDSGTLRGRRTVWGGRAHVRATLYMSALVATRYNPVLQAFYRRLCAAGKAKKVALTACMRKLRIMLNAILKHRTPWRVAATGQA

SEQ ID NO: 513787 - protein, 344 aa, unidentified
MKDRTIGVDLAKNVFEIGISDRPGHVKKTCRLSRAKFLKFFVDQVPSRVVMEACGSSHYWAREITKLGHEVKLISPQYVKPYVQRNKTDRTDVKGLLEADRNSDIHSVPVKTVAQQQITALHRIRSRWMATRIGRINTLRGLLREFGFTIPVGARHVIPGATELIEDAEVDMPPVLREVFHEMCTEIRELEGRLQSVEKRLEALASQTPAVARLRSIPGIGLLTATAMVGFVGDVERFRSSRHFASYLGLTPREHSSGNVRRLGRISKRGDVYLRTMLIHGARSLLWSAHRKSITPSPLQRWGLRIHEQRGYNKATVALANKLARRVWAIWKRDSDYQADYRAA

SEQ ID NO: 513788 - protein, 450 aa, unidentified
MRLSWSQSPFRRILISSALSATSVVPAGAAWEREREDIMDVLHERAAGLDISKKDAKVCVRVPSKRAGYYANTITTYGAFTNDILRLRRDLEQAEVTVVVMEATGDYWKPFFFVLAETLNVQLVNAKQAKNIPGRKTDVSDARWLAELAAHGLLRSSFVPPEPIRQLRDLTRTRTNLTREQTREYARMEKNLEDAGIKLSLVASSLTTQSAHAILAAMVDGERDPHVLAGLAHVSMIKKAPELVEALTGRFSDHHAFMVKLHLDRINEIGASVQRLNDRIDSVMEPFLPAREALSMIPGLSKISSENILAEIGIDMSVFPTSAHLASWAGVCPGQNESAGRIKSTKTRPGDKYLKGYLGAAALSISRSDTTYLSVKFRRIQARAGKLKAVVAIEHTLLVIIWNMLSTGELYSELGVGYRQTRDPDKLRDRAIRKLQALGYEVEVTPTAAA

SEQ ID NO: 513789 - protein, 389 aa, unidentified
MKIYVGIDIAKLNHFAAAISSDGEIILEPFKFTNDADGFQLLVSKLESFDKNSIIIGLESTAHYGDNLVRYLVAEFYQVCVLNPIQTCQMRKNNIRKTKTDKVDTFVIAKTLMMQDNLRFVSFYDLDMMDLKALGRFRQKTIKQRTRLKIQLTTYVDQVFPEIQYFFKSGLHQHAVYALLKEAPSPKEIASMHMTHLANLLKVNSHGHFTKELAKELRVLAQKSVGANDSAISIQITQTIQQIELLDSQLEKIEAEMTDIMKFNDSVIMTIPGIGYINGGMILGEIGDIHRFSNPNKLLAFAGLDPSVYQSGNFQAKTTRMSKRGSRVLRYALVNAAWNVVRNNATFKAYYDAKRAEGRSHYNALGHCAGKLVRVIWKMLTDEVEFNLE

SEQ ID NO: 513790 - protein, 369 aa, unidentified
MNDITYVGLDVHKATVCVAIAESGRDGEVREVGVFENRPDILRKMVARLGKQRRRLNFCYEAGPCGYGLHRLLIGLGHDCVVVAPSLIPMKAGDRIKTDRRDALMLAKLHRAGELTPIWIPDAAHEAMRDLVRARATAVRALSKARQHLQGFLLRHDRIYPGARAWTLAYRRWLTTVRFDHPAQQIVLQDYIHAVEGAEFRRDRLTRQIEELMPSWSMAPVAAALQAMRGVALIVAVTVVAEVGDFRRFANARQLMAYLGLVPSEHSSGSTIRRAGITKAGNALARRVLIEGAWTYRMSARVSRKLHDRLEPLPAVIRDIAWKAQVRLCARYRRLAATGKPKVVVTTAIAREMVGFIWAIARVAQPELI

SEQ ID NO: 513791 - protein, 371 aa, unidentified
MYGSQATFHQKGGPPMNYVGIDYHKKYSHVTAIDEEGRVIRSRRLDNRPESFQEFFGRLQGPSETVLEASRTWGVMYDLLEEIEGVESVELAHPQKVRAIAEAKIKTDKIDSHILAQLLRADLIPAAYIPGKQTRSYKEMIRQRVFLVRMRTRLKNRIHVLLDRLHVPLPSVTDIFGKRGTDYLRKLNLAGVDGEILRENLQLLEALNTLIKEAEREIELLLGDNPLVKLLRTVPGLGPILAAVVALEIDRIERFASPSKLASYTGLVPSTYASGGKLFHGRLLPMSNKWLKWALVEAAWVSIRTSPYCRTYFENHKRHKGPHTAAIALARRLSEIVWHVLTENRVYEERPFQRQRRVSIMATSPAALTAT

SEQ ID NO: 513792 - protein, 354 aa, unidentified
MDGTLIQNEVILGVDTHLDTHVGVVINHQGKVIGTLTSIPTNRAGYLKLLTWAHSLGNIQRTGVEGTGTYGAGLTRLLREEGIEVWEINRPDRAKRRLQRKSDPTDAESAARAVLSGNATAVPKSQSGVAEALRMLSVVRRSTVKARTQTINQLRSLLISAPDDMRERLWKTKPEQCVAGCARLRKADGSVLLKTLTATLCLLAKRWLMLSAELKELDATLDHLTSQSAKRLRNQFGVEPQTAAVLIAVAGDNPERLRNEAALAALCGASPLQASSGKTIRHRLNRGGDRSANNALWTIAMVRMRSEPRTQTYVTRRTAQGMSNKEIQRCLKRYIIRELYPLILADLSDAATIT

SEQ ID NO: 513793 - protein, 318 aa, unidentified
MNVIGLDVSKDTIDATLITTKGSKDYIKISNSTEGFENLINWIKTKRIRKIAISMEATGIYYEQAAEYLSALYTIFVINPLKIKEYAKSQFSHTKTDKADSKLIAEFANRHLDKLTPFRPSENPILYKLVNLLQQLKEQQKETLNRLHTAKDIYIKSTHEAIIELLEEKIDQTSKRIEGMIKQKESLNIEYQNLQTIPAIGKETAVILLRHLTDKNFETANKFVAFAGLSPKIEQSGTSVNKKGRLSRYGHRQLKRALFMPALVAYRMGAFPQLVRNLESAKKPKMIIIVALMRKLAKIAFYIHKTKKPFDKARHQTV

SEQ ID NO: 513794 - protein, 391 aa, unidentified
MFYIGIDIAKKNHEASIIDSSGKSLSKSISFPNSAKGIKKFNNFIAEFGVTTNNCTIGMEATGHYWISLFSYIIDLGFTCYVINPIQSDVFRKMYVRQTKNDSVDSFIIAQIMRFGEFSISNFYDENTFALRNLTRYRFALVDECSDWKRKLVAILDQVFPEYSSLFSNIYGVTSKELLSKYPLPEDMLSISAEELGNLLCRCSKGRLGINKAKEIQSRARESFGIKFAKRSFSFQIKQIISQISFLEEQLKEIEIEISCLLEDICPVISTITGTGSVLGASIVSEIGNISRFERANQLVAYAGLDTRIKQFGDFSATNTKLSKRGSPYLRRSIWLAATVAAFKDPALSIYYKGLRVRGKAHGTAIGAVARKLTNIIFAVLRDQKPYTPNI

SEQ ID NO: 513795 - protein, 422 aa, unidentified
MLKRTQDDEKIIERVAALDIGKAELMCCVRVPDEDRPARRLQEVQAYSTMTRALLGMADRLACLGVTRVVMEATSDYWKPVFYLLEAAGFDTWLVNAKDVKHLPGRPKTDKLDCIWLCKVAERQMVRASFVPPPQIRRLRDLTRYRADLVAARTAEKNRVEKLLEDAQIKLSVVASDIFGASGRDMMAALIAGQRNPRELAQLARRTLRRKISLLEEAFTGYFTDHHAFLLGQMLARVDAISGDIAALDVRIEAAVAPFAGTVARLDEIPGISLPAAHAILAETGLDMSRFPTAGHLVSWAKYAPGVSESAGKKKGKNATGHGNTYLARILGNAAAAAGRTDTFLGERYRRIARRRGSTRGNVAIGRSILVIVWHLLSDPDARFVDLGSDFYATRTDPDRRMRTHVRQLEALGYTVTLQPAA

SEQ ID NO: 513796 - protein, 326 aa, unidentified
MTTHYILGIDIAKAKFDVALFINNKYKTKVFDNNNTGFKALSEWLTKHAITTSLHACMEATNRYGQALATYLFNAKFTVSVVNPAQIKAFSNSALLHNKTDKLDAKTIAHFCLAMQPRPWTPPPAHIADLQALVQRLNVLIDLQTQEKNRLTNSPIKVKASIKTVIKTLEKQIQSIQQQIHDHINSHPDLKQKSTLLRSIKGVGPATVATVLAFLPAVENFTHVNQVVAFAGLNPQQKSSGTSLKGKTPLSKIGHANLRRALYFPAIVALRFNTVFKALAERLTAKLKTKMTIVGAAMRKLLVIIYGVLKSNQPFNPDLAMPKFSK

SEQ ID NO: 513797 - protein, 349 aa, unidentified
MVADELDYVVGVDTHRDEHTLALVEAATGAVLAQQTVASNGRGYAQALRFAQQQVDAARVWAVEGAGHYGAGLARYLSERGETVLEVGRSPRGERRLSGKDDQLDAVRAARAALRSEPLPRPRSGERREALRLLLVARRSAVDVRREALVQLRSVIVTAPERLRQELRGLPVQRLLDRCSRLRRSTTPTPDQVAARVVLRTLARRIEAATVEADELEREILVHVRALAPELLDEAGVGPIVAAQLIVAWSHRGRLRSEAAFARLAGVAPLPASSGQTVRHRLSRGGDRQLNRALHTIVLHRRQHDPATRDYIARRIAEGKSRRDATRLLKRYLASHLYRLLQNQEPLLA

SEQ ID NO: 513798 - protein, 347 aa, unidentified
MVTLGTDSHKQSHTVVAVDENGRQLGELRVAATPAGHREALGWARQWQERRWAMENCRQLSRGLERDLLVAGEQVLQVSPKLMGRSRRSGRQLGKSDPIDAMAVARVALREPNLPVARLEGKSRELKLLVDHREDLVGERTRIQNRLLWHLHELEPGLQIAGGGLTRKVVLKEVKRRLEAHQGVVSEIARELVERLAELTISVNQLQRRIEVLAGELAPSLVSLPGCAGLTAAKLLAETADVRRFHSSGAFAMHNGTAPIPVWSGNQQRHRLNRGGNRQLNVALHRIAITQIRLGGDAAAYVARRISLGNSKAEAIRSLRRKLSNEVYQRLRLDGLGQLAQPTGVAA

SEQ ID NO: 513799 - protein, 343 aa, unidentified
MNGVSLLGVDLAKDVFQLWGVDKAGRKQLSKRVSRQRLLAEVGKLPKCLVAMEACGTSSYWARQFRRQGHEVRLIAPQYVKPFVKTNKNDERDAEAICEAAVRPSMHFVPVKEVEQQDVQSLHRIRQGLIRHRVALTNEARGLFAEYGVSMARGSKAFKEGLKRITEAEPGSIADVTPIMRQEAMKMLKRFFELQREIEEYDREIEKMSKENPLCRRLLAIRGVGPLSATAVVASIGNAKSFKSGRQFAAWAGLVPKQSSSGNRQVLLGISKRGDRYLRTLLIHGARASLVVKPKCPTRVSVWAEAVVERRGLNKAAVALANKNARMIWAVLAKEQDYQVSAA

SEQ ID NO: 513800 - protein, 392 aa, unidentified
MSQHCHFDASRSLTALEQDSTIIAVIEMSQTKWLVAALIPGVERQPLKKFDAHEETLLKLLHRWRREAGHAGRNIKRIVVAFEAGRDGFWLARWLRARDIEVYVIHPTSIAVSREHRRAKTDRLDTELLMRVFLGWLRGERRHCSMVAIPTIEEEDARRPNRERQTLVTEQTRIINQMKAIFTRFGIRTLRPTMRKVAEKLEDLRTAEGTPLPQNTLAELRRHLARLRIVRDQIRAVEQERLRKLAVASAAEKKSPHAMVRLIARVLGVGVETADMLVNEIFSRHWRDRKAVARYAGLTGSPDESGSRRRERGLARAGNVRVRSGMIQLAWRFVRFQKNSALAQWFAARTADGRASTRKTMIVALARKLLIALWRLVTRGEVPQGVALRPAS

SEQ ID NO: 513801 - protein, 374 aa, unidentified
MRDYSEAFVAFDTSKSRNAVAIAEGGRRGEVRFIGEIENSAAATAKLVRKLAGSHGRLTFCYEAGPTGYGLYRQIVSLGHDCIVVAPSLIPQKPGDRVKTNRRDAVGLAKLLRAGELTPVWVPDPRHEAMRDLTRGRGAAVEDLRRKRQQVSAFLLRQGLSYAGKKAWTKAHMSWLASQKLEYPEQRIAFEEMLLAVRQAQERIERLEEAIRVAVPEWSLAEVVTGLMALRGLDLISATAFLAEIGDLSRFRTPRELMAYLGLVPSEHSTGDKVKRGPITKAGNRRARRTLVECSWSYQHPPRIGKKKQEKVAAAPPAVREIAWKAQCRLNGRYRMLIRKGKLKTVAVTAIARELAAFIWAINREIATARAAAI

SEQ ID NO: 513802 - protein, 302 aa, unidentified
MGEVSTIGLDIAKSVFQIHGVDVEGAVVIRKRVNRAKVFEFFAALPSCLVGIEACPTAHHWSRRLQALGHTVRLMPPSYVKGYLKRSKNDANDAAAICEAVTRPSMRFVPTKSEQQQSILMLHRSRQLLVRQRTMLSNAIRGHMAELGIISAKGRNGTTELLDILANERDGRIPTAARFSLDVLARQYAVLMTEISVIEKRIHAWHRSCEENRRLQEIPGVGPIVATALIAEVGDWKAFSSGRGLAAWIGLCRGNIRLAARSDLAESQSRAIDICDGCSSPALWLSFAMRAGTAQRGCGWFA

SEQ ID NO: 513803 - protein, 346 aa, unidentified
MTYYAGLDVSLREISVCVIDEGGTIVTRDTMPADPMAVDGWFKNRKLSPKIIVHESGQLSIWLQRGFQELGLPAVCIDARRAHKSLSARINKSDASDAEGLAQLARTGWFTPVYIRSVEADRVRALVGARERLIRLRKDLEGHVRGVLKTFGIRMTGITKGKLRQNFRDQLAAAGETDPILRTLADSFIDIHARLCEAAADLEKALKTKADTHPVAKRLMSIPGVGPLVSLSFIALIEDPDRFAKSSDVGAFLGLTPKRFQSGDVDWSGRISKQGDKAMRALLVDAAATLIQNVKRFSALKSWAIRLAGRKGFRKAAIASARKIAVLMLTLWKSGAEFASKMETNA

SEQ ID NO: 513804 - protein, 467 aa, unidentified
MVCFNPSTKLTRVRPAELIVARWKQLSTRRKFVSYFAPLVDLSEDEERLLREVGTGMQVVHERCCGLDVHKKTVVACILITLANGEVQRHIRTFSTMTAGLLALSDWLESLTVTVIAMESTGIYWRPVFNLLEDGRTVILVNAQHMKAIPGRKTDIKDSEWLADLLRHGLLKASFIPPAPIRELRDLTRYRKSLVQERAREVNRVQKVLETANIKLSSVATDVLGKSGRDMLSALIEGTTDVEILAELARGKLRKQLPQLQQALDGRVQAHHRLLLKHLLAHIIFLEETLEQLQQEIEQHLCPFEETMTLLMSIPGIAALAAAAILAEIGDDMTRFPSAKHLASWAGVCPGNKQSGGKRLSGKTTQGNATLRAMLAEVVWVLSHMKDNYLSAQYHRLARRLGKKKAVVAVSHSLLVIISHVLSTKHPYSDLGADYFEQRDSARLTQRSVRQLEALGYTVTLVPKEVA

SEQ ID NO: 513805 - protein, 411 aa, unidentified
MDKIYDKCCGVDVHKKLMVACFRQGRKQEIREFGATTRELLKMADWLKSGGCEMIAMESTGSYWKPLYNILETSDLKAMVVNAGHIKNVPGRKTDVRDAEWIADLLQHGLLKASYIPNKDQRELRELVKYRKSLTEERTRELNRLQKMLEGANIKISGTIKDINGKSSRNILELIVSGETIDSARYDLLYKQKAIAHNLKASKEQIIDDLNGVMTDLQRKVIRVLLRHVDELTAHIKELDDDIDNFMKPEEKQAAKKIQQVPGIGNTSAQAVIAVIGTDMSRFPTQAHIASWAGLCPGDNTSAKKRKSGKTRKGNQLLRTTLVTCAHSAVKNKASYFYAQYMRISAHRGKKRAIVAVAHSILIAIFHILKCDYPFRDLGADYYNQFNRERKITAYLKKLKALGWEPSPAAC

SEQ ID NO: 513806 - protein, 497 aa, unidentified
MNIPNESAPSSIYRNQSVRLKAIFDEAKSPSRVLCVPLDFAKAKHVALICDGNGDVLKRPFPLHNSAEGVDFLDQEIQATARRRKIAKKHIFLGGEDEASDVENFVTALRDRGYLVVRVSAREAEKNRDNFLASTDGLDLLGIAKTMLARRARVARDPLEDEPSIYADIRALTRTRRRLVREQTATSNIIHAHVDRLCPGFLDSSKSGITAFGPASLSLMEERFSAPQIARRKPAALTKTLRNLHVHHPEEAARKLITLTEAALAPDPARVAARQRTLAASVHLYRGYETTSRELKFEAANLLASTPYAFLTSLPGISFVLAAGVAGELGNPDSMSPLDSLCAYAGIVPATYQSGGPDSPANTGKTSRRCNHILKNWVAQSSQKLRQYGPPEWKARFAKWEAGGQHHLFAGARRYLRLARTLVRNQIPYESPEARMRNATRAVRAASAEAAWETLVKKWRLVPGWQELVFAEDKPLGFWRQLAMELHGANLPLPKER

SEQ ID NO: 513807 - protein, 343 aa, unidentified
MQTVTTIGLDIAKSVFQVHGVDAGGQVVIRRQLKRRQVLAFFQRLPACLVGIEACASSHHWARELQVFGHTVRLMPPAYVKPYVKRHKNDATDAEAICEAVARANMRFVPIKTPEQQSCLILHRTRHLLIRQQTSVINAIRGHLAEFGIVAAVGRNGVEQLLGVVADANDKRLPEVARACLATLGAQLRVLKAQILEFDRMINAWHRSNETSRRLDKAPGIGPVLATALVATVANPKTFRSGRNFSAWIGLVPQQHSSGGKERLGHISRQGDRYLRNLFVAGALAVIRYAKIHGTQHRPWLAALLARRPTKIAAIALANKIARMAWAMMVKGEQYKEPAALAR

SEQ ID NO: 513808 - protein, 361 aa, unidentified
MLYSTSIGLDVHARSISAAAFVFETGEVVQRTFGYDPEAVAGWARALPQPAGCLYESGPTGFDLKRKLDALGVPCHVGAVTKMVRPSGDRVKTDRRDARFLARLLAVGEFVECVPPTPAMEAARDLSRAREDAREALMRARHQLSKFLLRKGLVWPRGRSTWTRAHREWLRSIELADPCERLVLDEYVAQVRECEERRDRLDAAIAERSRAEDLAGVTTRLRALRGVSTVTAFGVAAEVGDFSRFATPRALMSYVGLVPSESSSGESVSRGRITKTGNSHVRRLLVEAAWHHARPLSPASETDASASSGLSAEAAGIASRANRRLHRRYLDLRGRGKGANVTNVAVARELVGFCWALALAG

SEQ ID NO: 513809 - protein, 355 aa, unidentified
MTSCCIPINKEVICNMKNKKYFIGLDVHKERTSYCVRDKQGNILTEAEAATLYSELEPQLKPYLAASIIGLEASTSYYTLYQNFLRNSYHIKVANTIQLRQLIAKNDKLDAQRLSEMLRLGTFPESYIPEEKIQHLRSLVQLRHSLMEEKVRCNNRIQAFLDKNGVVMPSQEAFGKKWRHALVQYMGSGDVSLEMRYEYDHFEFLEKKNTQLDLEMQGYTYKHWPMEYKIIQSITGFGPVLSCYIIAHVHPINRFISNRKLRRYAGVVPTYKESGGTKSKGHIPKTSSRKLLRWALIQAANAAGRTNTKLGRYYRMKKKQKNNASIAHVAVASSMIDIIFKVLTTKKPYTSSCVN

SEQ ID NO: 513810 - protein, 389 aa, unidentified
MKIYVGIDIAKLNHFAAAISSDGEIIIEPFKFTNDADGFQLLVSKLESFDKNSIIIGLESTAHYGDNLVRYLVAEFYQVCVLNPIKTCQMRKNNVRKTKTDKVDTFVIAKTLMMQDDLRFITFFDLDMMDLKALGRFRQKTIKQRTRLKIQLTTYVDQVFPEIQYFFKSGLHQNAVYALLKEAPSPKEISSMHMTHLANLLKVNSHGHFTKEQAKELRVLAQKSVGANDSAISIQITQTIQQIELLDSQLEKIEAEMTDIMKFNDSVIMTIPGIGYINGGMILGEIGDIHRFSNPNKLLAFAGLDPSVYQSGNFQAKTTRMSKRGSRVLRYALVNAAWNVVRNNATFKAYYDAKRAEGRSHYNALGHCAGKLVRVIWKMLTDEVEFNLE

SEQ ID NO: 513811 - protein, 344 aa, unidentified
MTYYAGLDVSLRSVNICVIDDQGEHIAESKLASDVQDIIAYLDDLNIEIDCVGLEAGTLSQYLTYGLQSAGFEVICMEARQVKAALSAMRNKTDKHDARGIAQLLRSGWYSRVHIKSMHSHHIRLLLSSRKAVLSKCVDLENEIRGLFKIFGIKLPPRLGHGAFDDAVRGIIEADESLSHALLPMLDARLMLYQTFRVLDNRTRKLAYDDPICQRLMSAPGVGFVTALTFKAGVDDPSRFKHSRTVAAHFGLTPRRFQSGEMDFDGHISKCGDADVRSALYTAANAMLTRSSRRSSLKAWGINLAKTRGHRRAVIAVARKLAVILHQLWINDTQFRWGCEGARS

SEQ ID NO: 513812 - protein, 429 aa, unidentified
MSYRIAGIDVHKRMLAVVVSDVEVDSEFHFERRKFSSSPEQLRSLAAWLLEQEAEEVVMESTAQYWKPVWEALERYWKPICEKREVARRKSGALHLAQALSNRGRRGRKRDFPDAERLVKRLVAQELTLSFVPDAEQRLWRTVMRKKYQLRCDRIRLQNQLESLLEEAHIKLSSFVSDLLGLSAQRMLKAMAQGETSPATLAALADKHLRATPEQLCDALGACTELNAVYRRLLGMALQELQLIDEQIGQLDQEMASLLSAHQDAVQRLAEVPGLGVDSAQQIIAEVGSTAATFPSDKCLSSWVGACPGDDETAGVNYSHRSPKGNRQMRRILNQAANAAARTKGSIFEIVYRRSVPRLGHNQAIGAIAHRQCRLIWLILHQGVRYEERGPAVTKRSKQLRTWRMIRQLRSLGYRIEPANPLPSQAHAQ

SEQ ID NO: 513813 - protein, 358 aa, unidentified
MSGLRYRTWGAAMKHFAALDVSLKQTSVCIVDDAGGIVREAKVATEPDDLRTFFRGTGLTFERIGLEAGPLSQWLHASLTMAGLPAICVETRHAKAVLSGLANKTDRLDARGLAHMMRTGWYRPVHVKTVASQELRLLLTNRKLLVNKRVDIDSEIRGTLRGFGLKVGPVTPRQFEAQVRELVADRPQLLAVVEPVLRVRAVLISQYQVLHRMVLDAVRDDPVCRRLITVPGVGAVVALTYRATIDQPARFAKSKSVGASFGLTPRTYPSGETDRTGRISKAGDALTRAALYEAAHTMLMRVTKWSSLKAWAVRVASRRDRQKAIVALARRLAVVMHAMWRDGTEFRWTSRGDVAPAL

SEQ ID NO: 513814 - protein, 308 aa, unidentified
MARNFIGIDLSKARLDIHDPQTGKDSCCPNARTGLRRFVRGLAPDDIPVFEATSGCDRLLIEELTLGKRRFVRVNPLHAWHYAQSLNLPKTDRVDARMLARFGTERQPAPTPLRDPARDELAELTGRRDQLKRMETEEKNRLARTANPIAARDIRASIKTLAQRIARFDAEIRACIAHNPKLSETARLITSVPGIGPVVAAGLMAWMPELGTLDRRAVASLGGLAPKARESGMYKGHRRLGQGRCHVRRMLYMAALSLWRNPGVVGDMVPRMRERGKPNKVILIALARKILTFANAVLRDRKPFQSNA

SEQ ID NO: 513815 - protein, 343 aa, unidentified
MQAVTTIGLDIAKSVFQVHGIDAEGKVLIRRQLKRRYVLAFFEKLPPCLVGIEACATSHHWSRELKGLGHNVRLMPPAYVKPYVKRQKNDAADAEAICEAVTRASMRFVETKTPEQQSCLMLHRTRQLFIRQQTSVIKAIRAHMAEFGVVAPVGRQGVEALLEAVADVGDNRVPEVARACLAALGAQLRMLKAQILEFDRRILAWHRSNETSRRLDAIPGIGPALATALVASVADPKAFRSGRNFSAWIGLVPKQHSSGGKDKLGGISKQGDRYLRSLFTAGALAVIRYAKLHGTQHRPWLTALLARKPTKVAAIALANKLARMAWAMMARGERYREPVALAA

SEQ ID NO: 513816 - protein, 367 aa, unidentified
MKKGIHSIYLNTKSMAILKQVVGIDVAQHELVTSIGRINHELILEIFDYKVFPNTQKGFKELVKWAEKHVESTVKFRYVMEATGVYHEALAYYLTNNNVEVSIVLPSKISNFFRTLNVNTITDKTASQAITRFGLERNLDVWQKPNEVFRTLKQLTREREQLVSDKTMLISQLHAEKAQAFPNEASISRVKRRVKLIDQQESEVKEEIACIVKQDLELARQIDTITTIPGVGKLTAIIVLAETNGFEMIRSKKQLVSYSGLDVKQKDSGTSVRSKPKISKKGNRHLRKAMYMPALTAIRCNEAHKALFARLVSRHGIKMKAAVAVQRKILELIYSLFRSGKPFDKDYISSNMQFKKNLALNSLGQPS

SEQ ID NO: 513817 - protein, 404 aa, unidentified
MKTLNTNVACAGMDVHYKFSNVTFRDTNGDVVSRQRLDHPDRRKLRQRLAQWPPGLPVIMEASFGWGWLSDLMDEYGMKVALSNCFKVEQMRRARGGVKTNKKDADLLSLLGFEQTDWWKVWRAPSEVRNRREQMRFRADLVAMQTAVKSRIHAIFHRHGIFHDFSDLFGAKGRVFLNELCMKNTAHLSVEALAALRGQVKLLDHLRRQLADVTRVLHRQMARTPLTVRLKTVPGIGLVLAHVLAAEIGHIERFRTHKSLAAYSLLAPRSSDTGEADPRHSPQGRHLGVQGNRTLKWAWIEAAHGAVRSRGRWRDLFERVTDGGRKDRGRGYIKVARELVKVTYAVWSKGADYRDVRPTRGGSDTSTSKSKNMSKSMSKCKTRRKPSRSETGQLYHPMVHALTA

SEQ ID NO: 513818 - protein, 389 aa, unidentified
MFYVGIDVASEKHDCCILDEKKKIIQFFSFSNSSSGFAALLTSLEKLPAGEIKIGLEATGIYSENLSVFLRRKGFDVTTINPLLIKKHQCATTLRKTKTDKADAKGIALFIAEEGFQPDLDVSYHIQELKSLTRARFSLVQNRSALKNKVKRLITLLFPELLSEFSDIFGVSALALLKQYPSAAKLAACHTDTLAALLRKSSRGRFGKAKAEHLKLLAKNSIGNHSNARVLELRMLLEQIELFSEQIQTYDREIKIIMDQIDSPILSIPGIGYTLGAIIVAEIGNINRFASPAKLLAFAGLEPSIYESGKFVPKSGRMVKRGSPILRWALLQAAGSVVKYSSTFAFYHSKKLNEGKSATVARSHVAKKLVRIVYSLLTHSSAFSDQLAA

SEQ ID NO: 513819 - protein, 410 aa, unidentified
MQTLVERGCGLDVHQATVVACLLIVLKNGRVHKQMRTFGTTTRELLTLRDWLLSEGCTHVAMESTGVYWKPVYAILEGALEIVVANAQHVKKVPGRKTDVKDAEWIADLLCHGLLRPSFVPPKPIRELRDLMRYRRKLTESQAAERNRLLKLLETTNIKLASVASDVFGVSGRLMLEALAQGKATPQEMAELAKGLLRKKIPELEPALEGRLEEHHRFLLELQLRRLEAAEEDLAALQQCIQEKLKPYAKQLALLDEIPGVDWTVAAVIIAELGVDMSVFGSASQLASWAGVCPGNNESAGKRRSSRVPKGNVYLKTALVEAANAATRAKGTYLRDKFFRLKARRGYKRALVAVAHKILVAIYHMLSQEVCYNDLGDLYLDRLNKHHLTRNLVHRLERLGYTVTLEQKAA

SEQ ID NO: 513820 - protein, 369 aa, unidentified
MNKFSKYVGLDVHQETIAVAVADTAGEVRYMGEIVNTPEAIAKVVGQLKRGTGRLAFCYEAGPCGYTICRQLRQLKLDCQVVAPSLIPKKPGERVKTDRRDALSLARLHRAGELSPVWIPDEAQEALRDLTRAREDMKHLQRQAKQRLLSFLSRHGHRYTGRSRWTQAHWRWLEGIKFARPEQQIVLQEYIDTVQACGGRVASLDREVETAAHANAVWPVIEALMALRGIGLLAAVTVVAEPGDLARIAGPPELMAYLGMAPSEHSSGKRERRGAITKTGNSHVRRVLVEAAWTYRHAARKTAILQRRAERTPPEVQEIAWSAQKRLCQRFRNLMARGKLKNQVCTAIARELVGFIWAVGQHVIPLSRA

SEQ ID NO: 513821 - protein, 404 aa, unidentified
MHDSTFYFGGVDWAADTHAVCVVDDAGQVIVEFDVAHTAEGLAEMCSRIERAGAGRVAIERPDGPVVDALLEAGLEVVVVSSRSVKALRERYGTSGNKSDRSDAYVLADCLRTDGHRWRNLEPDSPATVTLRAHVRARKDLVRTRVAVANQLRAHLRVVFPGAVGLFAEIDSPISLRFLQRFPSATPAHWLSEKRLAAWLRANAYCGRTSPGELYRRLVAAPAGPTGHPSDARGAITLAYIAVLKSLRAQIDALTHRLEVLLDAHPDGAIFRSLPRCATVRAATLLGEIGDCRARFPDAESLSCLAGVAPSTRASGRHRAVTFRISSDKKLRDALCDFAGDSWRANAWAQARYRQLRADGKSHPHAERILARSWAHIIWRCWQDHTPYDPTRHRGHQRLTQQAA

SEQ ID NO: 513822 - protein, 359 aa, unidentified
MPTKTSTKYVGLDVHKNTTSIAVRNGDGKLIMESVIVTSQEAIVSSIRGLSGTVHVTFEEGNYSAWLYPLLVRRVAKLIVCNPRKNALLKAGNKNDRIDACKLSELLRLGRLSNVYHVDHGLQTLKELGRTYSTLTQDTTRVMSRLAALYRSRAIPHQGRALYTRKRRSHWLAQLPVEPKGLRIRAESLFQQLEATQQLRRQARAQLLTESRKPPASKLLPSIPFIGPIRTALLIARLQTPHRFRTKRQLWQYCGLALETRTSAEYGLVDGQIQRRKKPVLVRGLNFDHNHQLKEIFKSTATAASAQPGPLRDYYLGLTDHMEPEMARLTLARKIAAVTLAIGKKGERFDPSYLNPQAA

SEQ ID NO: 513823 - protein, 359 aa, unidentified
MRQLYAGCDLHGNSNLIGIVDGEGKRVFKKKLSNDFSLVRDTLKLFQEELVGIAVESTYNWYWLVDGLMGEGYKVHLANPSAIQQYVGLKHADDKHDAFWLAEMLRLGILPEGYIYPKQERPVRDLLRKRGHLVRLRTSLVISLQNILSRNLGRKVNVNDVKALREDRVTPLLESSEELALAGRVSKEAIDFLTHQIRRIEGVVEKRIELKEEYRYLLTLPGVGKILALTMMLETGPIGRFATVGNYVSYCRKVPSQWTSNGKRKGSGNKKNGNKYLAWAYAEASELARRFYPEPRAYYNRKMQKTNAPVAHSALAHKLARAGYYVMRDQVPFESQRLFGRERGWNGEPELGLVKSHEA

SEQ ID NO: 513824 - protein, 441 aa, unidentified
MDDAEVLELEQRVEQVARVAAIDVAKASGMVCTRLPSEANAARRVQRTWAVAATTEEIIALGDHLVCQGVELVVMEATGVFWKPWFYLLEDRGLRVWLVNPRDVKNVPGRPKTDKLDAIWLAKLAERGMLRASFVPPEPVRRLRDLTRLRRTLVEERTRYRQRVGDVLQDACLKIADPKQGLTDLFGVSGRAILGALIAGQRDPKALVALAHPRLKSKAAYLETALTGRFTAHHAYLTGKLLDLHDRLDTDIAELAGRIEALITEIDPSPPPDGRQPDRVPLLDRLDEIPGVSRETAAEILGEIGFDMSCFPTPGHLASWAKLTPRTIQSGNKNTHGKTGKGNRWIKGPLGQAAVAAGKTPTFLGARYKRIVKHAPKKKAQTAIARNILEIIWVLTADPDARYTDLGPDWHTRHTNTARKTRQAVRDLEQLGYTVTLAKAA

SEQ ID NO: 513825 - protein, 346 aa, unidentified
MSHKTAATAAHTIGIDTGKNTLHLIGLDDQGAIILREKIARGRIAARLANVPRCLIGIEAGMATHYVARELSALGHDVKQVPPAYAKPFRQGHKNDFRDAHAIAEAVQRPSTRCVPVKTDDQLDLQALHRVRSRLVGQRTAVINQIRGFLLEHGIAVRQGLRFLRQQLPDILAKRSDVLSPRMIRIMEDLSGDWRRLDERIEHVTKEIEVLAHGSESCRQLMTVPGIGPLIASAMVAAIGNGTAFAKGRDFAAWLGLVPKQMSTGDRTILGRITKRGNRYLRTLFMQGARVILLRPANWAKHSFGLWLTAAAQRLHHNVLATALANKLARIAWTVLMQARSYEARV

SEQ ID NO: 513826 - protein, 459 aa, unidentified
MGKAKACKGGKNQLQVIHPRAAGIDVGSKFHVVAVSAEYDPDPVRKFNSFTTDLHRLADWLKAVGVTTIAMESTGVYWIPVFEILESRGFDVILVNAREAKRVPGRKTDIKDAQWLQQLHQYGLLSASFRPGEKIASLRSYLRHRERLTEYAAAHIQHMQKALMQMNLQLQHVVSDITGDTGMRIIRAIIEGERSATKLASYRDPHCKQSEKTISAALTGNYRPEHVFSLKQAVALYDFYQKQIKECDQEIEKALAALNSDKNPPSEPLPKARRTQKQKNEPGVPIREMLYTLTGVDSTQINGIGPYTTLRLVAECGTDMAKWPTSKHFTSWLTLSPGNKISGGKVLSSRSRRTKNRATTLLRIAAVNIGKTQTALGAFYRRLAARVGKAKAVTATARKLAVLFYTLMRYGKAYVEPGADYYERQYRERVLRALSRKAAALGYRLAQKQETSPVTGNVS

SEQ ID NO: 513827 - protein, 462 aa, unidentified
MKHTREKKHQEKHPERESLPLITPNAAGIDIGSSEHWVAVPEDRDENPVRSFGCFTADLHAMARWLKKCGVTTVAMESTGVYWIPVYQILEAYGFEVKLVNARHVKNVPGRKSDVSDCQWLQRLHTYGLLSASFRPENEICVLRSYWRHRDNIVRYASSHILHMQKALTEMNLQLHMVISDITGVTGMRIIRAIIAGERNREKLALMRTPGVKSTSEEIAKALEGDYREEHLFVLKQAVELYDFYHDQIDACDKEIEICLSRFDTKVDLESHPLPALKKGKKKSKNGPLADLRAHLYRMTGVDFTQIDGLDVLTVQTIVSETGLSPDAFPTMKHFTSWLALCPDNRITGGKVKSTRTKKAANRAAMAFRIAAQSLANSNTALGGFYRRIRARLGAPKAIIATAHKLARIFYTLWKTHKQYVDLGARHYEERYKDRVVRSMKKRLHDLGYAVTIEPMAAAASL

SEQ ID NO: 513828 - protein, 388 aa, unidentified
MHGVAAQSEAPIAIRTDLRAIFVSLELSRSTWLLTSLSPGAGEKMSKHLVSASDTAGLFSRFAELQQKARTRTGRTFSIITIQEAGLDGFWIHRLLQGEGIESWVVDPASVLTSRRRRRAKTDKIDGETLVRTLLAYKRGEPRVCAMVKAPTPEEEDRRRICRERKTLTAERIRHVNRIKGLLFAQGIGDYEPLRRNRRGRLEELATGDGRPLPEHLKAQISRELDRLEIILAQLKAVGSERDAMLEPAKEGPPTPASLLAQLKGIGPEFAAVLWSEGLFRSFNNRRQVAAYAGLAPTPWQSGSVAHEQGVSKAGNPRLRTTMIQLAWLWLRHQPGSALSIWFRERVQRNGGRGKKTAIVAMARKLLVALWKYAVHGILIDGTKAKAT

SEQ ID NO: 513829 - protein, 365 aa, unidentified
MTEVTRGAAARVGVDLSKRVFQVHAVDRSGRKLLAKPMAPERFFAWCAELPAGCLVAMEACGGAHHAARRLRLLGLDARLIAGHFVTPYRMAGKSGKNDANDAAAICEAAGRPHMRFVPVKTAEQQGQLSVHRLREGYKAERTALINRIRGVLAEFGLVFPQSPEALRRVLAEVLEDASNELTGIARLVLQRAHLHWIDLDLQMKWCDERIEAHARSDERASKAAALQGIGPIGASALVASVGDFKQFDNARQFGAWLGLVPSQNSTGGKAKLGRITKRGDDYLRTLLIQGAKSAVMTASKRSDRISQWLVQLKERVGWQKAVVALANKNARILWAVLTRDGRFDPNHVPEAPAPHCALSQRPAL

SEQ ID NO: 513830 - protein, 346 aa, unidentified
MLYAGLDLSRKRLDFHLLDVEGATVEVGAAAPDADGLRGLTKRLDRHGGPIRAAIESMNGARFVHDRLELAGWQVEIADAQKVKGLAPLACKTDRIDAWVLAELSRRELVPAIWLPDPRVRAERERARWRLHLVRHRSSLKQRVHAVLLAHGKPCPVSDLFGVRGRQLLAGLPLPEPWYDNVQVSLRLIDELDREIDHCQSELRRLGADHRYVPLLCSVPGISWVLAYTIAAEIGDIGRFPTPGKLAGYTGLCPRVYQSGESDRRGPLAKQGPRYLRWALVEAATHACTHRVYRERYQRTKARVGKQRGAKVAQVDLARRLAEAIWHMLTRNQPFAPAGATDPLAA

SEQ ID NO: 513831 - protein, 338 aa, unidentified
MKLYVGMDLHATNTYVGMVDEENKVLHKQRFRNELPLILSSLDPFKKDIQGVVVESTFNWYWLVDGLMAEGYRVHLANVSAIKQYEGLKQIDDQRSAFWLANLLRLGILPTGYIYPKEERPTRDLLRKRLQLVRHRTSHILSVKNILARNLGMRMKSGDVKKLQAPEVKRLFPDREMRTAVLASLGLIRHLEEEITEIEAMILKKLKIKKEFARLLTLPGIGKILALTIMLEVGNIGRFPTVGDYSSYCRCVKSIRTSAGKVIGYGNRKNGNKYLSWAYVEAAQFARRFHETVRTYYQKKMARTNRIVAIKALSHKLTRASYYVMRDQVDYDPARLFR

SEQ ID NO: 513832 - protein, 400 aa, unidentified
MECVFGIDVSKENANVAVLVDNVVIKQFKIGLDRLGFSLLSDELNSFNAPLIIYEATAMYSRRLRAFLQRDGWKYTELNPLAAKKVMEEFRHTKTDALDAVGLARAMIKNHFRPTYQESPVYTELHDLERTYQQFNKDIVTNKNRLHRALQLTFPEIEHFMSSTDGVLYWHIVQRFPHPAIVLSHEENELTEIILTETSKKIGLKRAMKLANRLLALAQNSAPAKEPQSHAVRAVIALAKEVERINQLKAQIIVEMTTLGENLSEVPLLVSIPGIGIKTALCLIAELGDVRRFHSANAINAYIGIDLIRYESGQYEAKMHIRKRGNPYVRKILYRAILNIISVSQYQPTLISANYKRKKQSAQSHGTKKIAIAAMSQFNRLMHHLILNNELYDSTTFMPE

SEQ ID NO: 513833 - protein, 344 aa, unidentified
MKDVRILGVDLGKNSCSVVGLDAAGAVVVRRRMRRESIVALAAKLPGCIVAMEACCGAHHLGRLLAGRGHEVRLMSPEYVRPYVKAQKNDDRDAEAIAEAATRPTMRFVALKTEAQLDVQVLHRVRDRLVGQRTSLMNQMRSILLERGTVVAQGRRSLLDALAALTEQADASGIGSRVRLLLDDMLDQWRALDERIAALEDEFAAMARTDPAARRLATIPGIGVMNATALVAAIGDGRTFSRGRDLSAWLGLVPRQATTGGRPKLLGITKRGSKYLRKLIIQGARAALPSLARTATPIGTWLRGLLARAHANAVVVALASKLARIAWSLLRHETAFAAGRLTVA

SEQ ID NO: 513834 - protein, 331 aa, unidentified
MKKQNWVGVDVGSRELVVAVERNEKRDGTLSFENTAEGHRKLIHSITKRGASARVVLEATGVYGFDLALALERAPRVEVMVANPRAISHFGRASLQRSKTDVLDAEVILEFAKRMPFEPWIAPAREILDLRAISRRMEALTKMATQEKNRLHASDQSEELGEVVRADIAFSIEHLESRVAQLRDRALQLIDSHSHLRDAFGHLTSVKGIAEVAGIQILAELAILPKDMSVRQWVAHAGLDPRQYQSGTSVHKPARISKTGNAHLRRALFMPALVAVQHEPHVTAFYEKLLGRGKTKMQANVAVMRKLLHAIYGMLTHDQDFKGEKFYAIGA

SEQ ID NO: 513835 - protein, 455 aa, unidentified
MNCYLGIDVSKGYSDFIIINESLESVEPAIQLDDTARGHQVLETWLKEIIIRHHISKIYAGVESTGGFENNWFSCLSKLSKTLPVQISRLNPSVVKNAARANLETQVTDALSAKNIAAYLVRYHDQVDYNQPENVYKSFRSLHNHITLLTKQRTQLINELKQLLYACFPELQRFCKTSIPQWTLSLLVKYPTAKKLSKAKLSSIIKIKGISESKAAVLLKNAKKSVASRSYTIDGFLISSMGTEIIHKKKSIDKLKKQLVDSCQGEEVKRLETIKGIGAYSAASIMIQIEDITRFPSPKQLASYFGLHPTIRESGDKKSVSRMSKAGRPAVRALLFMCANSAVIYDEHFKTIYANQRAKGKAHKQAIGVVMHKMLRVIWGVLHNKTNYNPEVDQENQRKTESIETNLISNIKHKRRLQNYDKNAPISRVANKKRKIHQHAQASNAEQIRALADAP

SEQ ID NO: 513836 - protein, 381 aa, unidentified
MFAETTTADQYTANQPHLYMAFELSQSKWMLGFTIGFGQRPRLRNIAARDRAAVQDEIQLAKQRFGLSPDAQVISCYEAGRDGFWLHRYLLSMGVANLVVDSASIEVNRRAKQAKTDRLDLGKLLTMLMRYQAGEKKVWRVVHVPSPEVEDHRHLHRELTDLKEQRTQHINRIKGYLSNQGLCLDVDDDFPEVVEHQRLWNGEPLPAGLQAHLLCEYQRFQVVQQQIKALEAERREMIGSSTQPEVEQVRRLLRLRGIGINCAWLYVMEFFCWRAFRNRREVGALAGLTPMPHQSGEEGRELGISKVGNRHIRAMAIEIAWIWLRYQPNSELSLWYQRRFANGSKRLHKIGIVALARKLLIAIWRYLEFGMLPAGAVLKST

SEQ ID NO: 513837 - protein, 442 aa, unidentified
MRKREDEVFPNAAGIDIGASSHWVAVPRHLAEAAGEELVREVGAMTDDLNELARWLVKLGVDTVAVESTGVYWIPVFEVLEQHGLKVWLVDARQLKYVPGRKSDVQDCQWLQKLMSLGLLHAAWRPSAEVCVLRAVARQRETLLTSQASWVQRMQKALVQMNIQLTEVLTDVMGVTGQAIVRDIVAGVRDPEQLARHRQRRVKASQAEIARALQGNWREEHLFVLGQSLAMYDDIGRHLADCDARLDGLLDARARTQIALGKLPRAGSKTRMEHDIRQRLANWAGVDLTRINGLGVTVVMKLLTEIGPDVSRFVSVKHFCSWLGLCPGTKISGGKVLSSGTKRSANRARQALKMAAQSLWRSESALGAFYRRLSARMDKPKANTAAAHKLARMVYFMLTRGEAFVDQGQQRYDEQQRQRSIAALKRRAAALGFQINPVGAAA

SEQ ID NO: 513838 - protein, 331 aa, unidentified
MKILDVVGIDVSKLTIDVVIHSNQQHYQFENTRVGFRKLTKWALKESLCSKENLLYVFEHTGLYSYELSIYLTEKEIPFSMVPGLEIKRSLGISRGKDDKKDARVIARYAYRLRDEIQLTVIATKEIQKLKNLLTLRERMVKQRSGYKASLREMKRVLTIKDNPLLISSQQEIIDSLVEQILKIEECMYEIIDADETLKEQFNLITSIKGIGSQTALNMIVITDGFTKFKTSRHFASYSGIAPFPNSSGTSIRGRTKVNNLANKRIKTLLDLAAKVSIQHNPEMKTYYHKRLDEGKSKMSTINVIRNKLLSRIFAVISRKTPYVCTKKYAA

SEQ ID NO: 513839 - protein, 416 aa, unidentified
MDTMYERCCGLDIHKKTIEACFRSGKKKAHMSFGTTSAELRKLTMWLVENGCQSVAMESTGSYWKPIFNILELSGTDMEIIVVNARHMKNVPGRKTDVNDAEWIAELLQHGLLRPSFIPDREQRELRELSRYRKSLVGERAREINRLQKMLEGGNIKLTSVVSEVTGYSSRRLLDRLLRSDEPMTEEVISELVHTSLVGKSKELEIALDGLLSELQKELLIKVLDHIDDMNKRIADLDDFCRKQMKKYEDALDKLDEIPGIARRTAETILIETGLDMSRFPTAKHFARWAGLAPGNNESAGKRSSGRTTKGNPTLKSTLIQSAKVAARKKDSFFKARYQKIAARRGANRASVAVAHSMLIAIYHILKSGERFKDLGEDYYNQFNKEKKKKYYLKKLTKLGVNLKEATLSISIQAAT

SEQ ID NO: 513840 - protein, 323 aa, unidentified
MNKYKETFGVDISKDVFDVHGSDNGHDQFKNNEKGFAAFLKILPEDSIVVMEATGYYHYRLAQFLYKNNVVVSVVNPLSVKRFIQMKLAKVKTDKSDAKAICEYALANEVPLYNALTEVQAECLQLFRLMDSYLKKRTATKNKLHGEETLGIPSKFVYRSLKRDRKHLDKEIAGIEERLLSLVKMEQQQQLTLLTTVPGIGTKTVLFLIVITDGFSKFETAAQLCSYVGITPTIRESGSSVRGRSRISKVGNKKLRNLLFLCAFNACKHNKACREVYERIVNKGKSKKLALIAVANKLLKQCFAIANSGLPYDDAHVSVLKIK

SEQ ID NO: 513841 - protein, 370 aa, unidentified
MKKNSRKSKSPARSATTKLRKCDRVTIGMDLGDKTSRYCALNTAGEVIVEGACPTTKKGMAQLFGAMAHCRVAIEVGTHSPWVSRELKKYGHEVIVANARQVKLISQSSRKNDKLDAQMLARLARMDPALLRPIRHRSEEAQKDLMTIRIRSALVEARTGLVNAARGLTKATGERLASCDADQMNAGTLEGLPADLRDGLKPLVEEVESLTEKIKECDGKIEQIARDRYPETKLLRQVSGVGPLIALTFILTIEDKGRFAKSRDVGCYAGLRPKQSESGERQPELRITKEGDVYLRKLLVQGAHGILMERAPDTDLKRWGRKLAGRGGKNAKKRAIVAVARKLAVLLHHLWATGEVYEPLRNSQAMAKAA

SEQ ID NO: 513842 - protein, 369 aa, unidentified
MSDCITMHVGLDVHKDSIEIATADVRGGEIRHVGRIGGDLPALDAALARLRCPVAGMQVVYEAGPCGYAIYRHLVARGIACAVVAPSLTPRRPGERIKTDRRDALKLARLSRAGELRAIRVPDTEDEAIRDLLRAREDTVRVQRNARHRLKALLLRQDVRYTGKTAWTPAHERWLARVRLPTPAQQIVFQEYVDSVHQATLRIARFDTVTGDLLPHWTRYPLVRELQALRGVRQLHAAMLVAEVGPFERFDSPRQLMGFLGLTPSESSSGSRRRQGAITKTGNAFARRALVEAAWQYRFPARVGITIARRQGECSETARAIAWKAQVRLCARFRRLQARRMLSTKAVVAIARELPGFVWTIACAEAASH

SEQ ID NO: 513843 - protein, 433 aa, unidentified
MLKLNYMSTLFVGIDVSSKTNAVYAMDFEENKYISSSFGNNQPGADKLVNMIAECMHKHKNLNTILIVLESTSVYSVHISNFLSTSEVLMPYKPYVFCVNPKATSNYRKSYIGMEKTDPTDAYLIADFGRVGRTKKLEPWRGGQFIALKRLTRHRMHLSECITREKTYMVSNLYLKFSELQLLEGDDKPFGSLYGATSSAVLTEFLSPQEIIDMPEEELLTFLAGKSRNRISDLSKTSELLRKAARDSYRLDKCMYEPLNVSLASSFNCIHAYQKEIKLIEQAIEKCINGMNPNALLILQSIPGIGPIWASGILSEIGDITVFHSSDALAKYAGLYWPKGDSGDFTSEDNKMSKAGNPYLRCYLGEAANSVRKHIPEYADFYARKYAEVTKHQHKRALALTSRKLVRLVFGLLVKNQLYTGEKLDTEYNIESN

SEQ ID NO: 513844 - protein, 410 aa, unidentified
MLFIGDDWAEAHHDIEVEDDSGRVLARRRLPEGLAGITTLHELVAEHLDPTAEPDQVQLGIETERGPWVQALLAAGYGVFAINPLQVARYRERHSPSGAKSDAADAHLLAEIVRLDRAHHRRIAGDSEIAEHVKIATRAHQTMIWSRVRQVNTLRSLLREYYPAALAAFGTDLASRDALAVLTVAPSPELGRRLSQSRIETLLRRAGRQRNVSTTAVKIRAALRSEQLAARPGVIGAYTASASALLAVLTAMAAQAEVLAGQVEQGFGQHPDAEIYRSQPGLGDILGARVLAEFGDDPGRYADAKARKNYSGMSPITKASGTKRVVLARFARNRRLGDALFLQAFAALNNSPGARTFYDRQRARGATHYQALRTLANRLVGILHGCLRTHTLYDEHLAWHNEPDKLSPAA

SEQ ID NO: 513845 - protein, 412 aa, unidentified
MEVVYERCCGMDVHGKTVVACLRTPGEKGRRRGEVRTFGTTTAELLQLSDWLTEAGCTHVAMESTGVYWRPVHNILEGTFEVLLINAQHIKAVPGRKTDVKDSEWIAELLEHGLLKASFIPPQPIRELRELTRYRKTLIQERARESHRLCKILESANIKLGNVASHVTGVSGRQMLRALAAGERDGAVLAELAKGTLRKKRDALAPALTGRFTEHHGFLVEQILAHIEFLEQAIAGCDARIEVHTRPFATVIEQVTTVPGIARRGAESILAETGTDMSQFPSAAHLASWACICPGNDQSAGKRRSGKTRRGNPWLRAVLIECAWAAARTKGTYLAALYSRIARRRGAKKAIVAVAHSILVAIYHMLRDGTVYHDLGPAHFDSLAQDRLTRYHVRRLEELGHAVTLAPIPEVA

SEQ ID NO: 513846 - protein, 332 aa, unidentified
MENIALIGIDLGKNSFHIHCQDRRGKAVYRKKFTRPKLIEFLATCPATTIAMEACGGSHFMARKLEELGHSPKLISPQFVRPFVKSNKNDFVDAEAICEAASRPSMRFVQPRTESQQAMRALHRVRESLVQDKVKTTNQMHAFLLEFGISVPRGAAVISRLSTILEDSSLPLYLSQLLLKLQQHYHYLVEQIKDLESQLKRKLDEDEVGQRLLSIPCVGTLTASTISTEIGDGKQYASSRDFAAATGLVPRQYSTGGRTTLLGISKRGNKKIRTLLVQCARVFIQKLEHQSGKLADWVRDLLCRKSNFVVTCALANKLARIAWVNRPGNPGD

SEQ ID NO: 513847 - protein, 421 aa, unidentified
MKPEKVDYAAWIGIDWGSEHHAVCLQAAGSSRLEACSLEQKPELLHAWFLNLVARFGRGAKIAVAIEQSKGAVINFLLGLDFVHVFRVHPLSLKNYRKALYPSGAKDDPVDAELILQFVRQHQDTIQPWVPDDVDSRLLLRLVEGRRKTVNKRVRLTNELTQLLREYFPQALDWAGELDRVMACDFLRKWPTLQKLQKSKGETVRQFYRDHGSRNGELIDQRIEKISSALPLTTDKAIVESSVLMVDTIVLQLHTVIEAIARFDQKIAMVYKRQPDADIFASFPGAGPVLEPRLLAAMGTDRNRFSCAQEVAEYSGIAPVTERSGKKEWIYRRLACCRFIKQSFHEYAGQTVTYCVWAGAYYKSKRAAGMAHHAALRALAYKWIRILYRCWKDHVAYDEQKYMQSLKRRRPAWLAFLPAGA

SEQ ID NO: 513848 - protein, 344 aa, unidentified
MQIARIGLDLAKYVFEIHGVDARGKTILCKTLRRHAVSAFFANLPPCLVGMEASNGAHFWAKAISELGHDVRLISPQFVTPYVKSNKNDRNDAEAICEAVGRPNMRFVPVKSAEQLAVQAVHRIRSRLVADRVRLVNQVRGLLGEHGIVVAKDIGNLRRALARIVGDNEDRALNPLVRALMGELREELTELDVRIAGYDRKIRELYRNSEICQRLGKVEGIGPVTATALVAAVGDRSSFKNGRQFAAWLGLVPKQRSSGGRARLFGISKRGDRYLRTLLIHGARSALGRVRDKQDPRSLWLGKMRQRRHPNIVAVALANKNARIAWSLLTSDSDYDAGLSVRAA

SEQ ID NO: 513849 - protein, 390 aa, unidentified
MHVVAHQPEAPGAIRSDLGAIFVSLELSRSTWLITSLSPCAGEKMSKHGVAAGDIGALLARFSEFKQKAFARTGRSFPIIVIQEAGLDGFWIHRVLQSEGIESHVVDPASIATSRRRRRAKTDRIDGEALLRALLAYKRGEPRVCAMVKAPTPEEEDRRRLSRERKTLIGERVEHVNRIKGLLFCQGVSDYEPLRRNRRQRLDELKTGDGRALPDHLKAQISRELDRLELLLEQIKAVEAGQNTLFAAAKAEAPTPAPVTMLLDIKGIGPEFAAILWMEAFFRSFANRKQIAAYAGLAPTPWQSGAVNREQGVSKSGNPRLRTTLIQLAWLWLRHQPQSALALWFKERVTRNGGRFKKTTIVALARKLLVALWKYVTAGIVIEGAVMKAA

SEQ ID NO: 513850 - protein, 342 aa, unidentified
MDVKTLGIDLGKSVFHVVGLDERGAIALKRRVTRTQLGVLVGNLPRCVVAMEACPGSHHMARRLAEHGHTVRLLPPQYVRPYVKTNKNDFRDAEAIAEAVGRGTMRFVPPKTVAQLDLQALHRVRDRLVGQRTALVNQIRAFLLEQGRPMRPGRLALRGELRRLLAAAAPGISPNLARLLAQLSQEWQQLEERIDCVTGELVAVATTDPACQRLMAIPGVGPISATALVAAVGNGRAFSKGRDFAAWLGLVPRQHSTGGKPRLLGASKRGNTYLRRLVVLGAQSVLRSKVRDRQRFGPWLRRLELRVHRNVAVVALANKLARIAWSVLANATPYRPLIDEAA

SEQ ID NO: 513851 - protein, 352 aa, unidentified
MSKQVTTDSPKLFIGLDIHKKSWRFHFTTDLFSGSGHTFPPGSNLIQSYVLKNYTGYEVSIAYEVGCFGYMPARDFESFGWDTFVVNPADIPRPSKSKFMKTDKIDAKNIAQQLKSGNLKKITIPEPVRESLRALTRQRTALVRDYRRIKTRIKSLLMYYHIAIPEGMDSPKWAKRFLEWLTELELDYDNTKRTLGSMLRQYHYIDQEIKELSNEIRKYCKQHHKKDYMLLRSVPGIAGLTAAYILSELGDLRRFTSFKRLASYVGFIPSMQQSGEGLYTGGSTPRANRHVRNMIVEASWQAVRKDPVMQNYFRSHAGKNSKAAIFKVGRKLLSKIHAVIRTEIPYSVGVLS

SEQ ID NO: 513852 - protein, 347 aa, unidentified
MLVVGIDPHKDSHTAAALDTSTGQMLGEITIAATPRGYRELLEWLECFTACQIAVENARGLGRHLAAWLGGQGFAICDVSTTEVRAQRLARRGGRNKNDTNDALAAALAAATGSGYRLTGDEHGEIAALLTEEREALNAELTAKRNRLHAYLRVLRPGGAPTGASVEDFANLLKGVKATTSVVAETKRLARNLLAELRRLARALEANRQRMSDLTEQTRTGLTAIDGIAVVSAVAIMGAVGDAGRFPNQDHLAAFAGAAPKQIASGSSDRHRLDRRGDYRLKRAIHLAAMTQARMKNGPGRVYYLKKREEGKTHREALRCLKRQLVKVIWRTLREDSRRRETLTLAA

SEQ ID NO: 513853 - protein, 329 aa, unidentified
MSVHAQGREAVAAARPNAGIDVSKQHLDAAWADRVEQVSNDAGGWDVLAAKLKADGVDVVVLEASGGYEKGVACALQLSGLAVVVLNARQARDFAKAMGQLAKTDAVDAQVLKQFAAVIARHPQRERYIRALPEDKRSYLAALVTRRRQLLDMHKAESSRLELAHAAARSSLRAVLRALEKQLATVDHNIDQYMRQHFKEVAKLLDSVKGVGDVTISTLTALLGELGQLPRRQIAKLAGVAPLACDSGKRRGVRSVWGGRTEVRSVLYMATLSAMTHNRVIREFHERLVAKGKPPKVAIVACMRKLLTILNAMMRDGTAWDESKHPQKA

SEQ ID NO: 513854 - protein, 351 aa, unidentified
MIIIGCDFHTRFQKIAMVDTETGEIAKRRLEHGNDEARAFYATLPGPARVGMEATMNAQWFERLLQEYHHELWVGDAAQIRAAAVRKQKTDDRDALHILDLLVREKFPRIWIPSPENRDLRQMLRHRDKLVRIRTSVQNQLHALAMSQGLCRKAKLWTKAGRKELEGLPLDPWASRRRRELLQLFDQLDPQIEELDKVVIQEAEKRPAAVHLMTQRGVGPVTALAFVLTIGAVERFPTSKHLVSYLGLNPGEDSSGGRQRLGAISKQGNSIMRHLLSEAAQTAVKFDPELRRDYLRLKFRRGISGLAKVAIARKLAVRLYWKLREVAQPNTAARMQGSPTSLMVEATPSRN

SEQ ID NO: 513855 - protein, 402 aa, unidentified
MRVGIDAHKMKCTTVMFDGDSVTGSFDFQTTRQGVYEFMKKVPEGSIAVIESSTTGKVLSRMLSGKYEVHMVAPPERKVSIKTDRRDAERIVMEDMLNYLRRCYIPSQYIENIRFVITQQIQIGRRIARVKNQVHALLEMNMIQHELDDMADIFGVKGLKKLSKIQLPRHDMIALARYLEELKMYVSHHRQLDTEIARIAASDNDVQLLMTIPGINCFTAVAIKSRIGDDVSRFATKKHLCSYAGVVPKANNSGEYISEHNHVKQGDIVLKYALTCAVRGAILANKNSSIKLFYRKISKKGVSPQKAQIAAARKMACIVWKVLSSKQPYTEQDDHMTKRKMKIMSSKAMRIIPTSVMPSKVSELVRNLVDDIDVLGKYHEDSHYIIGKDLSNKNRLKEDILR

SEQ ID NO: 513856 - protein, 426 aa, unidentified
MQNCLFIGVDVALKGNQFCVMNFDQHIYFNLKFPNNPEGNEMVINKIKDIEDKFFFEKVIIVMESTGMYSFHPACYFFSNEYLNNYHTEVYQINACDFDKYKKSFHDLEKEDGIDAYVLADFARVGRTKGLYPFKGSQYIALQRLTRQRYHICKELIREKTYILTNLYLSFSGLMSLNKNEMPFSDLFGATSSAFLEEFESPNQIAESSVEELINFISEKSKNHSSDLDGKVTALNKAMRASYRLDQTAYEPINVAIACSLNTIKFYQQQLKNIDKAILTTALGLDSNTYNILLSIRGIGKVYAAGIMAEIGNIERFPHNSKLAKYSGLYWKRNQSGEFDSQDKKSSKKSNKYLRYYLVEATASCVRQNFPFIKDFYNLKYNEVTKHQHKRALVLSARKLERLIFGLLRKNQYYKPINSVQNSKNN

SEQ ID NO: 513857 - protein, 412 aa, unidentified
MDVIHPRCAGLDISKTDAKVCVRINGAGRRKTSETVTTFGATTRQIMSLRDHIAAQQVTCVVMEATSDYWKPFYYLLEDLPGVEVMLVNARHVKNLPGRKTDVADATWLAQLGAHGLVRGSFVPPEPIRQLRDLTRTRTAVTRERTREIQRLEKLLEDAGIKLSAVVSDLTGVSGRAMLEALIAGGTDPAAMAELAKKRMRVKIPQLTEALYGRFTSHHAFLTRMHLDLIDQHTAAIERLTDRIEVVIEPFRGFRDLICTIPGIGGYTADIVVAETGADMTRFPTAQHLASWAGTTPGNNESAGKVKSRRTRPGNSYLQGALGTAAMSISHTHGTYLAAKYRRIATRRGPLKANVAVQRALLVAIWNIATTNTTYHDPGGDYFTRLNPQKARNNAIRQLESMGYHVTLEQAS

SEQ ID NO: 513858 - protein, 398 aa, unidentified
MLVGWDWASETHDVTVLDEAGMVVDRWVLRHTERELEEALRRLARHGRPGELPVAIERTTGLVVARLLTAGHPVVPVHPNAFHAARSRWGASKAKSDPGDSYKLADYLRTDGHRLRRLRPLDARTRELQALCRMRDDHVAARTAATNQLGALLEAHWPGAKAIFSRLGSEIALAFLEDYPTPEAAGRLGEARLAMFCRRHSYRGGRAPAELLERLRSAPVAPVGISPETLAELVRAQVRLVRATLSTIAELDQALGAALLGHPKAPLLAPLPRVGEVSLAQLVGEVGPILERSSHVEQASAEAGAVPVTKESGKAKSVQFRLATNRHARKALTAFADNSRHASPWAAALYADARRRGKRHPHAVRILARAWMRVIWACWHNDTPYDPSQHGGERRLAA

SEQ ID NO: 513859 - protein, 330 aa, unidentified
MDPEGVILEEFTFTNNHEGIEGLASRLNMHDRVVMESTGSVWTNLYNHLDARHIPVALANPLKTKAIASAKIKSDKVDARILAHLLRSNLVAESYVPPKHLREIRALIRHRVGIVKIRTMVKNQVHALVDTHGLACPHSDMFGKRGLEWLRGLELPPLDRLILNNHLTHLESLDQQTERVDEEIHNKAVEDEDVKLLLSMTGIDVYSALLIRSEIGSIERFPDYKKLVSWAGLAPSLHQSGSVEYHGSITKQGSRMLRWIIVEAARVAVNHDAKMRSFHERVKHRRGDQKAIIAVANKMLKIIWFMLTRREPYESRNEKRYQQKLNSIAA

SEQ ID NO: 513860 - protein, 429 aa, unidentified
MNQKLDCAAFVGVDWGDQEHAFCILPIGGGAPLRGSLKQQPEAIAAWVSQLRQRFGGRPVAVCLEQSRGALMYALMQYEFLLLCPINPTQLAAYRRALHPSGAKDDPTDAELAARFLRDHRDQVRVWRPDDEISRGLRMLSQQRRDWVEQRVALENELRQRLKETYPLALQLFPSDLHAEGCLAFLAKFPTLKELQRASPQQLAKWLPKRRRRADRLPAEELCHEQIRTIRQAMPLTTDRAVIEHARLVICHVAAQIQSLNRAVAECDQKIAALFAKHPDREVFSSFPGAGSAIAPRLAAAFGTDREKIQRAQDIQQMSGIAPVTRRSGKTTVVQIRWACPKFLRQTFHEFARCSTKFSAWAQAYLDMRRAAGTPYQVIIRALAFKWQRIITCCWQNRQPYDEQRYLQSLRARGSALVRFLPTHGAENP

SEQ ID NO: 513861 - protein, 344 aa, unidentified
MEHDAAIDVSLEWSSVCVVDAAGQIVREAKVRSEREALAAFFTESGLAFARIGLEAGPLSQWLHAGLVEAGLPAILIETRHVKAALKAMTVKTDRNDARGMAQLMRMGWFRPVHAKAPMVQEIRALLTARKLLVAKLRDVESSIRGILRGFGLKVGAVSKGKFEARIRELVTGQVMLERVAEPLLRARAALRTEYTTLHRDLLRTVREDAVCGRLMTVPGVGAVVAMTFRSAIDQPERFAKSKAVGAHFGLTPKKYQSGEIDRTGRISKVGDAMVRTALFEAANVMLTRAVRFSTLKAWALRVAGRHGMKKAKVALARKLAVVMHRMWVDGTSFCWGEASVSAA

SEQ ID NO: 513862 - protein, 343 aa, unidentified
MQTITTIGLDIAKSVFQVHGVDAAGQVIIRRQLKRRAVLAFFQKLPPCLVGIEACASSHHWSRELQALGHTVRLMPPAYVKPYVKRQKNDMADAEAICEAVTRANMRFVPTKAPEQQSCLMLHRTRHLFIRQQTAVINVIRAHLAEFGIVAPVGRKGVTELLQVVADPSDKRVPEVARACLAALGNQLLSIKEQIVEFDRMIMDVYRSNQTSKRLHYIPGVGPLLATALVASVPDPRVFRSGRNFSAWIGLVPKQHSSGGKDRLGSISKQGDRYLRSLFVAGALSVIRYAKIHGTKHRPWLTALLARRPTKVAAIALANKLARMAWAMMAKGERYRQPVALAA

SEQ ID NO: 513863 - protein, 327 aa, unidentified
MIFFLGCDVAKPKLDISLINEHGIEQWTDTILNDERSIATTLLTITGAYSDDELVCVVEATSCFHLPLAETCYVLGIPCRIYNPLLTRQQIKATVRGKKTDKTDALMIARIGLRGEGRLYTHEPYRATKHYVRSCERLSILNSSFGQYKNHIIELLGGDLTNDAKELLTGIQQAIKEARAQIYKDTAASAQGDTFRLLQTIPGVGQFIAASLIGEIQDITRFDSAKALVAYAGLDPRIRQSGHTLNSTGRLTKRGSSHLRRNLFIAASVARRHDPQFEALYSKKRSEGKSYIVATCVVARKLLIVTRAVWLSGKPYTVPEFQIELKT

SEQ ID NO: 513864 - protein, 394 aa, unidentified
MGKMYVGIDIAKDRFSACGIEEGGRSFFELTFTMDGAGFAALLKTIEANGGTPGNVIAAMESTACYHINVYSFLSAKGIEAVIINPLLIANYAKLSLRRTKTDKKDAKTIAQFILAHRDSVTQLAISQDMQDMRDMARERESLCHQISAAKVEIQRVLQTTFPELAAMTNPITKVMLHFIQRFPSARLVSIAKPSAIEKTLKEKPCSCRLRFTSKELIEAARTSIATVSPAKELILSGKIETLVHLQKRRDELTKALTKYCESTIVEDLRIVTSISGINNIMATALLAEIGQISNYLSHKHLIAFAGIDPTVYQSGKYEGASRISKRGNRHLRRVIWLMTISVIHHNSVFKNYFLKRRNEGQPFKKAVFATAHKLMRVIFAMLSKKTSFVAECV

SEQ ID NO: 513865 - protein, 402 aa, unidentified
MNCVGIDVSKGKSMIAVMRPFGEVVVSPFEVRHTANELSELARLLKSLDGETRVVMESTGNYHAPVAWLLHDAGLYVSVVNAMLVHDYGNNSLRRAKTDKKDAVKLANYGLDHWLTLPRYIPEEDTRLMLKICYRQYQQYSKVQTMLKNNLISLLDTTFPDANRLFTSPPRADGSEKWVDFVATFWHCECVCGRSEKAFTTQYQKWCRKHGYNFSEDKALDIYASACRHFGVIPKTDTAKLLVEQAISQLQTTSSALAALKQEMQSLAASLPEYPVVMGMFGVGPTLGPQLLAEIGDVRRFHSKKALVAFAGIDAPPYQSGQIDVRSRSISKRGSASLRRTLFLVMSVILQCAPIDEPVYQFMDKKRSEGKPYRVYMMASANKFLRIYYASVKAYLESLEHD

SEQ ID NO: 513866 - protein, 422 aa, unidentified
MADNDPRAFLGQFRLFLGFDWAMEDHDVVGLDLTGRIVLDRSIQDTAEGWAKFRQSLVELVGADLSKVAVAVETCNGPAVERLLAMGCCVYPLNPKAAGRYRERKSVAGAKSDRLDAWSFGDALRTDGQGWRALLPEDALTQELRLLCRDEVGLIEQRTALVLQLKAALHEYYPAALEAFDKWTCPSAWAFVAAFPTPAKLVCAGQRRREKFLHTHKLAHPDSYQRRLEGFARADPFCGASPVTSAKSRLALALVAQLQALEKHLAEYRKAIEAIFAQHPDRDIFGSLPGAGDKTAPRLTSEVGSIRERFPDPQALQTYAGTAPVTHQSGKTRTVQFRRSCNKHLRAAVNFLADHSRQQCVWAQVYYQGKRDQGLSHSAALRCLGQRWLKILWKMWQTRTPYNEALHTQNQVRHGSWTIALK

SEQ ID NO: 513867 - protein, 343 aa, unidentified
MEIKTVGIDIGKTWFHLIGCNHAGKPVVRHKFNRGKLAQFVANLPVCTIAMEACPGSQHLARAFQRHGHEVRLIAPKLIKPYVTGQKNDLNDAAAIAEAATRPTMRFVAVKSNEQLDMQAVHRIRDRLIGQRTAVINQIRAFLLEYGLPVKEGRASLSASLPLILEDATNGLSHRMRLLIAQLREHWAAIDAQIADYTREIALAARQSDDCQRLISIPGIGPLGATALIAAVGNARMFSKGRELSAWLGLVPRQRTTGGKPTLLGIGKRGNSYVRRLLIHGARSLLKHLHRKDHELGTWMNKLQQRAHRNVAVVAVANKIARIAWAVLARQDVYRPSAAAAAV

SEQ ID NO: 513868 - protein, 392 aa, unidentified
MIIVGIDIASQKHDYFMLQKETGVVFSSSSITIPNTLNGYKKLHKDIQSFCGATSDYTVRIGLESTGIYSTNIITFLVSSGYEVMMINPILTNMVRKASKVHCPKNDNLDSQTICKYLVDNMGSFSPYTSTLYHTLALKSLSRKRFYIVDELRKAKLNVYKLVHLMFPEFESFFSNIYVLSALSILKEYPSPQKLAKAHANKVSALIHGRCKCSALELIDAAKNTAGIKSDYDSFQLIDAIEELEHIQKRVEKYDVQIENYVKQHFPNLLTIPGVGYITAGLIAGEIGDINRFHSADFLVSFAGIDCTVYESGNYKAKHTIPSKKGSKYLRYALFQVARIAWQWDPVFKDYYLKKQSEGKHFYVILGHIQKKLLRVIYSLMKSGLNHKVISA

SEQ ID NO: 513869 - protein, 353 aa, unidentified
MVVVKDHQQREPSLGDITTIGLDLAKNVFQVHAVDQAGNVVVRKRIRRGQVLAFFSGIPTCLVGLEACATAHHWARELIALGHDARLMPPNYVKAYIKRNKHDVADAEAICEAVRRPSMRFVPLKTTEQQSALMMHRARDLLIRQRTMLVNALRGHLAEFGLIEAQGLHKVARLVTIVVDEVDERVPEMARQVLKVIVNQLKDIQTGIADLEKQVLVWHKNNPVSQRLATIPGIGPIIATAIAATIADPNTFRSGREFAAWLGLVPRQNSTGGKARLGGISKRGDSYLRRLLVNSAHTVLLCSKAAKNDPWLISLLSRKPRLVAAVALANKTARVAWAIMSRHDTYRHVAAAA

SEQ ID NO: 513870 - protein, 338 aa, unidentified
MKKVNYYIGLDVHKERTTYVVRDKIGNIVLEGEAASLFTELVPRLKPYLTSSVIGLEASTSYYTLYQQFLKHGYNIKVANTLQLRQLIAKNDTLDAKRLAEMLRLGTFPCSYIPDKDIQRLRSLVGIRHALMQEKVRCNNRIQAFIDRGGVIMPCCKAFSKKWKTALMQYLGSEDVTIELRYAYDHYTFLEKKGEQADQEMIGYTKKHWAKEYHLITSITGFGPVLSCYIIAFVHPINRFLSNKNLRRYAGVIPLSKESGSYKSNGRIPKSSSKGLLRWALVQAANTIGKTNTNLGKYYRLKKKQKKKAGIAKIALASTLVDIIYKVLTTKKPYNPTC

SEQ ID NO: 513871 - protein, 319 aa, unidentified
MQTILNNCCGLDVHKDSVVACLIKTRNPLSLSSSEENVIKEIRVFKTFLNDLVQLRIWLEAEGCCHVAMESTGVYWFPVYDALESACNGKMELLVTNARHMRNVPGKKTDIKDAEWIATLLRAGLLRGSFIPPLDVRELRQVTRYRKNVVEDISTQKNRIEKTLQQAGFKLSSFLSDIFGVSGRNLIGVLIQKGKLTPTDVENETKRISPEKKNEIKLAINGVLSERQRQFLQLQITMLDELLGHLAAIEQSIAELSKPFMNEIDRLDTIPGIAVTAATAIIGEIGVDMNKFPTAEHFCSWAGVTPGENQSAGKKKVPE

SEQ ID NO: 513872 - protein, 471 aa, unidentified
MPKASTKKASSRRPARAKTTPNHPKIHPHAAGIDIGATALHVAVPLDCDPQPVRTFATFTEDLQALADWLAHCGVQTVAMESTGVYWIPIFQILEARGLEVCLVNARHVKNVPGRKTDVSDCQWLQYLHSVGLLQASFRPPAHVCAVRSLWRHRGNLVRYASSHVLHMQKALTQMNLQLHNVISDLTGKTGSAIVEAIIHGVRDVEKLAALRDPRIKADAQTIAKSLVGDWKEEHLFTLRQAWASYAHYRQLVAECDLELARYLSAFETRIEVQAAPAEESSATSALPRKPGRPRALRSEVDFALRSELHRILGVDLTLIPGVHTTVVHTFVSEVGVSVERFSDAKHFASWLALCPDNRITGGKVLSAATRQVKSRTAHALRLAAATLHRSKSTLGDYFRRMKARLGSPAAITATAHKLARIIYHLVKNRCPYDASIFAAEEERQRLRREKNLHRQAAAMGLRLVPLTEEI

SEQ ID NO: 513873 - protein, 443 aa, unidentified
MSDLAVLDPRAAFVDVGSEKMYVSIAGGSPAVFGTVTSRLHALRDYLAEHQVRSVAMEATGVYWLPLYGVLEAAGMEVVMVDGRQTRNLPGRKTDMKDCQWGATLHAHGLLRAGFVPPANIRRLQDYLRLRGDHIAAAAGHVQHMQKALERMNIKLHEVISSLTGASGLAVIRAILASERDPQVLLGLCDIRIRNVKAERVVESLRGDWAEEHLFALAQAVQSWDHYQGLIAACDRQIEVVLRQMPDAKTPPSAASTKTGKPRTRPGVNAPDIADLREILAQICGAKDLTTLPAHSEYSVLQLIGEVGTDLTKWRTEKHFTSWLGLAPGSAQSGKRKASVKRRRNRAGQIFCVMARALARSKYVALGGFYRRMAARRGGLVANKALARKLATLFWRVMVKGLDFVETGVAQYEAKVLETKHRILHRLARQLGQQIVPSPVAAV

SEQ ID NO: 513874 - protein, 420 aa, unidentified
MDVAIGAVDGAGQKHDRRTHVIETGDIDVYLGLDVGKGEHHATAVTPAGKKAFDKRLPNTEPKLRELFAKLQAKHGTVLVVVDQPASIGALPLAVARDMGCPVAYLPGLTMRRIADLYPGEAKTDARDAFIIADAARAMPHTLRSVDLEDETVAELEMIVGFDDDLTGEATRVANRLHGLLTQIHPSLERVLGPRLQHPAVLALLERFGSPAQIRKAGRRRLVTLLRPKAPRMAERLVEDIFTALDEQTVVVPGTEAAALIVPSLAGSLTAVLDQRKLLASRIEELLKAHPLSQVLISMPGVGIRTGARILIEVGDGSSFPSAAHLAAYAGLAPATRSSGSSIRGEQPSRRGNKQLKRAFFLSAFAALGDPASRAYYDKKVSQGKHHTQALLCLARRRADVLFAMLRDGTFYEPQPATAR

SEQ ID NO: 513875 - protein, 341 aa, unidentified
MAVAGGLDLHRGQLTFDYVDTGTGESWRGRICPADRESLRGWLRRFHGVPDVEFAVEGCTGWRYVAEELQRAGITAHLAEPAETAGLRGRKRRAKTDWADARHLRDLLLDGRIPESWIPPGHVLEARALVRLYKDLLEERTSWQQRVHATLFHQGIPVVPKLGTADGQQRLEAAELSAAGRRAVQAGLRQIERLTQEMASLRRELARLSSRQPGCRALRRAHYGIGGLLSVAVWAELGDCRRFSSSDDAVRHTGLDITIYDSDGRRARGHIARQGPPVLRWALYEAALYASRPASPDYAYYCGVRDRIDGQRALLSVARKLARRCYHTLRDLGEDALAPAA

SEQ ID NO: 513876 - protein, 400 aa, unidentified
MLSIGIDVSKGKSTVCGMKPGGEIVYTPFEVQHTREGMSELVSLLRGSGEEVRAVLESTGSYHCPVVAALLENGIFVSVINSLRMKRFCSQSIRKVKTDRIDAMQIALYGLAYWQELQPTKLPEDTYRELQLLARQYYQMTSMLIKAKVDFNALCDQVLPGMQELMNDHAGRHKLSDFVLRYHHTTHILEMGETRFRKDYCKWAEKKGYRNCERMAVLIFATAQNGIPVLPNAPSTQIVITEAIRVLHTVEASRDAILTQMQALAKTLPEYSLVREMPCIGDTLAPRLIAEIGDVRRFHSKRALIAYAGIDAPPYQSGKFCANNRHISKRGNRYLRKTGYEVMQSYVMHKPANDPIFTFIEKKRGEGKSGKLAMVAGLNKFLRVYYGKVTELYRSLPTIE

SEQ ID NO: 513877 - protein, 430 aa, unidentified
MKSNTQNAKIEAITEKTLVLGIDVGSETHYARAFDHRGIEYSKKPFKFSNTEAGFVIFKEWILDLKEKHEKDKLVPGMEPTGHYWFNLGKFLQDNEMKPVLVNPHHVKKSKELDDNNPTKNDRKDPKVIAGLVREGRYMIPYLPDGVYADLRTASNIRFQLQAELTRIQNRISRWFNIYFPEYKTVYGKPDAKSGMLILKQAPLPEDILTLGIDGVNQIWRDAKMRAVGKARAKTLIEAAEHSVGSKEGAISARMEIRMLLEDYESRNIRLQEIMTLIEELVNQIPMAEKLLEIKGVGIKTVSGFLAEVGDTSRFNNPKELQKLAGLALVENSSGKHKGRTTISRRGRKRLRYLLFEVAMSLVAKNPEFRELHTYYTTRRLNPLKKMQSLMAVAAKLIRVFYVMLTKGVDYDPKKMVGDIKRPAVYLQAA

SEQ ID NO: 513878 - protein, 324 aa, unidentified
MSKRKLDVALLNDAGKVKSKSLANDPAGFAALMTWLKERSADAASTHVCMESTGTYSDGCATAFADAGWLVSVVNPAQPKSFGLSELNRNKTDEMDAALLARYCSKMEPPAWQPPPMEFRKLRSLVDRMEALKDMRQQEANRLEATVEVAAQQSITEHLTWLDARIDELDKDINDHIDGNKETLGRDAQLLTSIPGIGKTTAAKVLGLLGDLRRFSSGKALAAFIGVTPKRNESGTSIRGRSSIGRAGHPRIRHALFMPTLVAAKHNPTIKAFRNRLVAAGKPKKSAALASMHKLVHLMHAIVCKGVAFDSRFNRLALDVQDGI

SEQ ID NO: 513879 - protein, 408 aa, unidentified
MSHLLCCRRWFDARILPAPHKLSATIEVIDGAERLLGAGRFTTDQAGYAAMRGCAKAWPERVWAVEGANGVGRPLAQRLLEVGEHVVDVPAKLAARVRLFDRGHNRKTDAGDAHSIAVVAARTPTLRVLQVDGELEALRMLTDRREALTRRRVQTVDRLQALLAELLPGQAKRDITTGQARAMLGSVRPRDVAGKTRRRIAAEELAELVAVEAKIKKATAELKAMVLARESRLMNIPGVGPVVAARILADVGDVARFADRNRFASWTGTAPLDASSGEQTRHWLSRAGNRRVNHMIHIAAVTQLRHHPVGRGYYQRKRAEGKKPLEAMRCLKRRITDAVYRQLVADAQHAADHDTGTGPGGHRGASQESSAVDSHPHIDTSDQPLPGPAPTTLRPTPSTRKRPLKPAG

SEQ ID NO: 513880 - protein, 332 aa, unidentified
MDNFYFIGVDVSKKKLDFCVLFEGKVLREEQVSNHQQAVARLIGELKNDLEMDNEQFLICAEHTGQYTFPLVCACKSVECKLWLENPSQIKYSSGMQRGKNDKVDAKRIAIYASRFGDKVKYYDRPTEEIERLKQLEREPALYVTDLAKYKGQMYDQKDFMPAALYRKKTKRMKGLIQELQAAIDAITAEMEKIIGSTEVLARQMELLMSIDGVGKVVALNVIIETEAFSRFDNPRKFCCHAGVAPFSYTSGSSQHSKNKVSHRANKNIKKLLHMAAVSVTHRKEGELKAYYMRKVEEGKNKMSVINALRAKIVARMFAVIKRNEFYTPIYS

SEQ ID NO: 513881 - protein, 400 aa, unidentified
MDGPVISFDVSKGSSHMRAFISLDKPLGKVIVIKHDFDGYQQVRDLYQKLREKAGREPVVIYEYTGVYAFPLLTFFVSEGYTIYQIAPLESAKKRKSEIRSTKNDSMDTRTIASIYYGDRRKPLVPFRIQDQKYEDLKEMSRRYQFEVSIAVTEKNRYHRCLDAVWPCFDEVIDYESDISLDVIIEFGHPANIKTAKGVFSAMKKNHPGRSGKREKTAERIVEYTKNHNSGVSMNSYMVRELQEFARRVKEGKRRIDAVLDDLIALALTTDEFRLLQTIPSVKARSAVSIVAEIGDISRFTTVKGLIAFAGLDPTVNESGKKDSKHLQITKKGNKYLRTFLYLSVTNICHWHPESFISKFVDSKIKDGLPKKAAKVAGCAKLLRLIYSMFNNGTCYSEKE

SEQ ID NO: 513882 - protein, 404 aa, unidentified
MLEVLIGSCAGLDVHRRQVVCTVIREGRKETREYGTFTRELKELSVWLCREQVELAVMESTGIFWKAVFASLEEAGIQGCVVNARHVKQVPGRKTDVCDSEWLAELGRCGLLRPSFIPPRDLRELRLLTRYRRKLSGIIAGEKNRLHKVLDDAGIRLGCVVSDIDGVSARSMVEALVKGGFTPEQIAEEALGQLRKKKDQLQLALEGEISDRHRLVLKKIQSHIKWLDRHTALIDGQIVAGMKPYQEEWKLLQTIPGLDALSAAMLLAEIGVDMSRFGSKDRLCSWAGMCPGNQESAGKRKTGRVRKANCYLRSLLCEAANSARKTQSQFQGFYKGLVIRRGHKRAIVAVGHKILEIIYVLISRKEPYRDPEIDYEALVVHRNAPRWIEALSRYGYLARLRRCP

SEQ ID NO: 513883 - protein, 411 aa, unidentified
MDIVNARCAGLDVHNATVVAGVRLPGPRPGERRGETKTFATTTRGLRELTDWLIGHGVTDVAMESTGVYWRPVYAALEGLVQVVLVNARHVKMVPGRKTDVKDCEWLAQLLECGLLRGSFVPPRAVRDLRDLTRLRKALIRERGHHVNRIEKTLELAQIKIGGVVTDLMGKTGRAILEALSAGIDDPDQLAEYAQGLLRKKRAALREALVGRLTPHYAFLLQQHLSLIEALDAHLATLQARIETAMVPFADTAALVQTMPGVAARAAQAILAETGVDMSCFPTPAHFASWARLCPGNHESAGKRQNTTTGKGATWLRATLQETAWAAVRSKKSYYRTLYHRLKARRGAKKAIVAVQHAMIVALWHMLKHRVAHHDLGADYFERRNTARIRRHHIRRLERLGYDVVITERAA

SEQ ID NO: 513884 - protein, 342 aa, unidentified
MDHFAGMDVSVKETSVCILDDAGKIVQEVKVASEPQALLKVLGNPAYCLKRIGLEAGPLSQWLFSALAEAELPVICVETRHMQAVLKAQINKTDRNDARGIAQMMRVGLYVHVKTLRSQKLRMLLTHRKLLQSKAIAIENDLRGTLRNFGLKVGMVGTVRFEARIQELVETIPDLAVLVEPLLVVRRVLREQIVILHRRLLAIVRDDEVCRRLMTIPGVGPVVALTYRATVDAPARFRKSKSVGAVFGLTSSKYQSGEIDWNGKISRCGDEMMRVMLYEAAQSMLHAKKWSWLKAWALQIARRRGMKKAIVALARRLAVIMHRIWVDGTAFRWTREPTAATA

SEQ ID NO: 513885 - protein, 348 aa, unidentified
MVVIGSDSHKRSHTVVAVDATGRKLAETTVAATSTGHLELVRWAGRFVEVTWALEDCRHLSRGLERDLLVAGARVVRVPPKLMAGARRSSREPGKSDPIGSLAVARAALREDLPVATLDGPEREVRLLIDHREDLVAARTQAQNRLRWHLHELDPGNEPPSRSLARAHVLADLERDLAERSGVVARLARELVVRVRELTATINTLEREIADLTAGLAPSLLALAGCGPLTAAKLVGETAGVGRFRSRAAFARHNGTAPLPVWSGNDVRHRLSRGGNRQLNVALHRIAITQLQRPGPGLSYIEHRRAAGDTKTEAIRALRRRISDEVFRRMLHDEAARAALPSGLAAAA

SEQ ID NO: 513886 - protein, 358 aa, unidentified
MQSNKISFKGENVYVGIDVHLNQWHVCVRTSCLSPKPFTMPPSAARLYEHLCRNYPEGSYHSAYEAGFCGFAPHYELTALGIDNIVFNPADINDSQKERVRKCDTVDCSKICRNLEQGNLKALFVPDKSLLADRSLVLARQTLVKERARTKQRIKSLLYYHGIAYPAEFADNRSHWSKAFVEWLGRVFDDAQSGNAVRMAIFTDNLRFINEKLLALDRLICKMIRERHSRTDALLRSVPGIGALTAAKLCVSLGDIRRFRSSDHLAGFIGLVPDTRSSDDKEVVLGLTFRGSRLLRPALIESSWRAITLDPALGAAYTALRNRGKHPNVAIVRIARKLVNRIYFVLSKETPYEPARLR

SEQ ID NO: 513887 - protein, 363 aa, unidentified
MEVAKEGRFVGIDMGKTGYVLRMIDCCGKITGWEGKTNPEGRKELYRRLRPEDRIAIEACNLAFIMNKEFKERTGTEFYILNPGKLYQIYITDKKTDKEDALKLAKEIRDKPEADLPRVFAPTEEMKEMRKVISEYREIVRLHTQRVNRLHTVYEHCGITDMKRSDLKTRTNREKNLVLLSGYEREEAGRLMQVIDLLETQKDELEKKIKEAEHSNKKVQAVEQVPGVGKITAYAFVASVGSAERFRNVTQVSSFLGFVPRIDCSSQTAHYGHITKKGNGYLRGLLVQAAWVLVRSKSGGALKEKYHDLVLHGLSKKKAIVAVARKMAELMYTLLKNNSKYEPRKFVSPLGRTERLAQLAVAG

SEQ ID NO: 513888 - protein, 350 aa, unidentified
MEYIALDSHKRYSFASVEEHTGTILSEGRIDHQRGALVQFLSAWKPGTPVAVETIGNWYWIVDEIEAAGMVPQLVHARRAKMMLASVNKTDKLDCHGLNRLQRTGTLPTVWIPPAQIRDLRDLPRTRMVLSKQRTRLKNRIHASLAKYAISIEGVSDLFGKRGREELQKSLGLLPPHSRFSVERLLETLDLVDRQIGLFEQRMKETFATSRELEILQTLPGVGLILSVVILLEVGDIARFPDASRFAAYSGTTPRVSSSGGKTRYGQLRPDVNRYLKWAFVEAANVICLTHRLRPYRHVSRLYLRIRQRKGHQKAVGAVARHLAEATYWILKKGEEYREPGKQKVSSTKG

SEQ ID NO: 513889 - protein, 342 aa, unidentified
MNREIYIGVDVSKNWLDLAYYDGVTVDWKQGHIRVDNKQTGFSKIGKWLGKLKANEDSVLFCMEYTGLYSQDFRIWLEKEGFVYGMVQPRKMHRFEPDLGEDERALDRIKTDEMDSFRIAMYCEKHCRKIKASPSKLPSEAYFKLKRLLAERKQYTKQTAIYKQQLHDISVYDTDGSCKRKQAALNFLNRQIRQTDEEVQSILNEDSAMSRNYELLCSIRGIGLVVAVETIILTENFTSITNPRKYACYIGIAPAKKESGVSVRGGEHVSRKGFTQAKADLSIVCLSAIRWDSNIKSYWERKRADGKHTGVVLNAIKFKLVLRMFAVIKRQKPYVSIDGYKK

SEQ ID NO: 513890 - protein, 422 aa, unidentified
MMNSTNTYPIHPKMTRTYAGVDSHRDSHMVVILNCFHEKLGEIKVGSTPSEFAKFIKQAKKYLQTDTTWAIGFEDVSAYGRAFVKYLVDRGYHVKHVDASKVATERGQVLHKTDQYDAECCARVLINQFDNLPDANPQDKFWVLNGLVTRRNAITKINVMVKNSLHTAVAENYPHYKKFFSTLTVNSALAFYETYPAPHHLENVTVEELGVFLHSASRGKLSTTKAELILTTVHRDQVEQVDFQDKKDFTVRSLVRQVKSQLSEIAEIDKQIEEMLTHFNYPLTSIKAIDTLTSAKLISEIGDINRFKNAKALAKYSGVSPVTYASGMTNLQMANARGNRKLNEIFHRIALTSVMPLGSKGALINPIFHTYYHKKISEGKLKNQALKCVMRRLVNIVFNVMKHNRPYENPQLGYIPKETEVA

SEQ ID NO: 513891 - protein, 346 aa, unidentified
MTIVEDRPVITGGVDTHADMHVAAALDPIGGLLGVREFPATAAGYASLLRWLGEFGDVALVGVEGTGSYGAGLARHLAAASIRVVEVDRADRQDRHRQGKSDPLDAVSAARAAQSGRASGVPKGRDGAVEAIRALMVAKRSARQERTQAINQARALIVTGPDELRGRFAGHSPAALVDAIAALRPRPGDVPGYAIRVALRELGRRAQFLDAQLERLDELIGPLVTARAPGLLGLHGVGPDTAALLLVAAGDHPERLRSESSWAHLCGVAPIPASSGKTSRHRLNRGGNREANHALWRIVITRMSSHPATRAYVARRTKEGLSKKEIIRCLKRYVAREVYHQLRHSA

SEQ ID NO: 513892 - protein, 319 aa, unidentified
MAQNDLVVAGIDVAKDKVDVRIRSPSLRRTFASTAEGRRELVSWVRRQKVGKAVLEASGGYEREWAKALRNAKIEVRIVDPKRVRSFAQSAGRLAKNDAIDAEMIAWFAETFDEARGQAWDAAREELVQIVNARQALLEQQTQMQNRSEHAVPIPVRKMHERLLKAITLEVARLEAAIAALIKASPHFAETAEIIESVPGLGEITSAGLIAAMPELGQVSNEAISALLGVAPYDDDSGKRRGERQIKGGRRKVRNLFYMACLGAATRHNPVLKAFYRRLIAKGKKAKVALVACMRKLIVILNIMIARREKWDASRHAVG

SEQ ID NO: 513893 - protein, 402 aa, unidentified
MNAVGIDVSKGKSMVAIMRPFGEIVSAPFEIKHTASDINSLVELINSVEGESRIVMEHTGRYYEVLAHQLSEANLFVSAINPKLIKDFDNDSLRKVKSDKADAVKIARYALDKWQNLKQYNVMDELRNQLKTMNRQFGFYMKHKTAMKNNLIGILDQTYPGVNTYFDSPARSDGSQKWVDFASTYWHVDCVRKMSLNAFIDHYQNWCKRKKYNFSQSKAEEIYGKAKELVPVLPKDDITKLIIKQAVDQLNSASITVESLRTLMNETASKLPEYPVVMAMKGVGTSLGPQLMAEIGDVSRFTHKGAITAFAGVDPGVNESGSYEQKSVPTSKRGSSDLRKTLFQVMDVLIKTHPQDDPVYQFLDKKRAQKKPYYVYMTAGANKFLRIYYGRVKEYLASLPES

SEQ ID NO: 513894 - protein, 431 aa, unidentified
MEKIREKAAGIDIGAQKVFVAIEGQEVKSFYTFTEDFEKLCEYLLKFGIETVAMEATGVYWNILYEMLEESGIDAWLVDGRQTKQVPGRKTDVKDCQWIQQLHSYGLLKRCFVAEADIKELRIYQRLREDHIRSASMHINHMQKALTEMNIRLKEVLSQVHGASGLAIIKAILNGERDKATLLKLCHQSVIKTKKEEILKALNGRYTKSGLFALRQAFDSYSFYQQQIEQCDQMLQETLERISGGKVQEVKSRRKPIRHNKPDIDNLGGMMMKIFAGKDATTLSGITDYSWMQLLSETGTDLSRWPTEQHYTSWLGLAPCKDTSGKKYRRKRKMGRPKAGQIFRQIAHSLLNSKRIALGAFGRRLNARKGPYIAIKAVARKLAETYWRIMVKGTEYVELGVKKYEEQILQQKQRSLQRLAKELKVQIIYNE

SEQ ID NO: 513895 - protein, 444 aa, unidentified
MGRRCIGLDVHREFAQVAVWEDGLVRQAGRIALTDEGLRIFADSLGPEDEVAIEATCNTQAIVRLIEPHVARVVVSNPQKTRAIAEAKVKTDKVDAEVLAQLLAADYLPSVWIADQATQALRRQVARRAHIVRQRTRLKNRVQAILHRNLIPRCPAADLFGIKGRCWLSAQPLPADESVAVEALLRQLDFHAQELRIIDAELGRVALSSAEVKRLMTIPGVDATVALSIVAAVGDFRRFRRPEQLVSYLGLNPRVKQSGGQPASHGRITKQGRAHARGMLVEAAWSAAKTPGPLRAFYERVCSRRGMQIAVVATARKLAVLCWTMIERGEDYAFARPSLTDKKLRALELRAGMPSRRGRKGNAAAYSLKEVRRRERELAEQGEQAYRQLVTDWQAKRPKPKGDSGVAAANGTRLKRPSVGQAARQASVPEPALRSGVDHALNKA

SEQ ID NO: 513896 - protein, 319 aa, unidentified
MGESTGAGGFIGIDVSAATLDVAVDGGRAWQVPNDTGGVDALVAELAALAPALIVLEPTARYHQAVTAALAAAGLPVAVVNARQIRDFARSTGQLAKTDRLDAGVLARYAARIRPEPRELPDDATQDLRALVERRRQLVEMLKAERQRAAHGRDSVRESLAAHVAFLERAVEAATDDLDRSIQASPLWQAEDALLRSVPGVGPQTARLLIAELPELGRLSRREIAKLVGVAPLARDSGRFRGVRVCWGGRAPVRTMLYLAAMAGRRFNPVLRACYERLVAAGKPPKLALTACMRRLLVILNAIAKSRQPWRAPAPIATP

SEQ ID NO: 513897 - protein, 400 aa, unidentified
MNAVGIDVSKGKSTVAVLRPFGEVVASPFDVIHNDNDLKRLVKLIRSLPGESKVVMEYTGTYFEPIAQFLHNNGIFVSVVNALLVHNYGGNSLRKVKTDKKDALKLASYALDRWTELDEYVPADEQRRTLKLLNRQYNQSIKIQTTMKNNLISLTDSVFPGINQLFTSLERQSDGHEKWVDFLHAFPHKDCVAKLYLSAFKAKYKSWCSRNKYRYSESKAEKIHSYAKSVIAVLPPNESVKLLVTQVVSQLNTILETAFSIRTEMDRIASSLPEYDTVMSMFGVGKVYGPQLIAEIGDTRRFRNRRAITAFAGLDAPPYQSGQLDVSSRHISKRGSAALRKVLFQITEIFILSKPENEPVYQFIIKKRSEGKHYYSYRIAAANKFLRIYYAKVNQVLNAT

SEQ ID NO: 513898 - protein, 320 aa, unidentified
MDAVLGIDIAKAKFNVTLLFPDGRRRRKVCANSAAGCADLLGWVTRQGVDHVHACLEATGTYGDLLATTLVDAGHRVSLLNPAIIHHYAKSRLSRAKTDPLDADVIADYVAKERPPLWTPLPREVRELQALVRRLDALLGMQTDERNRAQAGSLTPAVQLSIETVLAHLETQIAAVRQQIRQHMDQHPGLRTQRDLLTSIPGIGEATAALLLAELFNKAFVSARQAAAFAGVVPRANDSGLHQGRRVMSKLGSGRIRKGLYFPAIAALRFNPSLQPLAQRLRGAGKPPLLIIGAAMRKLIHLAFGVLKSGRAYDATLAKA

SEQ ID NO: 513899 - protein, 338 aa, unidentified
MKFCGIDLHSNNSVVVVTDETDRVLVSRRCPNRLTPILSLLEPHRAELVGVVVESTYNWYWLVDGIKAAGFEVKLAHPVAMKRYDGLKHADDKDDAAFLAHLLRLGILPTGYIHPPQERALRDLARKRIQLVRSRTQHLLSVENIMARQFGQRLSCNEVKGLSATSVDRLGLPTDVALAMKANVAIVQALQTQIDFLEERLLHEARLRPEFFLLKTMPGIGEVLATTIIMLETGNIERFADVGHFASYARCVKSAHYSNGKKKGEGNAKNGNAYLIWAYIEAANFTRRFSEDAKRFFEKKKAKTNTVVATKALAHKLARASYHILKEKQPFDARRCFA

SEQ ID NO: 513900 - protein, 350 aa, unidentified
MSVIHYIGFDVHKKSVSYCVKDAAGKIIEEGKLRATCQVLRQWAGDRTEPWHGAMEATLFSGWIYDTLKPFATVLEMGHPAMMKAIGASKKKNDKMDARKTADLVRCNLLPACYVAPVEIRELRRMLRYRNVVVAQAVRMKNKMSGLLMEVGAEYNKQRLHGKKYFTELLGSLEQVPESVKDLLRLSRGALELFETTQKQILDRLQKEPRWVRRLEVWQSIRGVGDVTALSWALEICDPHRFASIADAVSYCGLTSALVSSADKQQRGPLSKQRNAHLQTVLIEAAKLAPRWNPQLAAVHEREANRGNRNRATLAVARKLVAYLLAVDKSGKPFQVQTPPATKTEVPAVA

SEQ ID NO: 513901 - protein, 349 aa, unidentified
MLADELDYVVGVDTHRDEHVLVAVAVPTGAVVARQAVRANARGYRETLRFAELYAPGARAWAIEGTGSYGAGLTRYLAGCGETVLELSRTPRSERRLRGKDDSLDATRTARAALASETLVLPRSGERREALRLLLVARRSAVDVRREALGQLRGVIVTAPDRLREQLRGLPAGKLLERCSRMRRSSSQTADEVATRLVLRSLARRIEAATLEADQLERELLGHVHALAPTLLDEPGVGPIVAAQLIVAWSHRGRLRSEACFARLAGVAPVPASSGQTTRHRLSRGGDRQLNRALHTVILHRRQHDPTTKDYIARRIAEGKSRRDATRLLKRYLARHLYRLLERQEPLMT

SEQ ID NO: 513902 - protein, 407 aa, unidentified
MNHPKMRYTYVGVDSHKDTHTAVFIDCFFEKLGEITFQNLPDKFSDFLEHAKEYQVPNTAFMFGLEDCSSYGRTLMRFLKGHGYHVKHVNGLLVARERKNRNITQKTDSVDAECAARVLLSKFGELPDVEPQDKYWILRSLVARRSLLVRHRAATKNYLHSVLTLDYPNYRSYFEKIDCKTSLAFFMRYPSPSTLEGVTAEELATFLEIPSNKCVGMPKAKAILESLQDTAVPFQEIRNCVTQSVIRQLLFNMAEIEQLDIRIASFLVQFDCTLTSMTGIDTVTAAQIMSCIGDIKRFSTPAKLARYAGIAPVTYASGKKDLQYANHRGNRELNAIFFWLAVRVSTPRGPTSKILNSFFHEYYTRRMSEGKTKRQALKCVERRLINIIWRMLTFGEEYVNPPSYELE

SEQ ID NO: 513903 - protein, 342 aa, unidentified
MKIIGCDFHPSFQQIAMVDTETGEQTERRVMLAEAAEFYRGLSGPVRVGMEACGNTLWLERLLAELGHELWLGDAGRIRSMEVRKQKTDRRDAELLLRLMLENRFPRLWIPSTEQRDLRQLLIHRHKLVGMRRQVKNQLQHLALNQGVQQKRKLWTRTGRKLLEELPLAGWTAHRRKESLQLLDDLERRVGELDRAVEQAAEKDAVARLLQTHPGVGPITALAFAVTLGQIQRFQHSRQVVSYLGLNPSEHSSGGKQKTGSISKQGNTMVRSLLVEAGQSAARLDTELKRAYQRLKHRKHSAVAKVMVARKLAVRLYWIWKTQQPYAATRMQGSPSHPVAAV

SEQ ID NO: 513904 - protein, 364 aa, unidentified
MNEVYYIGLDVHKKSISYCVKTASGEIVQEGRVLARRQELRAWATAQVQPWRGAMEATLFSAWIYDTLKPYAQQLNMAHPARMKAITAGKKKSDRLDARTIADLLRCNLLPACYVLSPQMRDLRRLLRYRQLVVGESVRMQNKMAGLLMETGTPFVKSKLHGKKYFNQLIQTLEEVPQSVKDLLQMSRGAMEMFESTQKRLVQRLLAEPALAARVERLCTIPGVGPITALTWALEIADPQRFSSIGDAVSYCGLTAAFRTSGGKEQRGPISKQRNAWLQTALIEAAKLAPRWNPQLAALHQHELTRGHRNRATLQVARKLVAYLMAVDKSGQPFQVRSSPQRLECKSTGKKERKKMPDPALAPA

SEQ ID NO: 513905 - protein, 365 aa, unidentified
MSGNRTSVGLDVHARSVVACGLDGLTGELFERRLTPDHGEVVAWIRSLPGPVAVTYEAGPTGFGLARFLTAEGIRCAVAAPSKLQRPSGDRVKTDVRDARHLARLLHLGEIVAITVPSVEQEAARDLVRAREDVRGDLMSARHRLSKLLLRQGIVYCGGKPWTASHDLWLRARRRTEVFTRPGLGLAFDIAYDTMLATVARRDRLDAAVTAMAGDSEFTPVVTRLGCLRGVSTLTSFGLAVEIGDWRRLSGRSIGAYLGLVPTESSSGGSRSQGSITKTGNGHARRLLIEAAWHHRQPYRRPGVDLRRRWDKATPEARDRGQRANRRLHARWTAFDARHKRAVVANTAIARELAGWCWSLAVLDG

SEQ ID NO: 513906 - protein, 455 aa, unidentified
MPKKTTSERPELKTVNISAAAIDIGSKMHMAAVNPACTEVPVRSFGTFTQDLHELADWFTACGVTSVAMESTGVYWIPVYEILEQRGFEVILVNARYAKNVPGRKTDVSDAAWLRQLHSYGLLRGSFRPDAEIATLRAYLRQRERLVEYAAAHIQHMQKALMEMNLQLHHVVTDITGATGMRIIRAIVAGERNPDVLATYRDVRCHSSTETIHAALVGNDRHEHVFALTQSLELYDVYQAKMLDCDRKLEVLIAALNNKGEKPVGKLSKPRIKTKQVNAPTFDVRTAMYGVLGVDLTEIHGLGPSLALKLVGECGTDLRAWPSAKHFTSWLCLAPGNKVTGGKVLSSRTRRSSSRAAALLRLAATTVGRSDTALGAFYRRLSSRAGKSKAVTATARKIAVLFYNTLRHGMSYRDPGAEHYEQQYRSRVLANLQRRAKSLGFVLQAIPGDANPAVS

SEQ ID NO: 513907 - protein, 400 aa, unidentified
MNTEYDVWLGLDVGKTNHHGCGLDPSGERVYDHELPQDETALRGVITTLQHEYGRVLVIVDQPNTIGALPVAVARDCDADIAYLPGLAMRKAADLYPGQAKTDARDAFIIADTARTMPHTLRSVDRESDVLANLKVLAGTDEDLAHDITRAINRLRSLLLQIHPALERVFKGTVLTRTIVLDLLVRYRGPAGLRAAGKSGVKRWAKNHTRKDPSHLIDAIFDALAEQTVVVPGTAASESVVPRHAMRIKALKAERKEIEAEAEELADSLPLLQVLTSMPGVGVKTASQILLSAGDFSAFKTPGHLAAYAGIAPVTRRSGTSIRGEFPSRAGNKRLKNALFHSAWIASCHDPLSKAYYERKRAEGKRHNAAVMCLARRRLNVLFAMVKHGAFYEQKTPAAA

SEQ ID NO: 513908 - protein, 316 aa, unidentified
MSQSDVFVGIDVAKAQLDVALRPTGDTWTAPNDEAGLAHIVERLGPLRPALIVVEATGRLELPLLGALMAAALPVVVVNPRQVRDFARALGHLAKTDRLDAQVLALFGERVRPTPRPLPDPATQALSALVARRRQVIEMLTAEKNRCGQAPPALQPDIAVHITWLETQLQHLDDALGQQIRNSPGWRTQDELLQSAPGVGPVLSRTLLADLPELGRLSRKQIAALVGIAPLNRDSGTLRGVRTCWGGRAPVRAVLYMATVAATRCNPVIQAFYRRLCAAGKAKKVALTACMRKLLTILNAMMKHRTPWRAQVSPCV

SEQ ID NO: 513909 - protein, 345 aa, unidentified
MNKLVFTQQATVFCGIDVSARSLAVAQIGSDGSLVQREFANSAGGHKALLAWLARCNAKVRVSLEATGIYSLDLALALDGEASIELAVLNPKLVNRFAQTLRRSKTDAADAVVLAEYGRRMPFTRWQRPLASHLRLRSVGRYIESLVADQAGLKNRLRTAEGTSTTPRTVLADLRRALVALERRVAKMRREALELVRAEPVLWERFQLLTSVPGIAQISALQILSELVLLAPTMTVRQWVASSGLDPAHQQSGTSLNKPSRISRAGNRRLRRALYMPALSAARNDPHLRAFYLALRSRHKTGLQALMAVARKLLHAIYGIFKSGRPYDGKRLFPNIHTGVESIAG

SEQ ID NO: 513910 - protein, 321 aa, unidentified
MNTTMPLGIDVSKAKLDCALWLGSKYRTKTFANTPEGFSRLSEWLHQHGADQVHACMEATGIYWEAAALYLADAGQRLSVINPALAKAHGQSLGLRSKTDAVDAKLLADFCREKQPPAWTPPSGAERRLRALVLRHQSLVEMQTQEKNRCESLREEVRTSVETHLAWLAAELERIQQAIAKLLDDDDHLRGQRELLASIPGLGERTIAVLLAYGVSGERFQSARQFVAFAGLSPRLHESGSSVRGKPRLSKIGHAFLRRALYMPAMVTLYKTAWGQRFRQRLATHGKPPKLIIGAMMRKLAQVAFGVIKSGRPFNPAFHGA

SEQ ID NO: 513911 - protein, 343 aa, unidentified
MEKVYYIGLDIHKKTISYCIKLQDGTKVRQGVMAAERKALGQWLAEIPGHWKGAMEATMFTGWVYDFLKPHALELKVAHPEMLKAITSAKKKNDRADSEKISDLLRVNLLPECYMAPEDIRELRRILRYRNMIVRTAVKMKNKISGLLMEVGASYNKKRLHGKRYFNNLLETVEDVPPSVNELLNLSRAGLEMFQGVQRRLLDTLHDNTLIKERIERLMTIKGIGEVTALTWVLEIGDPMRFTSVRQAISYCGLCSAQKESAGKEQRGPISKKRNKHLQTVLIEAAKLAPRWNQQLAAIHAKELERGHRNRATLAVARKLVAYMLVVDKRQTGFEPLSIAKVA

SEQ ID NO: 513912 - protein, 409 aa, unidentified
MTYFVGLDWAAREHAVCVVDGRGVIVAQQTVAHTTTGMSELVTRLAKLAPVAELRVAIERPSGLIVDTLVESGFVVVPIHPNAVKASRPRYSAAQGKTDLGDAYLLADLLRTDGHRFRPLVPLSDETKALRGLVRVRDDLVGQRVAAANQLRCLLEQFWPGAAEIFADVDSPIALDFLERYPTPLAAANLGEKRMTAFMARHSYSGRRSAKELLERLRGAPASVAGELEAEAKGECVRALVAIVRPLVAQIATLTAAVEHAIDAHPDGKIVTPLFRSGRVCAAKLIAELGDDRGRFASPDHLAAEGGVAPVTRESGKHRAVSFRWACNMRLRSALSTLADSTRHTSPWARAIYQRARDRGCTHAHAVRILARAWCRVLWHCWQKRVPYDPTKHRAATQFTLRLVDQEAA

SEQ ID NO: 513913 - protein, 341 aa, unidentified
MTTVYVGVDVAKAKLDGAVAWTAQERQALGQFDNNESGIGQLAKRVTKLCRAQGEVTLHLVVEPTGGYEGRLLNFAYAQGWAVTLVNPLQVRRWAEGMGVRAKTDRVDADVLSWYGAATAPSGQEPMEEAAQELDELLRRRTDLEQLRQAERNRQAVAAHKPHTPAAVYQSIERTLQALDEELSAIEEAIRQLLKQDAALHQQVRLLRSLPGVGEKVSLPLLSLLHRFQARTSGQGTAKQLVAFVGLDPQPKESGNSVYKRPTISRKGDTHMRSLLYLGALGGKRGQILKQIYQQFLDRGKAKKVALMACARRILVWAWAIFRANSPFDPLRFEKTVQLAS

SEQ ID NO: 513914 - protein, 384 aa, unidentified
MAKAKRSDSAWLLKASGGEPGEIHVAIETPHGPIVEALLERGFNVYCINPKQLDRFRDRFTVSGAKDDSLDSYVLADSLRTDMPLYRKLSVAEPLIVELREWSRIDEELKVERIRLANRLRDQLWRYYPQMLELGELDEDWMLDLWEATPTPQKAARASKAAIARVLKKHRIRRFDAAQVLSELRKPALSVAQGTIGAATVHIRMAIERLRVVNRQLADAELQLDRLCKKLAEPVAADDGENVPGQRQEHRDATILDSLPGVGRVVLATMLAESPDALQRRDYHALRSLYGTAPVTRRSGKSCIVTRRRACNRRLRNAVFNWGAVAVQHDPISKAKYQALRARGHGHARALRSVVDRLLYVACTMLENGTLFDHSFAEAKKAAA

SEQ ID NO: 513915 - protein, 401 aa, unidentified
MKRLSGGIDIGSASHHITILDEEDQILYDQKVSHKLNEFTESIKQFRKIERKQKGKLSFALEGKNGYSAPFDRILLDQGFTLYNIDNLKLKRFREAFAGEWKDDKRDALMLSKMLKLKEHINSHREKVFIKIEKVSPVTESLKLLSRHQQTLIDERVRLTNRLSKKLLEVCPEILKLGKVKYKKIITILGKYPDFSKYKMITLKSLLKIKGIGEKEAPFLLKRLNHIVYIPGLTDIYKTIISSYTKRILELQEEIKDIDKKLDDIGKKDKGVNHLKTIPGVATKLSSRFIGEIGDIKRFPSEKQLAIYSGIACANHDSGKITKAKAVYKANKICKQTLITMAGGSIRLSPQCRAYYLKKRAEGKSHNHTLRCLARQLIKVIYKMLTEDRDYIIKKELKKVA

SEQ ID NO: 513916 - protein, 458 aa, unidentified
MQVDGYAAYKALVKDEGAESRVTLAFCLAHARRKFVAVFKTTNSPFAKEVIETIVRPYVRYCGGGWLVLRCASEGYSTAESILSAGGRAMDQSNEIFVGIDVSKARNAIAIADGGRNGEVRYLGEVDASEESMRRLIKKITSKQERAHFCYEAGPTGYGLYRLIVGMGFPCTVVAPSLIPRKPSDRVKTNRRDAVALARLLRAGELTAVWVPDEGHEAIRDLVRARSAAVETLRVHRQQVSAFMLRHGRVFPRKTTWGARHLRWLQEQKFDHPAHQIALQEMVEAVRISKERVERLEASIEEFVPEWSLAPIVRAFQALRGIDLIVAVTCATELGDLRRFDSPRQLMGYLGLTPSERSTGDTVRRGGITKAGNGRVRHMLVESAWTYRHPPRIGKKKLYQIEAVPPRVREIAWKAQTRLTARYRALVARGKKTTVVCVAVARELVGFMWSAAREAQVA

SEQ ID NO: 513917 - protein, 338 aa, unidentified
MQVMKKIYVGIDISKEKCNLCYRSGLEIVREEECFNDAKALKKAFKAALKVLGTSFEDVLVCAEYTGRYIYPLTVACQELDLFLWMDDPTRIKNSMGLTRGKNDAIDAARIAEYAFRYSDKAVRYCIPDAVLVSMKNLLADREFLLVDKKRYQSQLTDQKKYMASGDFKHKSARWKKVIKSIDEQIAAIDAEIETLIAADPVLTRQKELLVSIDGIGERIAINMIAITSGFTRFQNARQFCSFAGLTPYKYDSGTSVRSKAKISKRANQTMKALLHMSAVNVATRMKAGEYKDYYERKLKEGKHIMCILNVLRAKLVHRMFSVIKRDTEYTKEYKPAC

SEQ ID NO: 513918 - protein, 400 aa, unidentified
MLSIGIDVSKGKSTVCGMKPGGEIVYTPFEVQHTREGMSELVSLLRSSGEEVRAVLESTGSYHCPVVTALLENGIFVSVVNSLRMKRFCSQSIRKVKTDRIDAMQIALYGLAYWQELQPARLPEDTYRELQLLARQYYQMTSMLIKAKVDFNAICDQVLPGMQELMNDHAGRHKLSDFVLRYHHTTHILEMGETRFRKDYCKWAEKKGYRNHERMAALIFATAQNGIPVLPNAPSTQIVITEAIRVLHTVEASRDAILTQMQALAKTLPEYSLVREMPCIGDTLAPRLIAEIGDVRRFHSKRALIAYAGIDAPPYQSGKFRANNRHISKRGNRYLRKTGYEVMQSYVMHKPANDPIFTFIEKKRSEGKSGKLAMVAGLNKFLRVYYGKVTELYRSLPAIE

SEQ ID NO: 513919 - protein, 395 aa, unidentified
MFIVGIDIAKRSHEAIIITEDGQVVRKAFSFRNNCTGYNLLLEQVRRLTLVKSQIVFAMESTAHYWLALYARLLKDGYTVMVLNPIQSHSLRELYIRKTKTDARDSLIIADLVRFGRCKASNVPQDKILALRELCRSRAYLVDMAADLKRKLIALLDRIFPEYESLFDSVFSKASIAVLRKYSTPQKVKNANLRKLTDLLMESSNGHFGEWKAHQLKEAACSSFGIDDSGGVYSTLLGVFLEQILSLTAQADSLEKQISVFFQEFNNPLTSIPGVGTVLAATILSEIGDITRFSSADKLLAYAGLDPSVKQSGEFKSNQNRMSKRGSPYLRRAIWLASTVAVHRDPMFQIYYEKKISEGLHYMNVIGHVSRKMTAVIFAVLRDGQPYQPILQSAG

SEQ ID NO: 513920 - protein, 437 aa, unidentified
MQEVEGEPLFCERAAGIDIGKQMVAVTIRVPSESREGGRQQETREFGTTRRELLALADWLRCWGVEKAGMESTSDYWKPVFFLLEREGFECVLYQASQVKALPGRPKTDKLDSVWLARVTERGSLAGSFVPPEDIRRLRTHTRYRRKLVQMRTAQKERCEKLLEDAHLKLSSVASDIHGVSGRAMLRAVIAGERRPKVLAEMALGRMRPKIARLEEALDCSFFTSEHAFILQMMLDSIDELTAQVAVLDERIAVLCEPYERQVEQLDGIPGFGVTAARDLIAEIGTDMSAFPTAGHLASWARVAPRARESGKRKGRSATGRGNPYIGGTLGETAASAGRTQTFLGAKLRRLCKHMPKKKAQGAIMRTQLVIAHALLSDPEAEYQDLGPGYYEQRADTRRQARSHIRAIERLGYKVTIEPLDPDADPETGELITRTAS

SEQ ID NO: 513921 - protein, 390 aa, unidentified
MIYVGIDVAKDKHDCCILGPDTEELFQVFTIRNNSDGYGELFHKIESVSKDKSQIKIGLEATGHYSYNILGSLLDHGYHTFVINPLHTNLYRKGQSLRKTKTDKVDARSIAEMLVTDKTLKPYTGTSYHSEELKSLTRYRFELVKERAKMKTSVSRLVNILFPELESLVPTLHMNSVYRLLQELPGAYFIASSNLTHLKALLADASKGRYGREKAIVIRETAKSSIGSLMPAKSMELRQTIHRIDTLTSDIKEVEQSIQKIMDECGSPITTIPGIKYRMGAMILAEIGDFTRFSNADQVLAYAGLSPSTYQSGQLISSYARMEKRGSKYLRYALFNAAIYVSGWDERFRLYLSKKRAEGKHYYVAISHVIKKLVRTIFRMEITHTSYQPL

SEQ ID NO: 513922 - protein, 399 aa, unidentified
MIENYDSVDVFIGVDVGKGEHHAVALDRAGNQLFDKALPNDEAKLRDLIGQLKRHGQVLFVVDQPATIGALPIAVAQAEDVLVGYLPGLAMRRIADLHAGEAKTDARDAAIIAQAARSLPHALRSLQLADEQVAELSMLCGFDDDVVGQITATSNRIRGLLTQIHPALERVIGPRLDHPAVLDLLQRYPSPTAMRAAGTTRLGNRLVKLVPRMGRRLADEITQALSEQTVVVTGTNATSIVLPKLAEQLTALRRQRDEIAVEVERLVEAHPLHPVLISVPGVGIRTAARLLTEVSGKDFATAGHLAAYAGLAPVTRRSGSSIRGEHPSRRGNKILKRALFLSAFAALRDPLSRAYYDRKIAQGKRHNQALVALARRCCDVLYAMLRDGTLYQADHQLAA

SEQ ID NO: 513923 - protein, 346 aa, unidentified
MKQITTIGLDLAKQVFQVHGAESDGIPVVSRKLRRADVLDFFKKLSPCLIGMEACGGSHYWAREIAKFGHDVRLVPPSYVKPFVKRGKTDAADAEAICEAVIRKTMRFVPVKSADQQAAAMVLKTRELLVRQRTQAINALRAHLSELGIIAATGPAKVATLIEIVRDEEDVRLPQAARFALSELANQIERTKKRIDKLERAIVIEAKRDEDMRRLVTIPGVGVIIAASIKALVPDPHGFKSGRHFAAWLGLTPRSYSSGGKERLGRISKMGNSTLRSLLILGAISVLKHARHRTDASTWLAAILARRPFKVVATALANKMARIIWALLTKGGTYRKSGLAIGTASA

SEQ ID NO: 513924 - protein, 412 aa, unidentified
MVETIVERPAALDVHKAQVTACVRVPADGGGREQHVAEFQTTVPDLLALRDWLAAHGVTQVAMEATGVFWKPVWAILEDEFELLLVNARHVKQVPGRKTDVSDAAWLCQLLEAGLLKASFVPPKPIRTLRNLTRYRKSQIQERQREANRLHKALEDTGIKLDCVASDILGVSGRRMLDALIAGTTDPVVLAELAKGSLRRKIPALRQSLEGRFDRHHALWIGAILNHIDFLDEQISALSEAIEEEIRPFVAAVKLLCSVPGIQQRGAECIIAEIGVDMSVFPTSKHLASWGGQCPGNDKSAGKRRSGKSRNGSKWLDYALEEAAMAAIRPSDNYLAAQYQRLRPRRGHKKALGAVKHSILCICWHMLATGELYYDLGGDYFHRRDPERQTKRLVKQLEALGHTVALQEAVTA

SEQ ID NO: 513925 - protein, 388 aa, unidentified
MVVSENRSAADIGYVLGWTAPDGIAMCQNEVVEDLKQGRPSVEQIIRIGLDTSKSVFQLHGVDAAERPVLRRKLRRGQVLGFFAKLAPLKVGLEACGAAHGWARELRALGHDAVLLPPQYVKPYVKRGKSDAADAAAICEAMSRPSMRFVPVKSADQQALQMLAKLRAQFIGRRTQLSNSIRGFAAEFGLIAPKGLSRLGDLLADIRADAALPAMAREMFETLARDYARVSEEIAVLDERLLALHRDNEVSRRLAAIAGVGPIGATLLAIKVTDAHGFGSGRDFAAWLGLTPKNHSTAGKNRLGVITRAGDEMLRSVLVAGATALIQHMRRGGKRTWPWLEALIARKPFKLVAVALANKLARIAWKLMVSSEPYRPIGARVPVAMSRP

SEQ ID NO: 513926 - protein, 401 aa, unidentified
MRFAGIDVGAERHMLAMVGEEGEVLCRSSPFGEDASGYARLFELLGPPEGCLLALEATGHYWRNLFVALLAKGYAVAVLNPLRTRRFAEEELQRTKTDAIDALGIARFAAQKRPSAAQLPDVATEELRELARLRARLREDFASRLRQLHRAVDLGFPEFTRHVHTLESPLAAAILSRYPTAASFHGVSVKKLARIVYDGSHKIGEELARALIDEAANSVGSHHSEPYRLRIRYLCEDLDVLRRRLKDLARDIERKLDDHEVGKLLTTIDGVGPLTAACLIAELGDPARFRSAGAIASYVGVVPRLRQSGKKRFSGSPTIPFGNARLRKALWMVVLNAVRCNPWLRQYYERLRAAGKPGKVAVIAAMRKLLTAVWSVATHRKPFVPHLPRVPAPLGAVTNKA

SEQ ID NO: 513927 - protein, 429 aa, unidentified
MRQTGECMMDKERRWFVGIDWGSQEHVVSLCDEGGSKIGQRKFPHGGTGLSDMIAWLLKASGSKPGEIHVAIETPHGPIVEVLLERGFNVYSINPKQLDRFRDRFTVAGAKDDSRDADVLADSLRTDTRAYRKLSIAEPVIVELREWSRIDEEPKVEHVRLTNRLKHQLWRYYPQMLELADDVGANWFLDLFEAAPTPEKAANVREKTIARILKSHRIRRFDAAYVLAELRKRALTVAPGTIEAATAHIRSLIERIRIINGQLADAQRQLDRLCKKLSEPVADENGETAQGQKNEQPDAAILDSLPGVARTVLATLLAEAPDPLQHRDYHALRALCGSAPVTRRSGKSCMVVRRYACNRRLTNAAYHWAQNAIQRDPTSRAKYDALRARGHGHARALRSVIDRLLGVACAMLNNGTLFDPEFASKRAAA

SEQ ID NO: 513928 - protein, 348 aa, unidentified
MDKITAVGLDLAKQIIQVHGIDAAGHVVLRKAVRRERLLALLAQFRLCVVGMEACSGAHHWARQFKQLGHEPRLMAAEFVRPFRKSLAAKNDANDAEAICTAVVQPNMRFVSIKSVEQQALLSLHRIRQGLIEERTATINRLRGVLAEFGVVLPQSVPALQRALPTVLADAERLPAVVQRSLQLLLEHLRELELRLAEFDRQIAQHAKSSAPAQRLAALPGIGPLTASAVVATVGNAQDYRNGRQFAAWLGLVPRQYSSGGKCKLGPITRRGDAYLRALLVQGARSTLQAALRRAPARHDRLSAWIVQLAQRVGYHKTLVAIANKHARIIWALLAREQTLDLARTTTH

SEQ ID NO: 513929 - protein, 373 aa, unidentified
MSEFNKFVGLDVHKSTIAISIASDDGAEVRYFGEIKNTKEALINFANKISQGSLKLSFCYEAGGCGYEVYRHLRNIGHDCMVVAPSLIPKKAGQRVKTDRRDSLNLARLHRAGELTGVWVPDAMNEALRDLTRAREDMKHLQRQAKQRLLAFLLRHGWTYSGKSNWTKDHFNWLETVKFQHAAQQIVFQEYVDTVKYCGKRVESVTQQIEICSRESAYWPVVESLMALKGIDLISAATIMAEIGDLTRFDSAPKLMSYLGLVPSEHSSGSSVRRGGITKTGNSHVRRVLVEAAWTYRFPARKTAHTQKRAKVTTEAVQEISWNAQKRLCQRYKELNANGKIKVQTCTAVARELAGFVWAIGQTVPLKPTAYVQ

SEQ ID NO: 513930 - protein, 340 aa, unidentified
MEWTVAVGVDTHKDAHVCVALDRLGRQLERASFPASEAGYGACLAWALALGEPAFAVEGCGSFGAGLARVLTGAGLPVWEAERPRRRERRRGKSDTLDALRAARRLLSDGEGLSELRSLPGREALRVLLVERRSAVSARTQALNQLHGLALTAPTRLRERLETLAGERLAEAALRLRPAETAGVEERVLVEVARRLGRRAQALTRELAALDARIAELVRSLAGKLLAEPGVGPVCAAQLVVSSGDPARLRSEAAFAALAGTSPVEASSGPQKRHRLNRGGDRRLNEALHVIALNRIRHHPETAAYHARLLERGKTRREARRRVKRVLARYLYRQPCALLA

SEQ ID NO: 513931 - protein, 414 aa, unidentified
MKPTYRSVAGIDIHKAMLAVVVRQERDGKTEYENRKFGTMRREIEHLAAWLQQQGVSEVAMESTAQYWRPVWYGLEGLFQLHLCHPLKTKAPRGRKRDFRDAQRLADRWWSGDLEDSFVPGSEQRSWRWLTRTRVQMKKKLSVIQNHVEGLLEQGGIKLSAVVSDLFGVSGWAMLEDIAKGVTDAEAMAAKARGVLRRKDSELKEALAGKLDPVYRFLLRQHMEQVQLLRRQIEEINRELAETMKGQLPVLHRLSKIPGVDLHAAQELIAEIGPEAAAFKSAENFASWVGVCPGSQESAGINYSCRSPKGNRFLRRLLCQIAWAAIHTKDTFFAGLFGRLKPRIEGKGAAWAVAHRIAKVVWLVLHREVEYHERGSAPPNPRTLMRKFRRLLKDFGSLGIDVPALLNHQLAALN

SEQ ID NO: 513932 - protein, 361 aa, unidentified
MNGVGTEAAPSIIEGTTMEHYAGIDVSLESSCVCVVDRTGRVIREAKVASEPDALIGWFRSLGVELARIGLEAGPLSQWLYAGMREVGFAMELLETRHVRDAFKTMPVKTDRKDARGIAQLLRLGWFRPVHCKSLPAQETRALLTARKQLQSKLHDIELSLRGTLRGFGLKVGRTTARTFAGRVCELVSGHPTLATIADAFLSARTILAAQLHRLEKRVLAVARSDTRTQLLMSAPGVGPVVALTYVAAIDDPARFKSSKATGAHFGLTPKKYQSGETDVTGRISKIGDASVRTMLYEAANVILTKPVKGSSLKSWAMRVAKRAGMRKAKVALARKLAVVLHRMLVDGTKFIADKAAAAAA

SEQ ID NO: 513933 - protein, 402 aa, unidentified
MNAVGIDVSKGKSMVAIMRPFGEIVSAPFEIKHTASGINSLVELINSVEGESRIVMEHTGRYYEVLAHQLSEANLFVSAINPKLIKDFDNDSLRKVKSDKADAIKIARYALDKWQNLKQYNVMDELRNQLKTMNRQFGFYIKHKTAMKNNLIGILDQTYPGVNTYFDSPARSDGSQKWVDFASTYWHVDCVRKMSLNAFIVHYQNWCKRKKYNFSQSKAEEIYGKAKELVPVLSKDAITKLIIKQAVDQLNSASTTVESLRTLMNETASKLPEYPVVMAMKGVGTSLGPQLIAEIGDVSRFTHKSAITAFAGVDPGVNESGSYEQKSVPTSKRGSSDLRKTLFQVMDVLIKTHPQDDPVYQFLDKKRAQGKPYYVYMTAGANKFLRIYYGRVKEYLSSLPES

SEQ ID NO: 513934 - protein, 428 aa, unidentified
MNAKDDIRIKHFRQLKKEIRGSSEYVIVGIDVAKDKHNAFFGTATGKTLLRRLVFENNIEGFRKLHIRTEAIKVQHNLSKVVFGVEPTANYHKPLAEYLIKGGEHVVLVSGVAVSNNRESLDGRWDKNDTKDSANVADLISQGKCLYYDYPSIPLRDIRNLLSLKRRLKKQEHGTRVRIRNHLLAQYFPEFDRYFGKGCSESLSIVKWCLNPCMISGIRYEEFVKLVAPRVRTISQRNRLKAIWGMAVDSIGCEVGQALDFEAKLMVEDLQQVQGSIRAVEDHIKDVCLGFPEYSYLLTIPGFGPDISSKVLGAIGNPFRFDNGKQVLKMVGYDLGANRSGKTSDSAVPVISKRGSAYLRYALYQAAFIASTSNRHFIMYYTNKLRGREREKGIKTKMRVKLAAKMLIIAWTLMKKKESFDPEYLNIG

SEQ ID NO: 513935 - protein, 381 aa, unidentified
MTTILQKKTITKKEEAVLFIAFELSNSKWKLCFSNGEKRRQKTIDARDLLQLSLEIAKAKEKFGYETCRIISCYEAGRDGFWLHRYLIKNDIENVVIDSSSIEVDRRARRAKTDRIDADSLVRLLERYGRGEKAFSVVNVPSAEEEDQRRLHRERERLIKERTSHSNRISSLLILHGIKVEVGKADFLKQLESVKTGDGSILGEGIKEELRRQYERYSLISIQIKGLEDQQKEMIKSVKKETTTSESLKKIVQLMELKGVGPISSWVLVMECLGWRKYKNRRELAASVGLTPTPYTSGDSHKEQGISKAGSRRIRSLLVELSWLWLRNQPDSKLSLWFNERFGGGGKRMRRIGIVAMARRLFIDLWRFLEHGLIPEGAILK

SEQ ID NO: 513936 - protein, 393 aa, unidentified
MQNCLAIDVAKGKSMVSLISSCGEVLIDPYEINHSINDFTNLLNRIKKLKLDNISVIMESTGIYHRPIERFFLENNFKVYTINALYSKMYKRNLRKTKTDKLDCISLAELFFTTDFKQYIKPDDLYLNMNALSRQYFALCDLCTNIKNRYKNLIYLCFPEYELIFKKEAIYSDIALSFIEKYPHADIISNTRIDALQNFFRKNNFRYWKNKANIIKEYALKSYPSVNMNDESVSNLSQLARLINNYQKEIETIKYKLTFLAKKPKYFEPVNSIFGIGEFTTSIIIAELGDINRFNNIKELTAYCGLDPSIKQSGRSIDIHGPISKSGNKYLRKILFVCCLNIVRLSSKCHTENDIEIYYRKKRNEGKHHYAAIIACTTKLLRKILALCKQLDK

SEQ ID NO: 513937 - protein, 393 aa, unidentified
MFYLGIDIAKNTHVASLMDEKGKTIFKGFSFSNTTEGGKSLLEMIKKYSNFTDVTVGMEATGHYWLSVYSFLYDYDFYCIHVINPIQTDGWRKGSEIRKRKNDTIDSVLIADLIRYGNFVETTLSNEDLYSLRNICRMRNYLIQSAGDLKRKVICVLDQVFPEYQTIFSNTFGTTSKQLLLDYSSPSDFEELSVKGLTETLEALSRKKVGQSTAEKIISSAKNSFGVTFSKESFKFQLKLLIEQIQFIDNQVKECETKIKELMEKINSPITSIPGIGPVLGAVIISELGDIKRFDKPSKLVAFAGIDATVSQSGEFEGTHNVMSKRGSPYLRKALFQAALVASNTDPILKAYYQKKRAEGKHHKTCIGAVARKMCNIIYVVLKNNKPYEVPNK

SEQ ID NO: 513938 - protein, 346 aa, unidentified
MFLIGCDFHPSWQQVCWLNRTTGETEEKKLVHAPGEVERFYRQFPAPARIGMEATGNCQWFVELVTALGHQLWIGDAAKIRASDSRQQKHDKRDARLLLRLLMEERFPRIWTPSSEQRDLRQLLVHRYKLVLLRMQAKNGLQHLALNQGLQKKRRLWSRAGQKLLRELPLRPWASRRREDLTSVVKLLDQQIQSLDLAVMGAAEKDANARLLMTQPGVGPITSLAFVLTMGDVSRFRRGKQVASYLGLIPREYSSGGHQRLGSISKQGNRFLRMLLVEAAQGAVRCDPQFRSEYLHRCHEKPKGVAKVAAARKLAIRLYWMLRTQKGYPEVVSIESSSRVPLVGAS

SEQ ID NO: 513939 - protein, 341 aa, unidentified
MKKYIRIGVDLGKGYFQVHALENEAGAAVNRKISRGKFLAFFSGISPCRVGMEACGSSNYWAREIAALGHEVVLIAPAYIKPYVKRGKNDAVDAEAICEAMSRPSMRFVPVKSAEQQAALMLHKDRELLVKQRTMSVNALRGHLAEFGIVVAKGIQHVDHLLELARKDADLPEMAKQAVERMASRLNDLDQAIAATEKAIAAASAKNANSRLLDQVPGIGPLIASVIAASMPDPSAFRSGRDFSAWLGLTPSQNSSGGKEKLGPITKKGNRYIRKLLVVGSTSLLRVAHKRKGALADWINALAAKKLQKVAAVALANKLARICWAILSTGECFREETYAKA

SEQ ID NO: 513940 - protein, 372 aa, unidentified
MREDSEAYVGLDTSKLRISVALAVAGRDGEVRFFGDIDSAPEAVERLVRKLEKRYRRLCFVYEAGPTGYGLQRQIVAFGHDCAVVAPSLIPKRPGERVKTNRRDALSLARLHRAGELTPVWVPDPGHEAMRELVRAREAAMEDLRAKRQHLQSFLLRHGRVFTGRGAWTKAHTRWLCELRFEHPAQHLVLAEYRQAILDAEARLERLAGQVAELVPSWSMAPVVAAYQALRGVAFLTAVTFAAEIGDVRRFDSPRQLMAYLGLVPSESSTGEKVRRGGITKAGNGRARRVLIEGAWTYRFPARMSRPLQERQVGLPKAVCDIAWKAQLRLCGRYRKLAARGKRQGVVTAAIAREMAAFLWAIGREVEPRPAA

SEQ ID NO: 513941 - protein, 344 aa, unidentified
MTKISTIGLDLAKNVFQVHGVDASGAVVLGRQLRRAAVEKFFAQLPPCLVGMEACGSAHQWARVISGYGHEVRLMPPAYVKPYVKRNKNDGRDAEAICEAVSRPTMRFVPVKSVEQQATLAVHGTRALLVRQRTMIANALRAALSELGIVAAQGYEGLRELMARLQEASDEIPEMMRGALLLLAQHWQALDTDERVLERQIAKAARCDGEARRLMEVPGVGPIIASTVLAKVPDAKVFRSGRDFAAWIGLTGRDHGTGGKHRPGRISKQGDRMLRALLISGASAHLRQQKRRGISDPWLRELLARRPYKVAMVAFAAKTARIIWAMLVKGEHYRDRASAPAAAC

SEQ ID NO: 513942 - protein, 356 aa, unidentified
MSREIKYIGMDVHKEAVVIAVLSSSGKLVMESVVETKASSILQFIHGLRGELHVTWEEGTWAAWLYDLLQPQVRQVLVCDPRRNALLKEGNKSDKIDARKLADLLRTGMLRPVYHGEHGLRTLRELGRSYRTISQDLNRVMNRIKALYRGWSIPCAGTQVYAPRYREQWLQKIEHVGVRRRAELLYQQLDGLQGLRRTLRPELLAESRKHKASKLLRQIPCIGPIRAARLIALMQTPHRFRSKRQLWTYSGLGIETRDSAQYCYVHGQLQRTKKPQQIRGLNRNHNHEMKEIFKGAATRASCGVGPLHDFYVALVAKGMKPEMARLTLARKIAAIALTLWKKEERFDTEQLKPQAA

SEQ ID NO: 513943 - protein, 340 aa, unidentified
MVIGVDAHKATHTAAAVNRQTAEFIEQRTVPARQGGHQDLLAWAQGIDEDRVWAIEDCRNLSSGLERVLLEAGERVLRVPPKLMASQRKSERTFSKSDPIDALAIARAAIREPRLPEATLPGIEQEIGFLVDHRDDLIQDASAHQRRLRWHLHQLDPAFDIPLRAMNSPSTLDKIARWLARRPQGAQVRICRELVNRIRELHGTATSLEHELARLVKQTNPELLAIPGCGTLCAAAIIAQVGGIDRFATDARLAAYAGVAPLDASSGRQQRHRLNRTGNRRLNRALHIIAVTQVRIHPPAIEYYARRKADGKTNREALRALKRHLARTIFNTLTKKAALT

SEQ ID NO: 513944 - protein, 314 aa, unidentified
MSTEYFVGIDVSKDTLDVCVYPAQDTFRVPNSPDGLDELIKRLKPIAPRLIVFEATGGYEALAVSSLAAAGLPVVVVNARQIRDFAKSIGRLAKTDAIDAGVIARFASAVRPELRPVKDSCSQELTGLVTRRRQIVDMIVAETNRLKTATRRNRRDIQTHIRWLQKRLDQIDDEIKRDIQNAPLWRTTDHILQSTPGVGPTTSAKLISGVPELGQLNRKKIACLIGVAPLNRDSGRFKGRRMIWGGRAAVRSALYMSTLAAIRFNPIIRQFYQRLRNAGKCFKVAIVACMRKLLIILNAMVRNQTTWRYCKFNR

SEQ ID NO: 513945 - protein, 408 aa, unidentified
MVYIGIDIAKRFHVLSAVDDDGRTVIESFKFANTDAGFKELLGRLKKAGIGPEGSLSGMEATGHYWVALFDFMGAHGYDAAVINPIQTDAFRDVWTVRKVKTDAIDAAMIADLVRYKRYEPSALGDEATGALCSLSRYRMSLVERSTTLKNRATAILDRVFPELDGLFSGSFGPTQRKLLEHCATPEQVLSTNVRTLERILKEASNGKCGRAKADELKEAARKSVGVGFGSRTLAFEVRLLMEELDFIRGQIDEVETELARLLDETPGKWLLTVPGIGLALAAAIAGEVGDPNRFEGPHQLMAFAGMDPTKSESGETVASDGSMSKRGSAALRWAFMEAADSVRRYDPYFGDYYAKKKGEDRKHHYVALSGVARKLMGVCLALMKEGRPYEPAPPKHHRPGHLQEAAK

SEQ ID NO: 513946 - protein, 349 aa, unidentified
MKETVLKQALGIDVSKASLSMCLGIMKGDLSKEFTPGKDVSNDKSGYKGLSKWLKKVSGTGDLPTIVMEATGVYHEGIATYLYDLGYQVSILQSGRVKKYAQSLDQRSKTDALDSKMLCMLGCERTLLAWSPPSPVMQTLKALSRERSALIKDRCIEKNRQGAIDSSIYSNKKEIKRFNQRLKLLNAQITEVEMEMREVTARDLELTKKLGYLESIPGVSFISAITVIAETSGFALINSGKQLTSYAGYDVVMKESGTYRGKTRISKKGNRHIRAVLHMPSMTCVRVNPTLRTFYQRLKPNKVKPMVALVAVQRKLLILMYTLWKNEEYYDGEFEQKKAASLQETCCTG

SEQ ID NO: 513947 - protein, 365 aa, unidentified
MDVHKESITIAVLPAVAKGPTRLDRLPNDLPKLKRWLDRVAREGELRACYEASGAGYVLHRALHDWGYGCEVIAPSLIPKRPGVQRKHDTRDAADLARLYRAGELTAVRIPSEADERVRDVVRCRETFQREILKSQHYILKFLARRGFVFREGTNWCTPHLKWLQHLTTEGSPLAAYDRLVYREYHALLLYKLQRRDELDRQIEQLALLPSLAPMVRHLQCFRGISIHSAMVLATEIVDWRRFERPAQLACYLGLVSREDSSGDRQRLGSITKAGNSHCRHVLVQAAWSYRHRPQTSVDLKRRQQGQPPAVITHAWKAQQRLHQRFNHLSYRKRPQIAVVAVARELVGFLWAVMQDVAPANSHAA

SEQ ID NO: 513948 - protein, 322 aa, unidentified
MSSHEIVGIDVAARKLVMIGERVALAEYENTAAGRSKLAKALSRSPRPVRVVLEATGIYFLDLACELAAAGIAVMVVNPKATHHFAEAILQRHDPVDAAMLREFGRRMDFVPWQPPRHELFAFRALTREAQALSKAVAAAKNRLHAITATQLAPDTLIRALERQIAQNQALVDELVAAALAETKTNRELARLVARTDSAPGFAVKAAVLVVGELAVLPPMTARQWVAQAGLDVREECSGTSLARRPRLSKRGNKRLREALFYPALTAARCCPLAGAFVERLVAAGKTRLQAIVALMRKLLHGLHAMWRNDEDFDAEKLFAPA

SEQ ID NO: 513949 - protein, 425 aa, unidentified
MNCKQNQRINQVKDSTLVIGIDIGSTLQYARAFDWRGIELGKVYKFSNSREGFESFAEWMRGLQDKYRKTEVIVGIEPTGHYWFDLGAYLEDEGILLVMVNPYAVKQTKELDDNSQSKNDNKDPKVIAKLVIEGRYAAPYTPDGVYADLRVMEINRKRLIGEMTQIKNRFARWFAIYFPEYREVFGEYESRSSMLVLKKACTPEAIVELGAEKINQIWRDAKLRAVGMKRATSLCEAAEKSIGLKKGSAAARYEMSLLLADYEYKKAQIESVMEEIEELCKRIPESEQMLAIKGIGLITVAGFLAEVGDARRFESPRQIQKLAGLSLRENSSGKHKGQTTISKRGRSRLRAILFNAAIPLIATNPEFRALHEYYTTRVENPLKKKQSVIAISCKLIRVFYAILVNGVTYDPQKMMSDIHRAPQAA

SEQ ID NO: 513950 - protein, 332 aa, unidentified
MSLVSTVGIDLAKNVFSVHGVDSAGTVIVRRTLSRAKLSELVAQLPPCLIGMEACSGAHEWARRFATFGHTVKLMAPKFVTPYRKGGKNDGNDAEAICEAVARPNMRFVPVKSTEQQSDLSLHRVRQGFVEERTATLNRLRGLLAEFGHVVPVRAVEMRRRVPALIDRLPTRVAGCARDLLEHATQLEAKSLQYEREIKSHVRTNELARRAQARLGIGPLTASALVATVGNGHDFKNGRQFAAWLGLVPRQYSTGGKTRLGHITKRGDPYLRTLLVMGARSVLQRAASLTDPLSRWALAVRERRGYHRACIAIAAKNARVAWALLAKEPVAA

SEQ ID NO: 513951 - protein, 355 aa, unidentified
MIFVGIDWAEAHHDVCVLDESGELLAKGRVPDGVEGVARLHEMVAAHAEEPAEVVVGIEIDRGLLVGALVAAGYRVYAVNPMAASRYRERHTTSGAKSDPGDAKVLADLVRTDRHNHREVAGDSELAEAVKVLARGHQSLIWSRTRQTNALRNALREFYPATLQAFPKLGTLETCAVLAAAPTPELGRKLSEARIARMLRAAGRQRNVGQRATEIREALRSPQLEAPAVVAGAYGEVVRSLAGIIQGLTREIERLQAELSARFEVHPDAEIILSQPGLGSILGARALGEFGDDPNRYVDAKARKCYAGTAPITKASGTRMIVLARVARNRRLADACYLWAFAAISTSPGARRYYG

SEQ ID NO: 513952 - protein, 411 aa, unidentified
MEKVYDKCCGIDVHKKLIVACLRKGNKQEIRDFGATTRELLELADWLKEGGCEMVAMESTASYWKPLYNILESSDLNAMVVNARHMKAVPGRKTDVKDAEWIADLLQHGLLQASYIPAKDQRELRELVRYRKSLVGERGRELNRLQKMLEGANIKLSGTVSDINGKSARSILEYLITGASIDSDKYDEMYEKKVIAHNLKASKEQIIDDLNGVMTPLQRRMMKELLGHLDELNIHIKNLDDEIDNFMKPEEKQAAAVIEDVTGIGHTSAQAIVSVIGTDMSRFPTDAHMASWAGLCPGNNESAGKRKSGKTRKGNALLRSTLVTCAHAATRNKSSYFYAQFTRISAHRGKKRAYVAVAHSMLVAIYHILKDGVVFNDLGADYYNQFNKERKINAYLKKLKALGWEAPVVAA

SEQ ID NO: 513953 - protein, 492 aa, unidentified
MESLVEVERLLPRLRECISTSPPARSTNPKRRFDAMTRRKKKQGKPCGDETLPQIRENAAGIDVGATEHWVSVPSDRDPEAVRCFGAFTVDLHALADWLKACRIDTVAMESTGVYWIPLFEILEERGFKVSLVNAKHLKNVAGRKADWTDCQWIRIVYSRGLVSASFRPPDQIAALRSYLRHRKTLVEYAACHVQHMQKALTQMNLHLHHVISDITGVTGTKIVEAILAGDRDPMRMAQLRDKRIKSSPEVIAKALEGNYRPEHVFALGQAFHLYKTYREQIEACDQQVQLHLQRLETKVDPLQTPLPESRRKRNARKRRNEIRFDCRTEAYRIAGVDLTTIDGIDESTALLILSEIGPNMSPWDTEKHFASWLNVSPNHQISGGKILDRKTRKQKNRLRDALRICAQSLLHSQSALGAYCRRICARIGHPKGIIATARKLCCLIYRLLKFGTAYVDKGQQHYEQRFKERAVKNIARRAKEFGYQLVAITEG

SEQ ID NO: 513954 - protein, 343 aa, unidentified
MQAITTIGLDIAKSVFQVHGIDAEGKVVIRRQLKRRYVLAFFQKLPSCLVGIEACASSHHWSRELQALGHTVRLMPPAYVKPYVKRQKNDAADAEAICEAVTRANMRFVETKTPEQQSCLMLHRTRHLFIRQQTAMINAIRAHLAEFGIVAPVGRNGVEELLGVVADPGDKRVPEVARACLAALGAQLRMLKAQILEFDRMINAWHRSNDTSKRLDGIPGVGPALATALVASVADPKAFRSGRNFSAWIGLVPKQHSSGGREKLGGISKQGDRYLRSLFTAGALAVIRYAKIHGTKHRPWLTALLARRPTKVAAIALANKIARMAWAIMARGERYKEPVALAA

SEQ ID NO: 513955 - protein, 427 aa, unidentified
MKYTQNEKILQITEEVLVIGTDIAKEVHAARGFDFRGIEYGKRIDFENSHQGYQNFLDWATGLKTRFGKKQIVVGLEPTGHYWFNYAQFLKDNGIRVLLVNPYHVKQSKELDDNSPTKNDRKDPKTIAMLVKDGRFVEPYIPEGIYRELRVALDVRERINKQLNIIRNRVARWLDIYFPEFGTVFSDWEGKAALMTLQDFPTPDRVIGLGAAKIAEHWKKEVKRTVGLKRAIKLETAAKKSIGQKQGLEMARYEMALFQEEYELYRKQLNEIEVRMGALVVQVPGISEILRIKGIGVIIAAGLVAEIGDISRFTHPKQIQKLAGLNLKENSSGKHKGKTGITRRGRRRLRAILFLAMMPLVANNKEFQSLHHYYTTRSQNPLKKKQSLVLLGSKLIRIYFALMTKHVAYDPQKMLSDIRRPQPKRAA

SEQ ID NO: 513956 - protein, 341 aa, unidentified
MRLYAATDLHANNNFVAVIDEAGRRVFRRRLPNDAAVVLEVLGHYRDDLVGVVVESTYNWYWLVDALRDGGYQVHLANTAAIQKYTGLKHADDRHDAFWLAELLRLGILPEGYIYPRDERPVRDLLRKRGHLVRLRTSLIVSLQHIITRSCGVRVSVNDVKVLGRDTITPLLAHSDSEELVLVGSISKEAIDFFTRKIRIIERAVQQRVVLKQPYQYLLTMPGVGRILALTIMLETGPISRFAKVGNYVSYCRKVASRWTSNAKTKGKGNKKNGNKYLAWAFAEAAHLAVRTSVEARTYYNRKLSKTNVAVAHSALAHKLARAAYYVMRDQVPFAPEKLFS

SEQ ID NO: 513957 - protein, 377 aa, unidentified
MKSFANPVCRVNAEVIGLDVHQRIIVGCRLDRRGNRIGEYSLDGSRQAFEEFLHGEVGRRRPHFALEACGGFLWVYDLLVARFGRERVHLAQPRRIQMIANSTSKNDRNDAFWLAYLTFEGRLPEAHVPEEIYRELRVAARERIHAVEGRSTAIRRLRGHLRQMGERLPTKAFDTQKGRAFVAELAGRTAGCRGLALREEVATIEVLDAKVGRWEAELERLCKDLPAAQTLAREMPGVGPVLAATILGETGAVGRFPSPKALGRFTGLTPSERSTGGEEIHGPITREGSRYLRWALVQAVVHCVLAKRGAAYAVGRWTRARERRLGRLKARVAAARKLAESIWRLFHLGEAFDACKPFGGPGPSSEAGYQVMRQREA

SEQ ID NO: 513958 - protein, 345 aa, unidentified
MKITTVGIDLAKNVFQVHGTDERGKAVLRKQLRRAQVAVFFGNLPPCVIGMEACASAHHWARTLQRFGHTVRLMAPQFVKPYVKTNKNDVADAEAICEAVGRANMRFVPIKSIEQQAILSVHRVRQGFVKARTAQANQIRGLLGEFGLVIPQGIINVAKRVPEILEDASNELPTPFRHLIDRLSKHLKELDRQVKQFEREIVVWHRSSELSRKLEKIPGIGPLAASALVASIADAHSFDNGRQVSAWLGLVPRQSSSGGKPTLLGMSKRGDAYLRTLLIHGARSAILAAKNKVDNTQGWLANLLNRRHPNIAAVALANKNVRTVWAILAHGREFKPDYVPPRMAA

SEQ ID NO: 513959 - protein, 410 aa, unidentified
MPKIVYPICCGIDVHKSFVVACVATTDEKLVTTYKRKRFSTFTGDLRRLAQWLNENNCRDVCMESTGKYWIPVYNILEPSCKIVLAHPKYAKAIKGKKTDKRDAQWIADIFKHDLINGSFIPPADIRQLRDLVRYRVKLTSYITGEKNRAQNCLTVSNIKLDDVFSDVFGKTASAITERLLESDEPFDVRPYLTKRLKASPEEIQLAVDGAMCVNQAEKLRIIRSHMANLELCKANLESEILTVAQSHLPQINLVLTVPGIQSFSAIAIIGEIGVDMSVFQTSRHLCSWAGLTPQNDQSAGKKKTTRISRAGAYIKPLLVQCALNAIRSKKNPEIANRYNVLRKRRGHKKAIIAICRMLLTAIYNILKKNEPYNAELYRQANAPPTQREVSIEQAIFILQRQGYLVTAAT

SEQ ID NO: 513960 - protein, 358 aa, unidentified
MPSSRAPVESPVSVIVGVDTHKYTHVAVAIDALGVRLADRSASADRAGYTELVAWARALGTVQAFGIEGTGSYGVGLASHVRRNAIPVVEVSHCDRRKRRNNGKSDTLDAETAARSVLAGIATAVPKTADGTAEMVREIKVARDTAVKARSAAIITLKTLIVNAPVELREVLEPLTDRKLIDRCARLLPGALVDTTASTKHALRALATRWIYLSTEIDTHDDILDAVTRAAVPTLREAFGIGPDSAAEMMIVAGDNPTRVRSESAFAKLCGACPIPASSGVTHRHRLFRGGHRQANAALYRIVTVRMRWHQPTLDYVARRTPEGLSKKDIIRCLKRFVAREIYHALIGDHRTRAAVAA

SEQ ID NO: 513961 - protein, 342 aa, unidentified
MNIHTIGIDLGKTSFHLAGLNERGEVIVRKHFSRTQLLRFTSNRKVHVIAMEACGGSHFLGRALQGQGHKVRLIPAQYVKPYVKTNKSDYIDAEAIAEAVGRPTMRFVPIKSDDQLDLQSLHRVRERWVMRRTAVINQMRGLLLERGITVRKGRRHIEAALPGILEDADAKLSGALRLLLAQLKLELDQTALRLEEADAVIQRTVDENEACQRLVKIPGIGPVTATAVIAAIGNGAAFRKGREFAAWMGVVPREHSTGGKQKLLGISKRGNSYLRRLFVQCARAVLQQKTKQAAGLKAWLEKLTARAHHNVAGVALANKLARMAWAVLATGEAYRPLQLTAA

SEQ ID NO: 513962 - protein, 348 aa, unidentified
MRFYTKTHRHYCGIDLHAKKMYVCIIDGEGKILIHCNINCNPAEFLRAIAPYREGLVVGVECMFAWYWLSNLCREEKIAFVLGHALYMRAIHGGKAKSDKIDSKKIAAMLRGGMFPTAYEYPPEMRATRDLLRRRNFFVRKRGELMAHIQNTVIQYNLPALGFDLGCESNRHQVAEFFSDPEVRKIIEMDVAMIDYYDDALKILEKDIEKTARQHDRHALALLCSIHGIGPILSMVMLYEIHDINRFETVQQFASYCRQVKCSHESANKKKGTGGAKIGNAHLKWAFSEAAIMFMRFNPKAKKLVEKLTIIHGKGKALSILSHKLARAIYHMMKNNKPFDREKFFATA

SEQ ID NO: 513963 - protein, 363 aa, unidentified
MSDGICFAGLDVHARKTAAAAVQLGSGEVWKAQLPGSSAAAIEWLQSLPGEVRAVYEAGPTGFELARAARVAGVEVMVCAPGAIPRQPGDRIKTDTRDALKLARLHAAGQLRPVLVPAPELEALRDLVRAREDLRGDLMRARHRISKLLLRNGLIWTGPGETWAQAHLRWLSRTRLDQPLLEVVFGEYLAHHEVLLARRDRLDALIVEESVKGPWAPTVARLRCLRGVETLTAVGLVAEIGDITAFAHPKQLASYLGLVPSERSSGEKRTQGSITKAGSSHARRLLVEAAWHYRRTPALSLTLKRRQHGQPPAAIDAAWRAQLRLHRRWSHLDSERGKKRTTVAVAVARELACFVWEISNQPD

SEQ ID NO: 513964 - protein, 405 aa, unidentified
MYYCGIDIAKYKHEATVIDKTGKALLDSISFSNRAEGCEKLLILFERLSIAKDELLIGMEATGHYWLSVYGYLLENGFEVKVINPIQSEAFRKMYIRQTKNDSKDSFIIAQIMRFGQFSATSLSDEVIIAMRQLSRYRLALVDNCGDCKRRVIALLDQVFPEYDSLFSDTFGVTSKEVLAKYPTPEDMLSVSTGKLTNLLGKASHGRFGKQKAEQLKSMAAGSFGVSFAKDAFAFQIRQLIEQLNFLETQIGELEEQIAVLLKQTGSYITTIPGIGDTLGAIILSEIGDIRRFDAPGKLVAFAGLDVRVSQSGEFTGTRQKISKRGSPYLRRAIWLAASRAAFCDPALSKYYQGLRARGKHHLTAIGAVCRKLCNIIFAILSQNRPYQMLPPNDKKTSVSSFSPT

SEQ ID NO: 513965 - protein, 424 aa, unidentified
MKNTAAKKRKQVPEGYLVIGVDPHKKRHAAVAITQDFTTQAKFKFDNTREGLDMMLGRAREEMVKCGCRGVMFAIETGGHYWRNIAYYLEETGIPFRFINQYTLKRRREGKDINRRKNDYRDSEVAAQLLCTGEFVESVIPQGVYAELRTSHNAYQRLVKERTRITNLLKGLLDALFPEFTHVFKDPGGLTALSVLSTCPIPRVIAGMTEDEFVATIEARHEGRRLMRKKLRALHCLATRSIGIRAGARSMSSEIAFLVDKLELVKRHIRIMDTTLIKLVDETEEGKYLLSIRGLNYIAVAGLLAELGSFKLYRSAKQMIKMAGSNPTESESAGKKRSKTPMSKQGRPLLRHCAWTAVIPMLRFNADFRAWAKQRRERPAHANPLNGREIVGAALNKLLRLAFALVRNQTYYQDAKPALIPVAV

SEQ ID NO: 513966 - protein, 350 aa, unidentified
MKITTSGIDVAKSVLQVHGIDEHGKVVMRRQLRRSQLLLFFSRLEPCLIGMEACATSHYWARKLIAFGHTVRLMAPQFVKPYRKNDKNDGNDAEAICEAVQRPSMRFVPVKSPEQQADLAVHRVRRRLMCGRTALINQLRGLLAEYGLVLPQGANQVRSKLPALLDDCSESLPPLAIELFRDLYEELVQLEQRIDAHDRRIERLYRANPVCQRLGQQEGIGALTATAFVATVAHAAQFKNGRQCAAWLGLVPKQDSTGGKPRLLGISKRGDVYLRTLLVHGARSAMRHTPKRNDPKSRWVEQLRKRRGENIAAVALAAKHARILWALMVRGESSAQPAAHGVDPLQQPTA

SEQ ID NO: 513967 - protein, 351 aa, unidentified
MGEVIKLGIDGHIEKYVVVMKIDGSAPQRAKRFTPEQFMVWAQELTAKCEQLHSCYEAGPFGYSLHRRLTKMGVTNHVIRPINWDEHGKNVKTDARDATQMVLCLDGYLRGNHRSFSTVRIPSETEEQHRSTTRQRQSLIKERKRLAAKARGHVMYYGGRLQGEWWKPRRWLCLSEQLEPHLLDLLSALRTIIVVVEEQIVRLEKCLEEMTEVALPKGMGSVIFQQMEREVCDWNRFETRKQVGGYTGLCPSEDTSDKRRFQGSITKHGNPRLRHMLIECVWLLIQWNPDYRGIVKWRDKLLEAKLTKASKKKIVVAIARQFAVDWWRIRTGKITPDQLGLTMKAFPATSA

SEQ ID NO: 513968 - protein, 353 aa, unidentified
MKKQHEISLPQTDQVPVSEKLLVGVDIAKAEFAAGTVWQAQYHYQGKTANTVDGCAAFAEALEMRKAEQGATTIHLIIEPTGGYEVALVSEAYRRQWRVTLVNPLTVRHWQQGRGKRGKADRLDTQMLTLFGADKNPPAQQPSDEAAAQLDSLLRRQDDLQLLLRSEHNRRAQTALNPNTPKAVCESIQRTLDALAQELAAIEQAIRQLFADHVTLARQLKQLLTVPGIGAKSAPYLLAFFHRFKAKTNATGTAKQIVAYTGLDPQPFESGSSVRQRPTISKQGDAAIRSRLFLCALGGVRGRNRLKDIYTALCARGKAKKLALIACARKALVWAWSVFIQDTTFDPSRFVNA

SEQ ID NO: 513969 - protein, 334 aa, unidentified
METNYIPGIDISKMKLDAALTIDGKNYDEFQIENNVAAIKKCLDELKARISSLTNLIICIEHTGIYGLPLLDVAVKKGLRICAEPAKQIKLSQGMVRGKNDAADARRIAAYAFKNRENLSFWAPQRECIQTLKALLTTRDRLVKVKIQLEVPIAEAGEFISPAIRKEMKKNTRAAVGGIKKDIKRTEQAIRALVKKDTRLSLQYNLATSVPGVGMMVACNIIIASGEFKRIAEPKKFACYAGVAPFEHSSGTSVRGKTRVSKMANMNIKKLLHLAAMTAIRYNEELREYYQRKVLLGKNKMLVINAVRNKLISRIYACITHQRKYQNNYQYALA

SEQ ID NO: 513970 - protein, 429 aa, unidentified
MDKVIIGVDPHKQSVTIEARDTREILRATGRFGTDARSYRQLLAYARQWPGRVWAVEGANGIGRPLAQRLLASGERVLDVPAKLAARARVFDTGQGRKTDPADAHAIVMVALRDKRLRELAADPDLTVLRLLCDRRDELSRARAQALNRMHRLFLELIPGGAPVKKTTAQYRALLASVRPRDPAGKTRRRMAAEEIADLEHLDAKLKAMKAELKAAVAASGSHLMDIHGIGPAGAARILADVGDVARFPNRAHFASWTGTAPIDASSGQHTHHRLSRAGNRRLNHVLYMAGIVQLRHDTPGRAYYRRRVAEGKTPTEAMRCLRRRLSDVVYRQLAADAHKAGPGGHSGATLSSSAAGLLPVTGTSDQPLPGPVSATLPPPPAAKAAPAARTGATPRRRSRGVNVERPAGRTTLTPTSAGAHSKSPGPPS

SEQ ID NO: 513971 - protein, 473 aa, unidentified
MGKGSGNGTTRGDRKRNARRERLRGLLPRDGAVIGIDLAEDKQAIAVIDHDVRVLARKTVRVKAFRLGQALDWAVGQARAKGFAPVTVACEPTGPRWMQVQRLCAERGLPLVCIQPLVSHIAREQQDYTTHKTDESDCVMIARLAVELHCYVPEELDETWAHLRQLGRRRAQLITAETASMHRIGDFLSVAWPAVTETCAQPLKSVTWLAAVQLVTSRCGGQPARLAEMTEEVFTALVQAAVPGWGRKRAFGPIRRRIFAALTDTEGVVAWSRRGLLRRVADELGDLQRTRAQLRAVEADMAGVLDELGLSRLADIPALTAVGAAAILAEAGDPHRYDSSSSLVKHAGMSPSDNASGTFLGDAHISRRGRPGLRLTVWRAVWPMLQFNPVMAAKYQAMTQAADAAEEQAGGTRSASAAAAAARARRAKARVACAASLLRWIYSMVVHDTSWDAAVAAGEAAGQHAPRCPAEAA

SEQ ID NO: 513972 - protein, 391 aa, unidentified
MLYLGIDIGKNTHVASLLNESDKPLLRAFSFSNTTDGANSLIEKLSHHAKSTSEVEIGMEATGHYWLSVYSFLVELGYIVHVVNPIQTDGWRKGVEIRSRKNDAIDSVLIADLIRYGNFVETSLADENTMSLRNLSRFRNYLVSSISDLKRKVICVLDQVFPEYQSVFSNVFGDTSKELLLHFQTADDFENITAKQLEKALKNISFKDFAKNKLSQISELAAKSFGLSFCRDSFSLQLKLLIEQIKFIEAQVDDVETQIKLILDKIQSPITTIPGIASVNAAVILGEIGDINRFSNPAKLAAYAGIDATVNQSGEYKSQNGKMSKRGSPYLRKALFQAALIASFHDPTFSAFYQKKRSEGKHHLSAVGAVARKLCNVIHAVLKNNSVYLPQ

SEQ ID NO: 513973 - protein, 377 aa, unidentified
MSKVRFVGLDVHADTITVAVAEANGEVRSLGTIPNRLESIRKMIGKLSPIETLKCCYEAGPTGYVLYWQLTQLGVACEVIAPSLIPTKAGDRVKTDRRDAEKLARCHRAGELTPVWVPDANHEALRDLVRAREAAKKDQLRHRHRFGKFLLRHGKRPMDAGKAWTQKYLNWIRIHVHFEQPALEATVKHYREEVDHIAEQIAKLEQAIDEAVKQAPPEIREVIEALQALRGVAQTTAATVVAELGSLSRFASPSQLMGYSGLVSSEYTTGNRVQRGRITKTGNAHLRRVLLESAWTYQHRPNVQGRVLRRQKSLALSDEAKRIAWKAQQRLHKRFAALTARGKESNVAATAVARELLGFMWAIAVHTEAQQNQSKAA

SEQ ID NO: 513974 - protein, 359 aa, unidentified
MGVEDGTGRPVVGGVDTHKDLHVAAVVDEQDRVLGTRCFATTRQGYRQMLVWMRSFGEVQRIGIESTGSYGAGLLRFVQQAGIEVLEVTAPDQHDRRRRGKNDDLDAQNAAHAAFAGRRTVTPRSRDGMVESLRVLKACRKTAVAARRIALQMIQNTIICAPDGLRDLLRTMTRMQLVRTLAAWRPDLSAYRDVESAYRISLKSLARRYLELHDEIADLDTMIGAIVDELAPDLVARPSIGHTSAAQLLLTAGDNLERLRSEASFAALCGVSPVPASSGKTIRHRLNRGGDRAANSALHIIAIVRLRTDPKTKAYVAKRIAEGHSKLDAIRALKRYIAREVFTLIMRRQKEINQTRITA

SEQ ID NO: 513975 - protein, 336 aa, unidentified
MWNRSAYKKMYLCILDDTGEILLHRNINTLRKSFLNAIDPFREDVVVAAECMFTWYWIADLCASENIPFVLGHALYMKAIHGGKAKNDKIDSRKIAGLLRGGMIPQAYVYPAKMRATRDLLRRRNHLMRKRAELYAHIQNTRSQYNLTEPFGRIAKPQNREGIAERFEQPCVQKNIAVDFEMIEAYDRILNQLERDLVKTATQHDPVSYALLKTVPGIGRILGLVILYEIENINRFPRVQDFVSYCRLVKCAKESNGKKYGSSGSKIGNAHLKWAFSEASVLFLKGNEPAKRYLDRLTNKHGKGKALSILAHKLGRAVYFMLKNKEAFNQNKFLGL

SEQ ID NO: 513976 - protein, 404 aa, unidentified
MTEGPIRYFGLDIHKEYFVAVAVNRDLEVVFGPQRVSNYQLEDWAGRVLAPQDAIALEMTTNTYLFFDTLEPHVQSVMVVHPPNVPEVTNARVKTDKKAAETLAQLLAAGILKGKGVWIPPYEVRDMRTLIAQREKLVRLSTMAKNRLHALEHRNHLVPPENPFSPAQRAWWENLSLSSTEKLLVCSDLDTLEFARKQVERVEECLKQKSAKDERMPLLIQLPGVAMLSAMTILAAIGDITRFPTAKKLVGYAGLGTRVHDSGMTHSSGRITKAGRKDLRRAMVNAANHAVQDHPHWKAEYQRLEPHLGRSKTIVAIARKLLVAVWHVLNKQVADRFADSQNVARSFLNHAYKVRIKNLPRRQSALAFTREQLDRLGLGRDLGQISYGTRHFKLPPSKRLIEKE

SEQ ID NO: 513977 - protein, 338 aa, unidentified
MRWYSGIDLHSNNSVMVVIDDADRIVYRRRLPNELGKILEALEPYRAELGGVVVESTYNWYWLVDGLQAAGHKVHLANTAKMKRYDGLKHGGDETDAFQLAHLLRLGILPRGYIYPKEQRALRDLGRRRMQLVRSRTVQVLAVENVQARETGARMTGWQVKQLDAAMVQGLGLLPEVTLGMQANVAVITTLNVEIARIEKHLALSLRGRADYQLLGTAPGIGHTLTPVILLETGSIERFAAVGDYASYARCVDSVRLSNDRKKGEGNRRNGNKYLAWAFIEAANMARRWCPEARRFHDRKRAKTNAIVATKALAHKLARACYHMLKNGEAFNMQRCFG

SEQ ID NO: 513978 - protein, 367 aa, unidentified
MAKVRSWAGLDVHAAKVVACVVDAESGEMTVHRLPGDTAKVVAFCAALPGATRVAYEAGPTGFGLARALQAAGVECVIAAPGKIERPAQDRVKTDQRDAERLVRLLMINALHPVRVPGLAEEALRDLTRAREDLRGDLMRARNRLGKLLLRYDVRYEGTWDRWTDRHRAWLAKVELPERGAQATFLDYLGAITALEIRRETLEATICELAPQSRWATDIARLRCLRGIDTLTAVGLCAEVGDFARFERPAQLMSYLGLVPSERSTGEARRQGAITKSGSSLARWLLIETAWHYRHPPRVGAKLARRQQGQEPAVIALSWKTQQRLYQLWRGLGHKRGKRRQLVVVAIARHLAGFCWAIVTADTDLIT

SEQ ID NO: 513979 - protein, 268 aa, unidentified
MYYVGLDIHQKFIYGTIIDEKTKIVNQGKFATIEKELFDFLGFLPNKQTKVVLESCGIWQDIYGILESKGYSVVLANPMKVKAIASAKIKTDKVDSEILAKLLKGNLIPETYVPPKDIRELREIVRHRQSYVKMRTSLKNQIHAILKKNNIKIPVKDIFAKKSRVFLEKLHDEKINSYLKMIDHVDVEIKEIKTKAKSIEQFKKQAKLIQTMPGLGDTAAYIILAEIGDIHRFETPSQLCSYAGIVPSISQSGNKCFIGRITKQGSKG

SEQ ID NO: 513980 - protein, 363 aa, unidentified
MNEITTVGVDLAKEVIAVCAADRSGKTVFTRVFRRDAFAAWAVQVPPCVVGLEACGAAHHWARWLASHGHTPRLMAAEFVQPFRKSRAAKNDRNDAEAVLTAVRQPNMRFVAVKSVEQQACLSWHRLRQGFSEERTALINRVRGLLGEFGVWQGRSAALLTRALPALEHDEGLPLMVRRLVGEARQHLARLDEAIAGCEVEIKNHIQGNVAAQRITAITGVGALTAAAMLATVADARDFQNGRQFAAWQGLVPRQDSSGGKARLGRITKRGDSYLRGLLTQGARSALQAALTKEPLLRTRLQNWIVQLHARVGYHKTLVAIANKHARMIWAILAKGEAYDPDAWRRWTRTAPARASAMSGVTP

SEQ ID NO: 513981 - protein, 339 aa, unidentified
MDTDTGELEERRLQHREEAEKFYRDLAAQGVKVRVGMEASGHARWFERLLAELQFELWIGDAAVIHAKRVRKQKTDRQDAQLILRLMLRDDFPQIWVPSWENRDLRQLLWHRHRMVQARTRVMNQLQAVALNEGLRCKKRLWREAGREQLEAFPLAPWASRRRRDLLELLDRLSPTIAELTQTIEEEAEKCPAALRLRTHPGVGSLTALTFVLIIGRAERFQCGKQIASYLGLVPSEESSGDRRRLGHISKQGNALLRFLLVEAAQVTVRSLPEWRSKYFHLAMRRGRKIAKIAMARKLAIRLFWMMRKEWDYEQVEKFSVRTRDNPKIAVVCSKTPSY

SEQ ID NO: 513982 - protein, 352 aa, unidentified
MKNFIGCDAHKKYSMFASINEAGHRAQCIKVNNDRHQFSCFLNTLPPNSQIAIETVGNWYWMIDEMERAGHEPKLTNAGKAKLMMGQINKTDKLDANGLALLLRNGTLPSVWIPPGELRDQRELPRMRMALVHVRTMLKNRIHAALAKYALVITEVSDIFGVSGRKLLKKRLEELPLYTRRSVEAQLKLLDQVKEHIQESEKQIEEIIERTPEIMLLMTLPGVGPILAIVIALEIGQIDRFFCAEKLASYAGTVPRIKASGGKIRYGKTRPDVNRYLKWALIEAANIAVINQSRWSDRHVVRLYRRIRGRRGHGKAVVAVARHLAEASYWVLKKNEPYKEPKGNKPVSSTRK

SEQ ID NO: 513983 - protein, 352 aa, unidentified
MNIIPSITIGLDLGDKKHAICVLNQAGEIIDERTITNHKESLRRLSLKYPGARIAHEVGSHSPWTSRFLKSLGHDVIVANPRKLRVIYMSNRKSDHTDARMIAKLARIDPDLLYPIEHSSEQSQRDLLQVKLRDNLVRQRVDIISSIRFTLKSLGMSLPSPNTACFAKRCRTLLAENCSELLKMIEPSLQVVDLLTKNIRELERSIDELCAKSYPETNRLRQIPGVGPITSLSFVLTIGDPERFENPRDVAAYLGLVPKRDQSGNVDKQLRISKAGDAYLRRLLVSAAQYVLGPFGPDCDLKRHGMELAARGGRSAKKKAVVAIARKLSVILLTLWKRDLDYQPIRRPALAA

SEQ ID NO: 513984 - protein, 388 aa, unidentified
MQDVADQSVAPTTIGADLCAIFISLELSRSTWLVTSLSPGGGEKMSKHSVSAGDIAGLLARFSELRRKACARTGKSFPIIVIQEAGLDGFWIHRVLLSEGIESHVVDAASIATSRRRRRAKTDRIDGETLLRALLAHKRGEPRVCSMVRAPTPEDEDRRRICRERKVLIMERVQHVNRIKGLLFSQGASGYEPLRRDRRARLDALQTGDGRRLPQHLKAQVCRELDRLELLLEQIKAVEAERDALLNAEQTKASAPPPMLLGVHGVGPEFASVLWSEGLSRHFDNRRQVAAYAGLAPTPWQSGSVNREQGISQSGNRRLRTTMIQLAWLWLRHQPGSALTLWFQDRMERNGGRRRKTTIVALARKLLVALWKYVTAGVVIEGAMIRAA

SEQ ID NO: 513985 - protein, 350 aa, unidentified
MLIIGCDFHSRFQQIAMLDPTTGEVVERRLEHENEEARMFYATLPSPARVGMEATCDAPWFERVLREHHHELWIGDAAEIRAAMVRKQKTDSRDALHILDLLLTNRFPRIWVPSLAERDLRQMLRHRHKLVRFRTSVMNQLHALAMGQGLCRRKKLWARAGRKELEGLVLDPWASLRRNELLQLLDQFDPWIAKLDEAVMLAAENCPAAACLMPQAGVGPVTALAFVLTIGPVSRFANSKKLVSYLGLNPSEDSSAGRQRLGAISKQGNPMMRCLLVEAAQTASRLDPELRRDYQRLKFRRGGSVAKVAIARKLAVRLYWKLREAEQPVPSARMQGSPVGPVVGASLSPN

SEQ ID NO: 513986 - protein, 326 aa, unidentified
MTLSHLTDNTFVGIDVGGAGLDVAWHRGDSAHYANRPDAIATLVERLRTGPEVTRIVLEPTGGYEKPLVKALRQAQLPVEVIHTTRFNAYRALVGVKAKSDTSDARLLASYAAAPDEVRGRKSGHVELPEDAIREALSELASRRDQLKYMIHAETCRLGTVRLAELRQAITAHLEALRAEDKQVHRMMLELVRQRPDLRRDQRLLKTIKGIGVKSALGLLASVPELGRIDNKAAAALIGVAPFVRKSGTMSAPARIHGGRAAVRSILYMAAVTASRHNPVLRPFYERLIANGKPPKLALIAVLRRLVVFANAVLRSGQPWRGANAT

SEQ ID NO: 513987 - protein, 326 aa, unidentified
MATIGIDVSKKKLDLCWLRDAQAGKVKTRVFPNAHDHYPALLSWLLKQIDASPGELQVYLEATGIYHEPLAYWLHQAGVTVYVLNPARVRYYARSLGDQGKSDKKDSKRIVHFAQANPELTPWQPEPEEVRTLKQLAKRLETVQKDIQREQNRLEKAQFNRDTQAEHSITHVLALLRREAKRLIKEVDDHIDRHDGLKRDRRLLESIPGIGEVLSVHLLVTLRSRRFKSGRQVAAFMGLVPVEWTSGSSVRHAPRLSKNGDPALRQKLYMGAVVAMRHNPSIRRQYQRLCAAGKRKMSALGAAMRKLVHIAYGVLAHQKEYEPQPT

SEQ ID NO: 513988 - protein, 364 aa, unidentified
MHEAKDIVLVVDYHSKNIEFRWFNEATGEERSGKYATGRAGILRHVGQAPRELGPGGRVVWIMESTTGWARVKDLLGARARFVLANVLQMPLPPKARRRKTDRIDTGRLLREYLQGSLPTSFQPSAWWRQVRRVVDCRQDLVERQTAIKNWIGSLLHHETWEDRAHLWSGKGRRRLAGMKLPAGDGMLVELKLRQLDELVRQQRQVEDRMQQIYDGWPEAQWVDEVRGIGMVTAVSLLSHIGPIERFARAEDLISYAGLAPGMWQSDDTCHHGRIGGGGTDGHLRYLLIEATRWLCQIPRYRPAYERMRQKRGKKIARIVLARMLLRSIHKMLRDRVRFNPMARRAGRAMATPAGQTATAGCSR

SEQ ID NO: 513989 - protein, 364 aa, unidentified
MYDSMTTVTVGLDVHARSIRVAAVRADELLEERTLPYDEEAVELVLRRWPVVRCCYEAGPTGFGLQRFLVERGIDCQVVAPGLVPQRPGDRVKTDSRDARKLARLLAGGLLEPIHVPSRELEAARDLVRAREDARLDRMRDRHRLSKFCLRHGRALPTSSWTVARRKWLSEQRFQFAAQQQTFDSYVHTVDLVDARIQALERAIRETAEEEPWRRLVASLRCLRGIDTLTALALVAEIGDFDRFSSAEEFMAFVGLVPSEHSSGDQRRQGSITKVGNSHVRRLLVESAWHARRRPTVGYQLARRQRGQDAVVVERAWRCQQRLYQRWQRMAGRGKPQQKIVVACARELAGFVWAIATEQPLRST

SEQ ID NO: 513990 - protein, 353 aa, unidentified
MKKLFIGIDFAKEKFDAAIIEACGLKEFGNREYGTFTNDKKGYRQFFKWVKTNAGKSVENEWLFCGEDTGSCSLGLSKWLYGKGLDIWIENAYSIKHSSGIQRVKTDKADSSMIAEYAWRHQDKAVLFEPLSESLSQLREVFLYRHKLVQQHIVMDVRKQDKEAAEPSKAISFIKRKSKHLISEIDKAIKECDQMIDRIIESDAELKENYAIVTSIKGVARQNGACLLIFTNNFRRFDLDARKIACYYGVAPFGKDSGTSIHSPAKTSHFANKLIKSLLGQAAHCAKKFNPEIREYYNRLIGRGKKPQVALNNVKNKLIRIIVALVRKKVYYDPKTYMFYKAKFTDVNQMLNP

SEQ ID NO: 513991 - protein, 389 aa, unidentified
MIFVGIDVASKKHDCFLMQDETGMIYSKPFSIENDEEGYKKLHTAITNFVEQTNDSNVRIGLESTGHYSNNILNYFYKAGYQVALINPLLTNMDRKATSVRKTKTDKVDSQAICMFLQRNKYDFQPYTPSLYHIEALKSLTRQRFQLVKAKSKYKVILNRLITIVFPEYLNLFSELYGVSSLNILLNYPTPKKLSKAKLSSISKHLHSRCAISAFEIQEIAKKSVGQSNDFYAFQIKQTIETILFFDKQIEVYEKEIASIMKEYGQVILSIPGIGEITGAMILSEIGNINKFSSADKLLAFAGLDPSVYQSGQYEANLKISKRGSKYLRWAIHQASFIIWQHDKTFNDYYHKKINEGKVHNVIIGHIEKKLVRVIYSLLKNNKSFVPQK

SEQ ID NO: 513992 - protein, 355 aa, unidentified
MNDAKYIGMDVHTAAISAAVRDSSGNLVMEATLETKAETILEFVHGLRGSLHGSFEEGTCAAWLHDLLKPHVTAVLVCDSRKNALLRVGNKNDREDARKLSELLFLNKLHSVYHGETGIRTLKELARSYLTITRDLTRVMNRLKAIYRGWGIACAGQQVYAPRYRTEWLAKITEASVRRRAEIYYQRFDTLAALRQEVRPELLAESRKHPAMRLLRQIPSIGPIRAALLIALMQTPHRFRTKRQLWAYCGLALRTYDSGEYRFVGGQLKRSKKAVTIRGLNKNHNHDLKNIFKGAATRAAATAGPLQNFYEARIANGMKPPMARLTLARKIAAITLLVWKKGVRFDAEHLKQQAA

SEQ ID NO: 513993 - protein, 394 aa, unidentified
MRFAGIDIASETHVVAVLDEASKPLVGPTSFKEDQTGYARLREVLGSPQDLLVAMEATGHYWRNLFAFLAGEGFTLALLNPLRTHRFAGEDLERTKTDAIDALGIARFAAQKRPAPTRLPDSTTVELRELVRLRSRLQQDLDDRLRQLHRVVDLGFPEFTRHVRTLDSELATAILHDYPTAAAFQGVSLRRLAALRYDGRHKVGDELARTLIEAARSSVGRHHGPAYRVQVRYFCEDIDVLRRRMWELDRDIERTLREHEVGTLLTTIEGVGPQTAARIIGTVGDPAEFRSAAALASYVGIAPGKRDSGKRQARHAPLSPIGNAALRRALWMPTLTAVRKNPWLRAYYERLRAEGKPAKVALVAAMRKLLVAVYAVARDRKPFVPKLSEVTASV

SEQ ID NO: 513994 - protein, 309 aa, unidentified
MNNVVVYIGVDVAKASLDVAWAEHSRRFANNKSGLGALTKWVKQSPLAVHLICEASGGYERGLLDAAQHNGIKVSLVQANRVRQYARAAGILAKTDKVDARVLCAFGSTMQPEPRAPLSAQQKQLRELETQRRHYSRMLVAEQNRLAQLNDKELQRLTRSLLATLKRQMAAIDARIAGLIAQDQSLKEKAQKLTAIAGVGPRTAVLLLAQIPELGTLNRAQAAALAGLAPFNRDSGTLRGKRTIFGGRRALRCGLYMAALVAARHNLILRNFYQRLRSNGKPHKVALTAVMRKLLLALNHTLKPAASFA

SEQ ID NO: 513995 - protein, 346 aa, unidentified
MMIIGCDFHPSWQQVNWLDTETGETGEQKLVHASGDAKQFYQRLAAPVLIGMEATGNSQWFVELVEDLGHEIWIGDAAQIRASYVRKQKTDKRDAAHIRKLVVEGRFPRLWSPDREQRDLRQLVLHRHKLVEIRSRVKNELQHLSMNKGMQRKGKLWSQAGQKLLRELPLKPWAACRREDLLGLLAMLNQQVGQLDAAVQHAAEQNPQARLLMTQPGVGPNTALAYVLTIGDVSRFPRGKQVASYLGLIPREHSSGGKQKLGVITKQGNRMLRSLLVEAAQIAVRFDPGMKKQYLHRCHQKPKGVAKVATARKLAVRLYWMLRTNVAYPEIVRIESSPRVPLVGAS

SEQ ID NO: 513996 - protein, 371 aa, unidentified
MSELLAETRPARLRVEASPRPPGARKPETELGAVSTTAVPHPDSRSGPSPHLQGRVMDEQRTVFVGIDVSKDRLDVHLRPSGEAFCVPREGKGMDDLVIRLQGLSVALVVLEATGGFEATVAAALAGVGLPLCVVNPRQIRDFARAMGRLAKTDTLDAEVIALFAERVRPQARPLREPERVHLAELVGRRRQIIEMIGMETNRGRQAIDKPLARRLARHVAYLQKELDAIDHDIGDAIKHSPAWREAEALLKSVPCIGDVTARTLLAELPELGTVSRHQVAALVGVAPINRDSGLMRGRRAIAGGRTSVRAVLYMAALTAIRRRSPFRGFYDQLTAHGRPKKVALVAMMRKLLTILNAILRDHTPWRPLNA

SEQ ID NO: 513997 - protein, 332 aa, unidentified
MYYIGIDLHKQDLVMAVEDERGPVGRARRIACRDVQAIRSAVERWRPFRAVVEASASYRWLYDLLSPQGEVVLAHPLRLRAITAARAKTDRLDAAMLARLLRANLIPAAYVPPARYQTLRDLTRLRARLSYGATLAKNQVHALLARANVHPPLKTPFGKRGRRWLAGLDLGLSGNLARDELLRRLEHYGREIAALDAHLEGVAAEFPEAAALEVLHGVGRYSALLVVAEIGEPERFRNPRQVGAYAGLTARVHQSGGHEHRGGISKQGSRWLRWILVQAAMKLVRRDERLANFYQRVRKRAGRNVARVAVARKLAGLCWVRLRAWRRARAAA

SEQ ID NO: 513998 - protein, 391 aa, unidentified
MSMYFIGIDISKYKHDCCIISAANQKVVSKVIIKNNKAGFNELLTIIHSLANPADIRIGFESTAHYALNLELFLENSILTFMEVNPVLISEYKKSKTLRRTKTDSVDCESIARWLMTVEYKPHSKGFYHAYSLKSLTRLRDKLIRQRSFYLVKITNVLDHTFPEFKPFFNERLSKTALYLLENYGSAEKMARMNSASYEKLRSVSRGKFSPQQFLRLKELAVNTVGVNNSIFDVELNSLLSLYKSLVKEIDTIKKEINQLIEEVHPHYMSVPGIGPLSAAVIYSEYGDISNFTNPGQMLAFAGIEPGINESGTESHGGKMVKRGSSQLRYTLINCCLPLIRFDMTFATYYAKKRGEGKPHRVAITHVAKKLIRVIYALESQDIDFNAQELR

SEQ ID NO: 513999 - protein, 336 aa, unidentified
MEHLAIDLGGRESQICVRSSDGQIIDERRCRTAALPAYLATRPRSRVVVETCSEAFGIADAAMAAGHEVRVVPSTLARSLGVGARRLKSDRRDARALSEVSCRIDLPSVHIPSREARDHKTMCGMREALVGTRTKLVNTVRGWLRAEGRRPRSGELTTFAARVRELYAEMMLPAHVARQLRVLESLNEEIAGADRELATTAKADPIAARLMTVPGVGPSTSVRFVAALDDISRFGGAHAVESYLGLVPGEDSSAERKRRTTITKAGPSALRWCLVQAAWAARRTRRKDPMHRWVDEVEKRRGKRVAVLALARKLAGILFAIWRDGTVYDPHRSGAV

SEQ ID NO: 514000 - protein, 369 aa, unidentified
MGEYSEAFVAFDVSKMKHAVAIADGGRGGEVRFLGDISSSPGTVERLIRKLAGRYGKLHFCYEAGPTGYGLYRQIRALGHACLVIAPALIPKRPGERVKTNRRDAVTLARLHRAGELTGVWVPDAVHEAVRDLVRAREAAADDLRRKRQQLLSFLLRHGRIYSAGGHWTLAHRRWLAKQAFEHAAQQIVFQEAIDTIADAAQHLRRLEQQLALIVPSWSMAPVVEAYQAMRGASFLVAVIFAAEIGDVRRFETPRQLMSFLGLVPAESSTGDTVRRKGLTLAGNRRARRALVEAAWTYRYPARVSETLRVRLDGLPKAVRDIAWKAQVRLCARYRRLSATGKKLPVVVAAIAREMAAFLWAIGREVAPV

SEQ ID NO: 514001 - protein, 309 aa, unidentified
MEEILFTPYIGVGCGIDVHKDLIVATIQRGNEVVGTKEFDGFTVSLESLRDWCKDAGVTHIAMESTGIYWKPVFNILEDDFEVILVNARHVKNVPGHKTDKKDSKWLSKLLVSGLLKGSFIPPRDIRDLRDLVRYKKKLVAHGASEKNRIIKILEDCNIKLSSVLSDVDGAVGRNIISALIDGESDVNQLMRFYHGKIKTPRSEFVKALQGKVSDHHRFMLQFHRDVIANDDAMLERLDAEIAKAVSDYEVELELLETIPGVGRDSAIGIISEIGVDMERFPDENHLSSYCGVSPGNNESAGKKKVQRP

SEQ ID NO: 514002 - protein, 357 aa, unidentified
MTDVRIAYGTNRVVVGVDTHADVHVAAALDALGRMLGRLEVGTSTHGYAQLLKWAHAFSPTTTFGVEGTGAYGAGLARFLIDAGCEVIEINRPDRRARRGHGKSDPIDAEAAARSVLAGGPLCIAKRDHDRVGMIRTLRVARRSALKMRTQVGNQMHALVVTAPDSLRHQLRNLPLDKLVAVTAAARPGTVATPIAASKLALRSLAIRHLGLTAELVVLDRELGRLTMEAAPALCDLAGVGPDVAGALLVAAGDNPERLRSDAAFASLCGVSPVPASSGKTNRHRLNRGGDRIANNALWRVVMVRLTCDQRTKTYVARRTAEGMAKRDIIRCLKRYVAREVFHALLATAPALTRISA

SEQ ID NO: 514003 - protein, 343 aa, unidentified
MQVVRIGLDLAKYVFEVHGVDSLGKVAVRKTLRRDAVARFFANLPRCLVGMEASNGAHYWARVLSDLGHEVRLISPQFVTPYVKSNKNDRNDAEAICEAVGRPSMRFVPPKSTDQLAVQAVHRIRRRLVADRVRLVNQIRGLLSEHGIVIARDISQLRRSLAVIVGNGDDGLRGMVRSLMRELQAEMAEIDDRIATYDRRIREIFRASEQCQRLGKIEGIGPVTATALIAAVGDRTCFKNGRQFAAWLGLVPKQRSSGGRARLFGISKRGDRYLRTLMIHGARAALGKVAGKQDPRSLWLSKLRQRRHPNVAAVALANKNARIVWAMLSGGTFYEHAPSVKPA

SEQ ID NO: 514004 - protein, 383 aa, unidentified
MKAVCGLDVHKDSIFLCILHSDGELFEQVFGVLTFQLEEMRKLLQKHHVFEVCMESTSIYWIPIWRVLSPHFTLRLVNPYFIKQLPGHKSDVKDAQWIAECTLKELVRGSFVPPEIIQQLRQYDRRIFDLNAEIVRKVSKVDGVLQRCNIRLSNYVSNIECKSYRDVVRRLSEGVTNPNELMKLVHGRIVNRHGAETVLASLTGVVSQAEIDVLRQLHEEIDIAESHRNECQQRMLEICEKHFPEELERLQKIPGIKERAATSLIAEIGTDMSKFETANHLASWSGLRPRNDESNKKIKSRKITHGNVYLRNTIIQCAWAASRQKDCFFSRFSYHQTVVRRKNKMKVIVAVARKLLVAVWHVLHDKTDYVDFKPDREESANNG

SEQ ID NO: 514005 - protein, 348 aa, unidentified
MLADELDFVIGVDTHRDEHALALVACPSGARVQERLIGADERGYAAALAFAVERAAGRRAWAIEGTGSYGKGLARYLTQRDERVHEVERPKRQGGRARAKSDRLDALRAARSLIAAEKPALPRAAGLHESLRVLLQVRTSAVAARRVALNQLRALLVTCPEPLRAELRSLTRARLLRRCRELEPERTDDPELRSTLQALRLLAARVESLTAETRELEQELRAEAEQIAPALLAERGIGPIGAAQALVSWSHKGRFRSEAAFARLAGAPPIPASSGKTVRHRLDRGGDRKLNNVLHQIVITRRKHDPRTIAYIERRRREGKSEREAIRSLKRYLARHLFRLLETTATPT

SEQ ID NO: 514006 - protein, 364 aa, unidentified
MKRKLYVGMDVHKETIRIAYLTSNSKEILKEQQIKHEEVQIKKFINRLKLEWDEIDCCYEAGVTGYPLYRYLKSLGVNCILVAPGKIPRQSSDKIKTDKRDAIKLARLMRSGELESIHVPSEEDEAVRDYLRSRDSLRLDLGRNRQRLMKFLLRKDIKYSTTKYWTVSHYKWLNNLHFNNEILQETFNDYYSRVRVQEENLKAMDKKIQEVAESEPYREKVGILRCFRGVDYLTAMCLLCEVNDFKRFKTAGSFMSFLGLVPGEYSSGSKRKQTGITKTGSPRLRRILTEAAWQHRFPGTGSKIVTARRSGQPALVVALAEKASLRLHKKFRNLQLRGKTPQVMITAVSRELSGFLWTAMDLVA

SEQ ID NO: 514007 - protein, 340 aa, unidentified
MKIYIGIDLHSSNSYLAVINEFGDRLYNKRISNNPEKIVRAMSFISKLGEIEDVVIESTYNWFWLVETLVNNHYPVTLANPAQIKQYSGMKITTDKTDAFFLAELTRLKILPKCWICPPGDRATRELLRLRLYLVQKKSSMKTSLAQLFSRYTGQRIRGTTIVNMGKDGRKELITYEDALFRAEELVTQIKSLEASIERTEKQALSKLKLKPEFELLTTVPGIGKVLALTIMVETGDISRFAKSGNYTSYCRCVTSCRFSNGKKKGTNNKKNGNKYLSWAYAEAAINTCRYSDGAKAYFDRKVSRTNKMVAYRSLAAKLTKACYNMIKNREVYREEKTFY

SEQ ID NO: 514008 - protein, 339 aa, unidentified
MSEEYAGKQIVGIDLHRRRSVLVRMTEDGQKLETIRISNDPEYLRAVMARAGEAPEVVLEACYGWYWAADTVAELGASVHLAHPLGVKGFTYRRVKNDERDAADLADLLRMGRLPEAWIAPPACRELRELVRHRAKLVGLRTNLKCQVNAVLAGAGVQGLPSDLFGVGGRELLERVVLPAAMRAKVNSALRLIDAIDFEIDTFTHLVATRLHADPGWVAVQTIPGVGPILGAVFVAEIGDITRFRRAEQLTSWAGLTPKHHESDTKVRRGRITKQGSKLVRWAAIEAVQRIGPHTRLGAYRDAVAERRGRNQAKVAAARELVECVFYGLRDHHIRRLAA

SEQ ID NO: 514009 - protein, 386 aa, unidentified
MTHSTNILPRSVDYDQTLVLAIELSNKSWVLAAQVPGLSQTKAKRTIDPDKNGLLAAIDGYRTRAAAAGRSVKRVITSYEAGWCGFWLARWLMAHGIEVHVVQPSSVPVDRRMRRGKSDGIDAELLLRTLLAWLRGEPRVCSMVPIPDEADEDARRCVRERSELVSERVGLVNRIGAILATLGADDYNPLLQSRRRRLTELRTGLGDPIPPNALAKIMRLLTRLELVLAQIVELELERDAVARTDAPDQASKMIQQLITLRGIGVQSATVLVREAFVRRFANGKALGSYAGLTSTPYSSGGIDREQGIGKAGNRRLRTVMVELAWLWQRYQPGTAQVTWFRERVGSTGRRVRKVMLVALARKLLIALWRFVIDGVMPEGAVTKPSI

SEQ ID NO: 514010 - protein, 340 aa, unidentified
MTITTVGIDLAKNVFAVHCIDQNGKAVLVKPKVSRAALSELIAGLPPCVIGMEACSGAHYWARLFRQYGHDVRLMAPKFVSPYRMAGKTGKNDAADAIAICEAVQRPHMRFVPVKDESQQAMQCLHRTRQGFIQERTATYNRLRGLVSEFGVIAPQSTDALRHVVSDQKETLPVQVRLCIDDLLTHVTNIEEKIAEYDRVLSRVAKTDHRSQQLMELKGIGPTTASALVASIGNAHDFKNGRQLAAWLGLTPSQYSSGGKSKLGRITKAGDAYLRTLLVQGARSVMVGAENRTDPFSRWVCSLIGRRGYWRAVVAIAAKNARLCWASLHYGDDFRLYSTT

SEQ ID NO: 514011 - protein, 344 aa, unidentified
MDHFAGLDVSVKETSVCIVDDTGKIVREVKVASEPEALLAILKNPAYHFKRIGLEAGPLSQWLFNALAEAGLPVICVETRHMQAVLKAQINKTDRNDARGIAQMMRVGIYRPVHVKTLRSQKLRMLLTHRKLLQSKAIAIENDLRGTLRNFGLKVGIVGKVRFEARIKELVENLPDLAMLVEPLLVVRRVLREQTVILHQRLLAIVREDEVCCRLMTIPGVGPVVALTYRATVDVPARFRKSKAVGAVFGLTCSKYQSGEIDRNGRISRCGDEMMRVMLYEAAQSMLHSKKWSWLKAWAMQIARRRGMKKAVVARARPLAVIMHRMWVDGTEFRWTREQAAAAA

SEQ ID NO: 514012 - protein, 317 aa, unidentified
MNDHTPNTVGVDISKTHLDAHRLPNGEAARFTNNATGIEALARWAGASVGRVVYESTGPYHRALEEALVDRLPLARVNAARARRFAQALGQSAKTDAVDAAVLAKMGEALKPRLVKARSQAQRGLDELHTARNALVRDRTAALNRQKHARHPLIRQQLNNRRAQAERQIRAIDAEMALLIAKDAQLVRRTEVLASVPGIGLVTARGLLAEMPELGTVEGKAVASLAGLAPVTRESGAWRGRSFIHGGRAGARRLLYMASVTAIRHNPDLARKYQELRARGKPPKVALTAVMRKLLLLANALLGKDRLWTPSPAGAVG

SEQ ID NO: 514013 - protein, 405 aa, unidentified
MPAEPPDGSSGEWAQTQRLLELGSNAWKLELMHVAVGQPTQEAYRTPMNSVGLDVHKTRCVACVKTQEGRILEEFAFQNSPDGHEELITHLKAYPETQVAIESTGNLWIPIYNRLEDEQIHTILTNPKKTRLIAEAKIKTDKLDARILADLLRANLLSASYVPPPEIRMQRSIIRERARLTQLRTIIKNRIHTLLDKHAYKSPYTDLFGKHGLEWLAKLELPAGDRILLEVNLEQVASLNHSIDKLTESIAASAIDNPEVKLLMGFTGIDYYSAMLLINEIGPVTRFSSPKKLVSYAGLAPSTRQSGNHTTHGPITKEGNSHIRWILVEAAHQAARHDPRLSQFYLRIMKRRGHNRALVAVARKMLVTIYHVLNHHSQYRGLRPELFENKIRRLERITESSLQTA

SEQ ID NO: 514014 - protein, 318 aa, unidentified
MTKKQAKTFIGIDVSKQLLEVAAHEHDYEFRCANKTSAFAALLAELIALRPALIVLEATGGLERAVVAALHGAGLPVVVVNPRQVRDFARALGQLAKTDRLDARVLAAFAAAIKPPLRPLKTNDELELDALSGRREQLVGILADEKNRRASAASDSVRDEIQQHIDWLTDRIAALDQQLKKLLQGSACWQAKAQILQSTPGIGPVVSCSLLAQLPELGTLNRQQISKLVGVAPLNRDSGQQRGSRHIFGGRANVRKMLYMAALTASRCNPVIKTFYERLRARQKPFKVAITACMRKLLTIINFMVRNDSLWKSAVIST

SEQ ID NO: 514015 - protein, 353 aa, unidentified
MLAELVDAVVGVDTHRDTHQVEIALPSGAPIAVTTISNDTSGYAELLAWIVDHAPGPRLAVSIEGTRSYGVGLARAAAEAGLVVLECEQPHRKARRGKGKSDPIDAHLAVLAALRLDADRLPTPRADGDREALRILLSARQELTTASTAQTNRLRALLLGGDDTDRELARGALTETRLASLARRRPPREAIREQAVRHAEIRRLALALREAARALKANRAQLQTIVNDLVPGLIERRGIGPVSAAQAIVSFSHPGRCRNDAAFAALGGASPLPASSGRTVRHRLNRGGDRALNRALHTIATTRMRSCPTTQAYVARRTAGGKNPREIRRCLKRYIARQLYRTLATAMTPAETS

SEQ ID NO: 514016 - protein, 343 aa, unidentified
MQTVTTIGLDIAKSVFQVHGVDAAGQVVIRRQLKRRYVLAFFQKLSPCLVGIEACASSHYWSRELQALGHSVRLMPPAYVKPYVKRQKNDMADAEAICEAVTRANMRFVPTKTPEQQSGLMLHRTRHLFIRQQTAVINAIRAHLAEFGVIAPVGRKGVEELLRVVADPNDKRVPEVVRGCLAVLGSQLLSLKKQILDFDRMIMAWHRSNQTSKRLNCIPGVGPLLATALVASVADPKTFRSGRNFSAWIGLVPKQHSSGGRDRLGSISKQGDRYLRSLFVTGALAVIRYAKIRGAKHRPWVAALLARRPTKVAAIALANKLARIAWALMAKGERYKIPAALTA

SEQ ID NO: 514017 - protein, 407 aa, unidentified
MLEVKVERCAGIDVGKKFIDVCVLIGPVNRKPAEEVRRFGTHVGDLEALRAWLKEKACTEVIMESTGSYWKPVFNILEGQFKLILANPEQVKALRGKKTDRKDCRWLAGLLRHGLVQPSFIPPRDIRELRDLTRRRRTLLQNGTQERNRIQKVLEDANVKIGNVLSDVFGMSGQAMLEALLENKLSPEQVADLARGSLRRKIPQIVEALEGHRMSEHHRLLIRQAFKHMQFIEEMIEELDKQIQEKLAPYQKQVELACTIPGIGSDAAASILAEIGMDMSDNGPFASCHHLASWAGVCPGNNSSAGKRKSGKIRKGNRWLKATMTQTAWAGAAKKNSAFQFRYQRLKARRGVKRATIAVAHAQLITLYWVLRNGAPYQQQRQDLERQQRESLIRHYLHRLAQLGHTS

SEQ ID NO: 514018 - protein, 425 aa, unidentified
MNKKRIYRATPVKQVRLEPLVKAAGEGRVIVGIDIAKEDMFAAFEVDGIVVLTVRWRHPEQTLGFAELLTVLKARGPVEVAMEPSGTYGDALRALLEQYQLPVFRVSPKRSHDAAEMFDGVPSYHDAKSAALLCKLHRDGISERWSARSDHERRLSATVRLLGNYEEEFRRNSNRLESLLARYWPELTQHLKLRLATLAELLATFGGPAAVAAHAADAEALMRRVGGPYLARTKIEAVLASARQTLGVPQLEEERDLVMRVATEARRSQKLAKDVKRRLEELSQSHGATKYLCPVVGKTTAAVVVASLGDPRNYSSAAAFLKATGLNLKEKSSGKQKGGLHITKRGPGVVRLFLYLAALRLVQRHPVVNAWYQKKVQRQGGLAKPKAVIPIMRKLVLAAWFVARGDTFDVNKLFDVSRLKISPAH

SEQ ID NO: 514019 - protein, 263 aa, unidentified
MLIIGCDFHTRSQHIAMLDTETGEVVERRLEHENGEARRFYESLKEPALVGMESTGYSLWFAEMLAELGHQLVVGEAAKIRAMEPRKQKYDRRDAEHLLNLLVRGDFPRIWLPSVEDRDVRVLLEHRHQLVQLRTRVKNGLQAVALNYRLARRAKLWTARGMTELQALPLREGMARRRSDLLPLLAQLDHWIEELDQRLEREAEQRAAARLLMTHPGVGPLTALGTVLILGPVERFPDGRHVTSYVGLIPSEESSGGRQRFGR

SEQ ID NO: 514020 - protein, 401 aa, unidentified
MSELEKGLVFAGVDTHTLCLLDHTGRAIGTFRFAADAKGYDALAGKIGGPATCVGVGIEGTGSYGAGLTRRLLELGYCVYEVMVPGRARRKPGRPKSDPADAEVAARQVLARVNLSKPKDQSGWTEELRQLMIARDRLVQATSAMINAAKSLIVTAPEDLRRSLEGLSRKNLRSALSTLDPDAGGIILALGSLGKAWDLQDREADAIEERMKRVLEANAPALLTIYGCGTVSAAALAVAGGGNPERLKSEAEFASLCGVAPLLASSGKTERHRLNRGGDRRANRALYQIAVTRMSYDQRTKDYVGKRKRDGKSKKEAIRCLKRYIAREVFRALRNPLETKGPSWKDLRPARQALGITLVEAGKALNVGFQRVSYAETGRLMNVRFLEEYDAWLKSQAKRES

SEQ ID NO: 514021 - protein, 345 aa, unidentified
MLYVGVDFHKNYSFITEMDKDGEVKDQQKIDNDRTILKGYLSKLPSDTKIAIEATCNWYYFYELAEEYDFDISLAHPLKTKAIASARLMNDKISSTTLAHLLRANLLPRAYIPDQETRDIREVLRTHAFLISMRTRIKNRIHAILLKNGVKCPYSDILGKKSLKWLNTLNFRVCYQEAIKSYIRLAEAFNGEIKLLKQTIESLAVDNKYARLLDTHPGISYYSGLLIASEIGDVNRFSNHGKLCSYAGLVPTMHASGGKIRRGHITKQGSKWLRWILVECSTHAVKKSSRYYSLYHRVAYKHGKGTARIAVARSMLRVMYYMLKYNTPYEERSGSKRTPASALGS

SEQ ID NO: 514022 - protein, 356 aa, unidentified
MQLQDALTIPKIFIGLDIHKKSWSVSIQTDLFFHRTFSMPSVAEDLYQYVERTFPNHEVALVYEAGCCGFSAARYFLKLGWHVLVVNPSDVKTGDKERYQKTDALDSKNLSNQLKAGVLKGVYIPTEEHEQFTTLARHRTQVTKKLRQSKSHIKSMLLFHGIEIPPAFDNSNWNKDFMVWLENIEFSTSCGKLALQGKIRMYNFIRSEYLEIANQMRAHCRKTCKNDYNLLRSIPGIGGYLSSVILAECGDLRRFNNEGQFISYIGLVPGIYNSGGSEKCLGITPRSRSQLRSYLVEAAWIAIRKDAEMQQYYRKHQGKNVKSVIIKIAHKLARRILSVIKTETPYQINRNLVLEK

SEQ ID NO: 514023 - protein, 365 aa, unidentified
MAKARTLVGLDVHATKIVAAVLDAETGELQYFTLGGDVVQAAGLCAGLARPVRAAYEAGTTGYGLARELAGRGVGCVVAAPSKIPRASGERVKTDRRDAELLVRLLLAGKLHAVRVPGAAEEALRDLVRAREAVRVDLMRCRHRLSKLLLRHGVRFEDGPAWTQRHRDWLATVKLGWPAAQATMLDAQGAIDALVHRRDQLEREITALLPTSPWQVQAGRLRCLRGIDTLTAVGLCAAIGDFERFARAEQLMSYVGLVPCESTTGQQRCLGAITKTGSGHARRLLVEAAWHYRKRPAIGRTLHDRQDGQPAEAVAISWSAQQRLHRTWTRLEARAKRRTIIAVAAARELTGFCWAITQIEEPPQA

SEQ ID NO: 514024 - protein, 381 aa, unidentified
MTTTVTHHEQRNTTEATLFVAFELREKTWKLGFTTGHGQKPRERTVAARQHEHVLHEIAQAKRRFGLPETAPVVSCYEAGREGFWLHRFLQAQGITNHVVDSSAIEVNRRRRRAKSDGLDVRKLLSMLLRYTQGERQVWQVVKVPSVEAEDHRHLHRDLATLKQERASTTTRIKGLLSRQGLRVTSLTKLPEQLEALRLWDGAPVPPGLRCRVLRVYAHHTFLSAQIAAVEAERRAQLHASTDAKIDKVRQLMLLKGIGINGAWLLVMAFFGWRAFKNRREVGGLAGFTPTPYQSGESAREQGITKSGNRHVRWMTTELAWSWLRLQPESALSVWFRERFGSGGKRLRRIGIVAVARKLLMALWRFLETGVVPEGAGLKEG

SEQ ID NO: 514025 - protein, 418 aa, unidentified
MTKKLDTTFIQVVHPVCCGLDVHKKKISACLITIDEHGQEQYDIKEFGTFTNDLLEMKKWLTDNGCLVIAMESTGVYWRPIHNVLEGSMEVILVNARHIKNVPGRKTDISDSKWLAGLLRHGLLRGSFIPPKEIRQWRELTRLRRTYTESLADYKRRIHKLFETANIKIDSVVSDLFGVTGRNLISLLCDESELSLASIRKNAKGGLKAKSRELHRSIQGFFEEHHRFQLIGMMEIISNFEKKITEITERLDNLTSGHQDLLDRLDEIPGIDKKSAQSIVSEIGVTLDEFICMAALASWAGLCPGNNESAGKRKGGRTSVRSHPFKTILVEVAWAAIKKKGSYYRAKYFKLKARRGPKKAIVAIAHRISKAVYNIIKNGDTYKDLGEDYLTSQTRQRTIKNIKQRAKQLGYELVPCMD

SEQ ID NO: 514026 - protein, 337 aa, unidentified
MAIIRVGIDTSKHVFQVHGVDESEQPVLRRAVRRSDLLKVFGKLAPTRIGLEACGASHHWARELTRLGHEVMLLPPQYVKPSVKRGKHDAADAGAICEAMSRPGMRFVAVKSAEQQAMLMLLKVRDLLVKQRTMLINAMRGHAAEFGVIAAKGRGKMAEVLQRAQAPEAGLPALAVALLEVLASRCAALDAEIAALEHKLLAWHRQDAVSQGLATQPGIGPIAAVSFALKVSDPKGFRSGRHFAAWLGATPKENSTGGRRRPGKISREGDEGLRKLLVLGATAVIRAARPGRASPWLLHLLARKPKKLAAVALANKMARTLWAMMVSGEVYRSPMTV

SEQ ID NO: 514027 - protein, 427 aa, unidentified
MKVIYPKACGVDVHKSFIVAVICDSTGQTTKYSKKRFSTFNNSLIEFRNWLIENDCQNVCMESTGKYYIPVYNALEGFISNVVVANPKWVAVIKGEKDDNKDAKWIADLFKLGIVRSSFIPSKDFRILREFTRYIYKLTCNRTSEKNRYTNALTVGNCKLDMVFSDIFGKSSQSIIDIIMNNNSFSDEDIIDCLRKNCKSSHEDILSSVNGITFTNEQKLRINFIKDHIDYLTNQINSLRDIVDNLVTSYEDYITLLMTIPGIDRYSAITILSEIGNDMSQFSNHYRLSAWAGLAPGCNESAGKKKSVKISRAGVYLKPCLVEVAHCAVKDKTNTYYANKFNKISKRRGKKRAYIAIARKILVAIYHMLFTGEVWNPRDLASSETPDKDRIKFTKNNFNQSLKQLLSLGLTSDELINLINQNAKLDS

SEQ ID NO: 514028 - protein, 343 aa, unidentified
MDHFAGLDVSVKDTSICIVDDTGRITREVKVASEPGALLTVLMNASHRFKRIGLEAGPLSQWLFSALAEAGLPVICVETRHMRAVLKAQINKTDRNDARGIAQMMRVGLYRPVHVKTLRSQKLRMLLTHRKLLQSKAIAVENDLRATLRNFGLKVGMVGTARFEARIKELVENVADLVVLVEPLLVVRRTLREQIGILHRRLLAIVRDDEVCRRLMTVPGVGPVVALTYRATVDVPARFRKSKSVGAVFGLTCSRDQSGERDRPGAISRCGDEMMRAMLYEAAQAMLLRSMRWSWLKAWAMQIARRRGMKRAIVALARRLAVIMHRIWADGTEFRWTREAAVA

SEQ ID NO: 514029 - protein, 347 aa, unidentified
MRFYTQQHRYYCGVDLHARSLYVCILDQAGDVQVHRNLSATPEAFLQVIAPYRQDLAVAAECMFAWYWLADLCEREGMPFVLGHALYMKAIHGGKAKHDRIDAHKIAALLRGGLIPMAYVYPARMRATRDLLRRRMHLMRKRAELLTHIQNTTSQYNLPALEKNLAYHANRVAVPEHFAHPVVRKSIEVDLALIEHYDRLLKELELYLLRTARQHDPNTLYRLRTVPGIGKILSLVILYEIHDIHRFPRVQDFASYARLVTCAHLSAGKRTGTSGKKIGNAHLKWAFSEAAVLFLRQNPPAQAWLKHTAAKHGKPKALSILAHKLGRAAYYILLRNEAFDMDRFLAA

SEQ ID NO: 514030 - protein, 345 aa, unidentified
MKKIIIGIDFSKETFDATLFDCRNSELSEALQSAVHEKFTNKKEGFQAFLTWIKSFVKKINSAELLLCGEKTGKYSLALSNFLYAKGYSIWLDSGLRIKRSLGISRGKSDKADSLKIALYAYRYQDMAVCYVPLSKNVSRLKELFLYRQHLVSQMKAMAVRKNVTDDFKKELGDVKFIVDSATKIIQQIKATIKKCEEKMQELIEEDEELKTTHDSITSVKGISLINATAFIAYTNNFKDFGGNAKKIATYWGVAAFAQESGTSVHKVARVSKIASKMLKSLLTQAARIAVRWEPKFRQYFEHLISRGKHQGVALNNVKNKLIHVITALAVSKEKYNPEYECINR

SEQ ID NO: 514031 - protein, 347 aa, unidentified
MRFYTGRHRYYCGIDLHARTMYLCILDHESGEKLLHRNLRCDPDLFLQAVEPYRDDLVVATECIFCWYWLADLCAREGIDFVLGHALYMKAIHGGKAKNDRVDSHKIAVLLRAGALPKAYVYPPGMRATRDLLRRRLFFVRKRGELFAHVRTTHHQYNLPTPSGQLLYLCNRAKVPEAFDDPIVRTSVEADLALAGHYDGLIRSLERTILAQAKVEDPATLDRLQTIPGVGPILALTLLYELHDIARFKRVQRFLSYSRLVKSQKRSAGKVLGTSGAKIGNAHLKWAFSEAAVLFLRKNPRGQKHLDRLRSKHGKGKALSILAARLGRASYYMLRRRTDFDMDRFMN

SEQ ID NO: 514032 - protein, 334 aa, unidentified
MENIALIGIDLGKNSFHIHCQDRRGKAVYRKKFTRPKLIEFLATCPATTIAMEACGGSHFMARKLEELGHSPKLISPQFVRPFVKSNKNDFVDAEAICEAASRPSMRFVQPRTESQQAMRALHRVRESLVQDKVKTTNQMHAFLLEFGISVPRGAAVISRLSTILEDNSLPLYLSQLLLKLQQHYHYLVEQIKDLESQLKRKLDEDEVGQRLLSIPCVGTLTASTISTEIGDGKQYASSRDFAAATGLVPRQYSTGGRTTLLGISKRGNKKIRTLLVQCAGVFIQKLEHQSGKLADWVRDLLCRKSNFVVTCALANKLARIAWALTARQQTYVA

SEQ ID NO: 514033 - protein, 426 aa, unidentified
MKYTQNERIMQITEKTLIIGIDVGSEKHYARAFNFRGVEYGKLLIYHNDEEGFAMLEDWIRKLAEQNGFKDVTVGMEPTGHYWFNLGEYIKGKGMRIVLVNPHHVKKSKELDDNNPSKTDRKDPKTIAMLVKDGRYMEPYIPEGIYKELRILMDSRWRIMKELFAIRNRISRWISIYYPEFTKVFVDWEGKAAMLILKECPTPAKIIEKGVEGIIAIWKEHKIRAVGRKRAVMLLETASRSIGTKEGMISAENELQMLLEDYESKVRQNDRTMVLIESLAKEIPGFEKILEIKGVGLVTAAGFIAEIGDVSRFSHPKQIQKLAGLSLKENSSGKHKGKTTICKRGRKRLRYYLTFGIMPLLSKNEEFKALHAYYTSRKENPLKKMQSLVALSNKLIRIFYVILTKNVTYDPQKMIRDIRRPEAKAA

SEQ ID NO: 514034 - protein, 371 aa, unidentified
MKRTIFVGLDVHKQWINVAVLLPGQDTPIEWRIVNEPQAIRRMLKRVAELSPGDVRYCYEAGPCGYALQRQIISWSDASCMLVAPSLIPRKPGERIKTDRRDASKLAHLFRAGLLTEVHPLTEEDEAARDLSRARDDLREDLTRARHRLSKFLLRRAITFTGKKAWTNAHRRWLESLRFDNPADSAVVADYLLAIEHIEQRLKSLLVHVERLGHDPRYAKAVATLRCFRSIDTLSAVGYAVELHNFERFTSARRLMSFVGLIPGEHSSGERRRQGSITKTGNSHVRRLLIEAAWNYRHRPHVGASLRERRKGQPPRVIALADRAMLRLHRRYERLTHRGVLPQKAVVAMARELAGFIWAALSPLASQAAAH

SEQ ID NO: 514035 - protein, 369 aa, unidentified
MQQVTQLDFSGQKIFAGIDVHKKSWKVSIRSEQMELRTFSQNPSAGELSTYLKRNYPSADYHVVYEAGFCGFSHQREFSNAGINCIVVNPADVPTTGKEKQRKSDTVDCRKLSQSLSKGDLTGIFIPCIEQQDDRDIIRTYNQTVKDQTRYKNRIRGWLHFQGITFGESEGRYWSNNFTNWLKNLSLSPSARTALDLKLQGYLQARSMVLAATRQVRILSRQARYKERIALIRTIPGVGEITALLFVTEVGDVNRFKSFDALCDYVGLVPNTHSTGDKEKVSGLTRRANHQLREKLIEVSWTAVRTDPALTMPYNNYCKRMKKNNAIIRIAKKMLNRIRYVMKNECPYVIAVMPVCNSGCEIINSKSAG

SEQ ID NO: 514036 - protein, 346 aa, unidentified
MEHIGIDVHKNQSQICILTPEGELIEKTICTDRGRFAAFLGDRAPSRVVIEAATESEWVARCVESLGHEVIVADPNFAPMYARRSRKVKTDRRDARALAEACRLGAYRSAHRASDEQRHVRGHLAVREALVRTRTKFICVVRSLLRREGFRVRSGGATTFVERLAELEIPEHLRLEIVPLVELLGSLNHQIKKANKEIREIVRRDPLVQRLCTVPGVGPVTATSFVATVDGVERFRGAHQVEAYLGLVPRELSSGEKQRRGRITKTGNGRTRYLLVEAAWTVMRSRDPQTAPLRVWVDRLASRRGRRVGVVALARKLAGILYAMMRDGTDFNTQHQNQVGRTAEVA

SEQ ID NO: 514037 - protein, 388 aa, unidentified
MIYVGIDIAKLNHFAAALSSDGEVLIEPFQFTNDNDGFCLLISRLSSFSKDELIIGLESTAHYGNNLLLFLVPKGYKVVLINPIQTAVLRKNNIRKTKTDRVDTILICKVLMTSQPLRFVSLQDIGLMQLKNLGRFRLVSVKQRTRLKIQLTSYVDQVFPELQYFFKSGIHHKGCYSLLKEASSPASIASMHLTHLTHLLSSNSHGRFKKETAVELRVLAQKSVGNSDKSLSIQIAQTVEQIELLDSQVERIESEMKDIVSSLDSVIMSIPGIGYVNGGMILGEIGDIHRFSNPHKLLAFAGLDPTVYQSGNFQAKRTRMSKRGSRAFRYALMNAAHNVVKNNQTFRSYYDQKKSEGRSHYSALGHCAGKLVRIIYKMLYDDVTFDLK

SEQ ID NO: 514038 - protein, 412 aa, unidentified
MKVVYPHCAGIAIHKKTMPVCVFADGGEGSAPEVHKRPFATHREGIQEREAWLAAHRVTEVGLEATGVYWKPVWNALEGKVGLHLCNPHHIRAIPGAQTDLRDGTRIAELLAHGKLPSSFIPPRWQRELRDLTRLRVSLAQERTRIGNRIEKVLEDAQIKLGCVASEVLGVSGRLMLEALVNGQSDEGVLSELARGRLKKKKAQLRQVLQGGVEEHHRFELELLLRMLKNCEHELLLLDCRIATYLEPYEEIVRRLDRIPGVDRIGAAVILAEIGPEVSSWEDARKLAAWACLCPGNCLSAGKRLSGRTRKGNRWLRRIFCQMAWAAARKKGSYFKAQFRRWSGRRGAKRAILAVAHTLLTVIYHLLKKPQLEFHDLGEQFFDKRDAQMTASRLLRRLEKLGYEVTLKTRAA

SEQ ID NO: 514039 - protein, 315 aa, unidentified
MDHNKAVYGVDVSKRNLVAAGYDEPTPVVVANLPESIAPWLAQLPRGATVAMEATGTYHQVLAHLAHTAGMQVYVLNPQTLKHYAAAIGQRGKTDGCDARMIARYVVHEQAKLRRWLPPAPAANRLSQLLERRHTVVSTRQTLAQSLAVPMLKAPRQSLLANVDRILRRLDILIRHEIARLPGMAALYERLKSIVGIGPVVAAQLVAVFSTLNFAKTDSFIAYTGLDPRAEDSGDHRGRRRLSKRGPPLLRCLLYNAGMAAANSRLFKPVYKQLRARGLQTTEAIVILARKIARIAYAIYKSGECFDAQKHLKTV

SEQ ID NO: 514040 - protein, 369 aa, unidentified
MSIVADHHGFVIGVDCHAKNHVYSIAAARGDILATRQFPATRAGMGRAISWAGKHTGGDMSALFAIEGTRTYGANLSRHVVRAGYERVEAPWTATSCKGKSDEIDAGKIAQATLACQIDQLRDPRADGIRGAIAILLASRNQMQKAKTSAKNQLTALMRFHDLGIDVRKAVSAKQVKTIATWQARDTGDIAVFYAIREAIDLAQTVLQLEKNAATNRAEILALVRQCEAGVLLKEKGYGPISVAQIFVSFSHVGRIDSEAKFAALAGVNPVPASSGNTVRHRLNRRGDRQLNRALHTIALTRMRTDEETKAYVARRRLEGKTDHEIRRCLKRYLARHAYRTLNQSLSRPLVADDELFASLQSRAFTGQV

SEQ ID NO: 514041 - protein, 309 aa, unidentified
MLAGIDVGKLNLDISIGGDQVVRFSNTAEGIAALAIALDEAGVIRIVCEPTGGYERALVRAIRASGLQVQIAHPNKVRAFAQACGILAKTDRIDAQVLYRYGEMFVDQASVPIEDKPLKLREILRRRQQLMSTRTQELNRLEKHPGAVARASCERHLAWLDAEIAELDQALRTQLGEPELTHQVGLYRSVKGVGLITAATLIAELPELGRFDGKSLTALAGLAPWSRDSGKQRGYRAIRGGRASVRKALYMAAMSAIRTTGTMRSFYLRLRHRGKAGKVALVAVMRKMLLLLNAIAHRGTPWVENPVNA

SEQ ID NO: 514042 - protein, 315 aa, unidentified
MIIGIDVSKLSFDAAWEAESRGCHRQYAYTEEGIALLLAQTPDDAHYVMEATGVYHARLALGLYASGRHVSIINPLVIKRFAQMKLSRVKSDKADAELIRRYGEQHELTSWTPAAPEVLELQQAHGWLDDLIRERTRLINRQEAHAHHTKPSSFVAKQMSSQLQQLDRQIKGCEQHLEVMVKKSFYELYERLLTIPSIGPKTAIELIIVTGGFSRFEDTKALCAYIGVSPTTFQSGTSVNGKGTIAKLGQGRMRQLLYLSSWTARSCNPACRALYARLKASGKPPKVISIAIAHKLLRQAFAVATTNRVFSAEFA

SEQ ID NO: 514043 - protein, 451 aa, unidentified
MPKNKKQAQQLPVLRPDAAGVDIGASEIFVAVSQDRDLKPVRSFATFTRDLNALADWLQRCGIRTVAMESTSVYWIPLYQVLEERGLEVCLVNAQYVRNVPGRKTDVSDCQWIQYLHSVGLLRPSFRPPAEICTLRSLWRHRASLIQMAAEHVLHIQKALDQMNLQLHRVLSDITGESGLRILDAILAGQRDPVLLSRLCNGRVRSSHDTIAKSLEGDYRGEHVFALRQSLTAYRYYQQLIIEVDREIGSYVADLATDRASGSEIPTQTKKTKHRRQHHEPIVFDLRGELYRIFGVDLTDVPGISSVTAQTILCEVGTDLTRFRNASAFASWLGLCPERQISGGKVLYTKSRRVKSRLAIALRIGANSLHHAKNFLGEFFRRIVRKLGKAQAITATAHKLSRIVYHMLVTKEPYREEVFQRTEEDTLRRAARRLQRQAAQLGFTVTPAVTV

SEQ ID NO: 514044 - protein, 412 aa, unidentified
MQDILTCAMGLDVHRDIIVACLVKGAVDAEPEAETRTFSTLIPEMQKLRDWVIESECRNIAMESTGIYWQPIYEMLESCFDGEISILVVNARHMKNVPGRKTDMKDAQWIATLLRAGLLKGSFIPDKAFRELRHLTRYRKSVVHDITAQKNRIDKFLQSSGFRFTAFLSDTFGASGRNIIRHLIEHGSIDREALDKCLKTKTRNRIDEILVALNGSLSVHQRRFLNMVFLHLEDLEAHKHTVEDEITEEVLKHTDTLNLLCSIPGIDVTAAAAIIAEIGTDMSSFPDSQHICSWAGLSPGNNESAGKRKSVHINKGNPYLKSMLCEVAWIMASHRKLYLSGWYWKVKQRKGAKRATIALARKILSIIYTMLKTGTPYNEECFEQRRLRCERKRANRLVNELQKLGYVVVAPD

SEQ ID NO: 514045 - protein, 351 aa, unidentified
MMIIGVDYHPSFQQIAFLIEETGECGDQRLNHEGGEAERFYRDLKQRGISVRIGMEATGYSRWFERLLAELGFELWIGDPAEIKTKRVKKQKTDREDAQLLLRLLREDRFPRIWIPSPENRDARQLLWHRHRLVQMRTRIMNQLQALAMNENKCWKAKLWSEVGRAELAKLPLDPWASRRRRELSELLDSINPIIEELTTAAEQEARNCPDALRLMTHPGVGPLTALAFVLIIGTPTRFVCSKQIGNYVGLIPSEDSSGGKQRLGHISKQGNSLLRFLLVEAAQAAVRCNTEWRRRYRHLVMRRQRNIAKVAMGRRLAVRLYWMWRNGCEYSPSFELGSHAGKLGTGDGVR

SEQ ID NO: 514046 - protein, 343 aa, unidentified
MDHFAGLDVSVKETSVCIVDDTGRIVREVKVASEPDALLAVLQNPAYHFKRIGLEAGPLSQWLFSALAEAGLPVICVETRHMRAVLKAQINKTDRNDARGIAQMMRAGLYRPVHVKTLRSQKLRMLLTHRKLLQSKAIAIDNDLRGTLRNFGLKVGVVGTVKFEARIKELVENLPDLTLLVEPLLIVRRVLREQLGILHRRLLAIVRDDDVCRRLMTVPGVGPVVALTYRVTVDVPGRFRNSKAVGAVFGLTPSKHQSGESSRTGGISRCGDEMMRMMLYEAAQILLLRSAKWSWLKAWAMKIARHRGVKKAIVALARRLAVIMHRIWVDGTEFRWTKEVAAA

SEQ ID NO: 514047 - protein, 370 aa, unidentified
MLDTTTFIGLDVHARSIKAVSLDVMTGEVRAATFGYDAGAVAEWVRSMDPRARCVYESGVTGFDLQKRLSGLGVDCVVGAVSKMIKPSADRRRKNDRNDAEFLARMLSVGNVVEVWVPDDECEAARDLTRALEDARDDLSRSKQRLSKFLLRHGLVFDERTPTGRRKGNWTRAHWSWIESIRFAEGADNDVLAYYVDAVRRAAEEKARLEGLVEAEARKPRWRRRVDSLRCLKGVDTASAADLVFEAGEFSRFRNARSFAAWVGLTPSEHSSGESDRRGAITKAGNKHLRKALVEAAWHYPTCSGRPKDLAKGQAPDRVARRHAAKGVRRLVERREALLARGVHGNKANVATARELACWVWAVGLMAEEA

SEQ ID NO: 514048 - protein, 392 aa, unidentified
MYIVGIDIGKNHHEASIVSPEGKQIGRSLRFATTHKGADSLMRFIFKNIGNSPCVFGMEATGHYWYPIYSFLKAKGYTIYVINPIQSDSLRKMYIRQTKNDSIDSFLIAEVIRFGQFGTTSIADENILAMRQLCRYRDSVISSRTEIKLRIGTIMEQIFPEYEKQFSSLWVSTSMGILEKYLTPENIENTPIDELFEIIKDKSHNRLTKAKAISIKEAAADTFGIKIAQDAFSFQLKQLIDRMNFLDKQIEALDIEIMKYYEQFDCYLHTIPGIGIIGAATILAEIGDISRFKNSSALVAFAGIDPTVRQSGEFNSTHNHMSKRGSPYLRHAIFLAATTCSFHNSPLNAYYKKKRDQGKHHLTATGAVARKLTTIIYAVLRDSKPYEPKKFC

SEQ ID NO: 514049 - protein, 417 aa, unidentified
MKCFVGLDISSTKLDVCIMLSDTSTPVTASLSNDLSGATEIKNHILDLNHTYHFERIVIGMEATSLYSFHPAMFLHEDRQLKELHVEIMVEQPNKIKKYRDAFEENKNDTIDAFYIADYFRIERFSPSFLKEEKYMALQHLTRTRLQIIEQLTRTKQHFIENIYYKCNTLAYQFKKEELSTNLWSSTMMTLMTDEMTLDELANMPLQELDDWLQKLGKGHFKDSEKLAQTIQAAIRGSYRLSKLQQDSVNVILGLLAREIRNLEKMIKEIDKAIEDMVETIPEYQCLTSIPGVGKVYAAGIIAEIGQIERFKDHPQVAKFAGLNWREKQSGNSNSQHTSLVNRGNRYLRYYLVEAANSVRRYDDEYKDFYKKKYHEVPKHQHKRAILLTARKFVRLVDVLLRNHQLYTPPRRIMEDN

SEQ ID NO: 514050 - protein, 347 aa, unidentified
MENSTTIAVDLAKAFFQISISTVPGRVNERARLTRQKFVSFLATRPPSEIVMEACGSAHFWARTARELGHQPVLLPAHYTKKYVLRDKHDRADADAILEARRREAIRPVPIKTVEQQTIAFFHRMRSSWIQTRTARINAIRAILRELGKVIPVGPRNVVPHLPELMADIPEALHPVLLAIADEIRQLESSIKDADRQLKALLVDSDGARSLLSVSGIGLITCSAMIAFVGSPSRFRSCRAFSSYLGITPKEHSSGAKRRLGSINKEGDTYLRTLLIHGARSVLVAAKRSKNPDRLQAWALRVQERRGHNRAAVALSNKIARIAWAVWSKGTLYQPRPAAAGPAAATN

SEQ ID NO: 514051 - protein, 378 aa, unidentified
MSTTQIVPQDKDTAIRGELCMSFELGDKSWKLTASDGRRGPSRFSVHAGDTAAVLDCVRRARERCQLEPQAPVHSCYEAGRDGWWLHRWLSEQGIDNLVVDPASIEVNRRARRAKTDRLDGDKLLVMLRRHHAGERVWSVVHEPTPEQEDARRTHRELTRLTQERTAHTNRIRSLLVLHNLRVPVIVGGRDWAAWWEHHREQVPPVLRGEIERESARLALVRQQLKLLEAARRQELAEGKHPLVAQLARLRAIGPKGAWVLVKEVFGWRRFANRREVAGCLGLTPTPYDSGNSQIEQGISKAGNRRARTMLVELAWRWLRLQPVSILTQWFNRRFAGNGKRMRRVGIIAVARRLAIALWRYLEHGEIPAGASLKPAAR

SEQ ID NO: 514052 - protein, 332 aa, unidentified
MSNCIGIDVSKASINIHISKNTQDLVFENSLKGFRTLFSKLKKIYKKEIEDIIFIFEPTGSYSEALRKYCSQKQIKCFIINPKQFSNYAKALGVEVKNDVEDARVLSQALPLAKDGQVKVPVFNEDVEHIKELMSYYKFNKKQTTQQKNHLESLTSKDGDKFSIKELKKSIEESIKKEQKIIEQVQTLIDSTDEYRVAYENITSIKGVGQIAGIALLHLFLKYPEANQRQITSLVGLNPIYRQSGTSVQSGYRIAKTGAGLYRGVLFMATLSAIQYDKNFKALYDRLKLKGKHSTSAQIAVMRKIILTAHSLYKNDRKYDENFNSQETSEME

SEQ ID NO: 514053 - protein, 339 aa, unidentified
MAHDTTVFVGLDVHKDSITVACVGSNPTDPVIEIGRIGTQQYAIDRVIKKLSGRGRLRFVYEAGPCGFWLERHLHGKGYDCMVAAPSLIPKRPGERVKTDWRNARNLALSLCAGTLTAVHVPTPEQEAFRDVVRTWQQSKRAITAAKQRLKSFLLRNDIRYSGRATWNAAHRRWLSEIVLQSAAQQIVFQELVDAIAERERRRDRLEGELESLAPNGAGFPLAQALLAFRGIQKTIAYTLIAEAGDRARFAHPSRFMAWLGLVPGEHSSGPTRRQGPITRCGNRWARTLLVEAAWAYRYTPKVSAVIERRAQGIDTKVRALAGFIWEAARLIEQPASKT

SEQ ID NO: 514054 - protein, 441 aa, unidentified
MAVEFVGGPEQAEFMARVRGLDPGQVLLVPVDVGKSEAMAMVTDLRGEVVMSPFKFALTASGAKVLSDRTVSASVSRSAALCRVGVETAGHYHRPLVEHLVADHVEVVELNSAAVKAARGQQLRARQKTDERDLAAIADLLIRGAGRPPQQRSAALLEQKAWVGHRRRKVDMGRRLRQQIHAQLDLVFPGLGACFGDIFATRSGRMILTEFCNPERVVRLGPNRLAGCARTRGIRMTVAKSELIVACARDALTPQSSQRDLVEQHLAADLSMFLTVEGEVLRCERELAALIASTPARVLTSLPGFGVVRASAYGAAIGDHTRFTDADSAYAFAGLSPASYESAGRARPGLGITKSGSVTLHQAILELGKGMGMHQPDFADYRARLISRGKPRPIAAVAVAHRAHRVAFALMRDGVAFDPAHPIPTSAGRPVTTSQPTPETT

SEQ ID NO: 514055 - protein, 344 aa, unidentified
MNHRMIGMDIAKQVFQLHTVDRSSGKIEVIRLRREEVLAFFARRQPCQVAMEACGGAHWWARQLQQQGHEVRLLAPRSVRPFVLRNKTDAADAQAIWTAVQQPGACLVAIKQAEQQTILSLHRIRAQLLKIRIMQSNALRGLLYEFGIVLPEGHVRLAKAIPETFATVENELELPSLLLESLREQWARIIRLDEDIQVIERRLKRCLQESPDCRKVAEIPGIGLLTATAAVAAVGNATTFRSGRQFAAWLGLAPRQTGTGGRVRQLGLSKRGDRYLRMLSMHGARSLVARGQRSAWLERLLARRPYNVAVAALANKLARTLWAVLARDIPYQAKCFTACPAAGN

SEQ ID NO: 514056 - protein, 375 aa, unidentified
MPQYLGLDVHKTYLHGYLFRPGQKGVHFRVPNTPAGWDRLVETYVTPETWVALEATGNAFAVYDRLVERAGSVAVAHPVALKRLGAGRHTDRVDAERLAQMLALGTLPRVWVPPAEVRAVRALIQHVRACQEAATQWTNRAKSVLLRAGWSLPRGTAVGPWLAAHGCELDVETQLLVTSALTLAEHAAAEATRLRAEIVRRVLDQPALAWLWSLDGIGPWTAVVIWAWIGDPHRFRHARQVTRYAGWDPSVHQSGEADWRGRISRQGPAVLRHALLEAAWQAIRRVDGPWRAFYDRVVSRLGSRRALVAVARKLLVAAWRIWRDARWAHEMDPGRYHTKVQRIRRTIAQQPPYPLRDRLAQWGVQPVIPPAAAEA

SEQ ID NO: 514057 - protein, 438 aa, unidentified
MSHEYARLLDPQFPGGDHAWDGYDPAGEPLEDRLYLPCGVDPHGDICGVCFVHPYPQCKEVLCQKIIQNNDLKDMLWLIATGDRLAARYGAVPVYVFESTSVFWRAQRNYLYRAGYATATVCGRQTNHARGTVTRKTHNDLKDADNIAKVFKQGESHATRILPEPLASLREDCRLHQFFTSYSVAIQNRMHCIRYAVFPEFDGLFSKPMCATTLALMQHELLLPYNLLQADLEDLTQLIRFASHGKLGREKADALRLAAQATFPPPYASAGQSASLSLLAQAYQHLHTQLLPPLHERIQATLSAPDFPIHHHLDEIRFFGPLVIGTFLSELGLPEWFRSVDSVVAWFGFDPAVSESANKPTGLTHLTKRGTKYGRRMMWLVANNWCKYIPEGRILFQKERQQHKRSFDAAVCILAAKLVRIAFAMLRDGSHFDIAKAF

SEQ ID NO: 514058 - protein, 342 aa, unidentified
MKFYCGIDLSARDSQVCVIDEQLQIMVQQKLRNELPKICQLLAPYKANLKIVVESTFNWYWLIDGLQAEGFDVVLAHTLGLYLITGAKVKTDRRDAYSLAKLLLVGAVPAAYIYPVETRPVRDLLRRRAHLVQVRAGEYGSLRRLLLRQGILSSQQQEIKTATEAELEQWFAHPLVRLHASQELQRIALYSQQIAELEKTILALAKTEQSYELLLQLPGVGQTIALTILYEVGELSRFANVKVFSSYCRVIPGIAQSGQVTRRGRASKQGNHYLKAAFSQAAVHAVRCYPKVRRYYERQLKRHQGRGRQMICYNIIAHKLAQAAFHVLKEQTEYREELLFGR

SEQ ID NO: 514059 - protein, 348 aa, unidentified
MNTTTIGLDIAKNCFQVHGVDAHGKTTLQRQLRRAQVLTFFANLPACLIGIEACGSAHHWARKLGELGHQVKLMPAQFVKAYVKTNKNDARDAEAICEAVARPNMRFVAVKTVAQQELLMLHRVRQRLVMERTAKANQLRGLLGEFGLVLPQGLHRLRRVMPEILADAENGLSCRLRERFSHLFSHLRELDASISEWERQIVAWHRESPLSQRLDKIPGIGPLGASALVASIGDIRTFKSGRQLAAWLGLVPRQDSSGGKTRLLGISKRGDRYLRTLLILGARSVLRQMRRHPARAAHSWLERLTARSHPHIAAVALANKSARIAWALLAHEREYQADYRRRVALAAA

SEQ ID NO: 514060 - protein, 308 aa, unidentified
MELFAGIDVGKDILEVSIRPDDIRKTFSNDEDGRINLARLLVTMKPALTVLEASGGYQIPVVEVLALRGLNVVVVNPRQIRDFAKAIGKIAKTDAIDAEVIARFGEVIRPEIRPLKDVDAQRLQALVARRRQLVQMLTEEKNRLQIATPWTKADIEAHIEWLTGCIDKAGKDISGLIKKTPLWRDKENLLRTFKGIGPVNACTLLARLPELGQLNRKKIAALVGLAPINRDSGKYRGRRTIFGGRADVRAALYMATLSAVSHNPVIKVFYEHLIHAGKLPKVALTACMHKVLIILNAMVRTNTPWCAR

SEQ ID NO: 514061 - protein, 342 aa, unidentified
MKATTIGIDLAKHLFQLHGVDQYGKTTLKRQLKREQMLSFFSNLPPSMIGMEACGSAHYWANKLQGMGHTVKLMAPQFVKPYVKTNKNDAADAEAICEAATRPNMRFVPIKNGEQLAVLSLHRARQGFVKARTAQANQIRGLLAEHGIIVPKGIAHINPRLPEILEDAENELPGTFRQLIERLGEHFKELTKQVNELEEQIWCWHKENSASQKLAKMPGIGPLTASAQVASIGDAKQFENGRQPAAWLGLVPKQHSSGGKPTLLGISKRGDIYLRTLLIHGARAVLRVAERKREYAGSWLAGAMERRNHNVTVVALANKNARIIWALLAHEREYDADYAVAA

SEQ ID NO: 514062 - protein, 389 aa, unidentified
MSNKVIFNLDDLFISVGIDVGADFSWMSIALPNQQFVGKPYKILHNSIDSLTTAVSKIKEAEELYSLESRIFLESTGIYHYPLFCYLRDKGFNCSVINPIITKNSTNINIRKVHNDRFDSKKAALVGLKPDLKVSLMPSDLALNCRNLCREYYDLMDNRGAYVNKLQGELRMAFPQYLGIFSKVTINTSLTLLETYTSPSAFLEADKQEIIDIIKSTARFGLTYAQNKYNAIIQAATDANQFGYIIDSNIKRIRLYISFIRKYDEEINNILESLHELVDANEDADFVKQIHLIETFKGAGFLSAVSIMGEIGDFSAFSKPKQLFAYFGLDPAVKQSGKFEGTKVQMSKRGSAIARRVIHTLTLQSISISRNGEAKNPVLREYYLSLIHI

SEQ ID NO: 514063 - protein, 350 aa, unidentified
MTFVGCDLHSRSHQVAVLNTDTGELQEQRLAHEGQVVEQFYRALPCPVTIGVESVGYAQWFHALIQREGPTLLVGDAAKIRAMVPRKTKTDRRDAAHLLKLLGEDRFPTIWVPDPGVRDRRALVAHRMRLVRTRTMVKNGLHAIALNYRLAAGAALFTRRGRAQWQALALPPHRTQRRDESLELLSWLDAHIDPLDGQIAAAAAADDQARRLLTHPGVGPLTALATVLVLGPVTRFPTSKHVVSYIGLAPAVAASAAKCRLGHITKQGNALLRYVLGQAGQVAARSETDLRRLYAMVMHRHGRPKAKVAVARKLLIPLYIMLRDQIDYAEFRARGRRLRTHPRPKGTERA

SEQ ID NO: 514064 - protein, 355 aa, unidentified
MYIVGIDIGKNHHEASIVSPEGKQIGRSLRFATTHKGADSLMSFIFKNIGNSPCVFGMEATGHYWYPIYSFLKAKGYTICVINPIQSDSLRKMYIRQTKNDSIDSFLIAEVIRFGQFGTTSMADENILAMRQLCRYRDSVISSRTEIKLRIGTIMEQIFPEYEKQFSSLWVSTSMGILEKYLTPENVENAPIDELFEIIKDKSHNRLTKAKAISIKEAAADTFGIKIAQDAFSFQLKQLIDRMNFLAEIGDISRFKNSSALVAFAGIDPTVRQSGEFNSTHNHMSKRGSPYLRHAIFLAATTCSFHNSPLNAYYKKKRDQGKHHLTATGAVARKLTTVICAVLRDSKPYEPKKFC

SEQ ID NO: 514065 - protein, 376 aa, unidentified
MREKLRFLGLDVHAETIAVAVAEPDGEVRSLGTIANREESIRKLIRKLGPAEHIRACYEAGPTGFVLYWQLSQLGVACAVIAPTLVPKKPGDRVKTDRRDALKLARSHRSGDLTAVWVPDEDSEALRDLVRQREAAKQDQLRARHRLTKFLLRTGQRPPLGLKAWTERWMRWLAQVRYTQPAQEVTRLDCMNEVEHMAARVKRLEEAILEVVKLAPEPMQELIRGLQALRGVAHISAVTIASELGNISSRFQSARKLMGYCGVFPSEDSSGKRIRRGGITKCGNAHLRRIVVESAWCYRHLPRVGEKLRKRHQGVPAEITEIAWKAQNRLHKRYMKLTMAGKDQRKVMTAVARELLGFIWAIGIKTEAACKQPMAA

SEQ ID NO: 514066 - protein, 404 aa, unidentified
MNNVAGVDVSKGKSMVSVLRPFGEVVAKPFSVGHTGSELKELADYLKSLDGETRVVIEHTGRCYEPVARFLHEEGIFVSAVNPKLIKDYGNNTLRKVKTDKADARKIARYGLDNWVELRQHTPMDTIRMQLKTLNRQQGLYSKTKTMMKNNLIALLDQTYPGVNDLFDSPVREDGSQKWVDFAMAFWHVDCVRGMSLTAFTERYRKWCKRHGYNFSQSRAIEAHTKAQDLIAMLPKDALTKTMVRQAIDALNAVSASLERLKTEMRALAAQLPEYPIVMAMRGVGDSLGPQLMAEIGDVTRFTHRNAITAFAGVDPGADQSGTHEAKSARASKSGPPELRKALFLVMDCLLKTMPQDDPVYRFMDKKRAEGKPYLVYMTAGANKFLRIYYGRVKEYLASLENSD

SEQ ID NO: 514067 - protein, 400 aa, unidentified
MRAVFGIDVSKTSSEVAILVNGEKVHSYTILNDAIGFNRLLGDLKTVHNPEIIFEATGVYSRRLQAFLEEYSYAYTRLNPLEAKKQLDSLRVRKTDKIDAEKLAKSQLVHNRKPTYVQEEVYQHLRDLSRFYQNMTEDLVRTKNRLHKVLQVTFPELETLLSTPTGEQYWNLVMAFPCKEFVLSLSQSNLCEIVRQSTSKRLSDKRVIYLVEKLISLAKQSYSAVTKTSPMIEEVRYYAKELLRLSEHRQAILDKMVALAQPLPEYEILRSIPGIAETTATSIIGELGDIRRFQSANQINAFIGIDLRHYESGNYLAQEHITKRGNPYARKILFKCIHNIVSASHTNPCHIADFYEKRKRQSQTTSTKPHTIASIHRLIRTMYYLITHNKLYDYASTQNH

SEQ ID NO: 514068 - protein, 386 aa, unidentified
MKKNSIAKLQVSKSQIRRMAAKQRLTVGLDLGDRSSRYCILNEAGEKASEDQLPTTKAGLDSLFAKMAPCRIALEVGTHSPWVSRHLAAMGHEVLVANPRKVRLITQSVKKNDRMDAEQLARLGRVDPQLLAPIRHRGPDAQGDLAVIRARAELVDCRTALINTVRGLAKPMGERLKSCDADYVKESLADGLSEATQNAIRPLLKSVEEITKQIGVYDKKIQEIEKRYPETKLLKQVNGVGTLIALTFILTLEDAERFEHSRDVGPYLGLTRKQRDSGDSQPELGISKAGDVLLRRLLVQAAHCILRDGAPDSDLKAWGLTKVQAGAKTGSGKKGSKRRKKKAAVAVARKLAVLLHKLWVTGEEYDPQYNRKAVEGAKGKAKGAAA

SEQ ID NO: 514069 - protein, 375 aa, unidentified
MNNTVTVVGLDIAKEVFVAVGMDDKGNVMWKKKLFRPKVLEFFAKLALVRIGIEACAGAHYWARKLLAMGHDVRLIAAQHVKPFVSGSKNDWNDAQAIAEIRSRGQTKYVPINTEAQQDMQMLHRARQALVREHRGLICRIRAFAGEYGMVFPLGVAKFRKGIAAWLGDENNCLSGRALNALRQLLTQLDRIDEDLDYYDKEIKQAANSHPQAKRLSEMHGIGPVTATAVIATVTDPRHYPSSRDFAANLGLVPRQHSSGGRDKLYGITKRGDVYLRTLLIHGARSALRAAVLNPKPDALLQWGLRLLERKGMKVAAVALARKMATVIWSMLANDTAYQAMPAKKALARRNETALARGGMPATGDLNHAASLQAV

SEQ ID NO: 514070 - protein, 432 aa, unidentified
MPHIATRMGLPRFNASAIAPGKEFDMVTVGIDIGKEKHAAAAIGAAGEVLMPPRFFDQNAQGFAALLAQLRKLGRPSGIRIGMEATGRYWIPLRHALAEQGYRVESVNPLITSAEIAKDVRGRKTDKADALAIATALLRNRHNPAPAEDAATDALKSLTRHRTFLVRQRSNAKRCLHAALDVTFPEAGKTFGQIFSATALAVLEAFPSARLLSGANLKTLTAIVSKASRGRLGAERARSFRDAARASVSAGIVNEGDEAALVSLIAQIRFADSQIESAEEKIRAMPAPKAAALLASVKGLGTLLPRVIACEIGDMERFRHPPSGKPPCDMDKRILAFAGCEPRLRESGKWKGRTKISKRGSPALRTALWQASAMCRLHNPLFAAVYERQTARGKPHSVALFYVARKLVEVMCGMYKTDMPFSLQTAGATTCQ

SEQ ID NO: 514071 - protein, 406 aa, unidentified
MRVVHERCAGLDVHKSSVVACALLPEGKQSRTFGTMTGQLEQLAEWLRGLDIQAVAMESSGVYWKPVFNILETVGFELLVVNARHIKAVPGRKTDVKDAEWIADLLRHGLLKPSFIPNREERELRELTRYRRTLIEERAHEVQRLQKVLEGANIKLEDVISDVVGLNGRRFLSALIAGDYDPEAVAATANYGLQRKRELLAQGLRGSIGSHQRFLLDQLLSHIDFLEQRIAALDQEVKQRSRPFEAAIAHLDQIPGVGSRAAQEILAEIGTDMTRFPTHRHLASWAKVCPGNNESAGKRRSGYAGKGNRWLRSILVECAWCASRKKDSYFKTQYHRLAARRGKRRALLAVGHSLLTVIYYLLRDGVLYQDLGSNYFDQRDRSQIARQAIRRLERLGYQVALTEGAA

SEQ ID NO: 514072 - protein, 438 aa, unidentified
MPTEGRCEHSFIRLRAFSCWLRIDVETGDALLFVGDDWAEDHHDVELMDAAGRRLAKARLPEGAAGMARLHAMIGAQLGPDAGDHADQVRIGIETDRGPWVQALTAAGYTLYAVNPLQASRYRERLAVSGAKSDGADAHMLADMVRTDAHQLRPIAGDSVEAEAIKVVTRMHKTLIWERTRAGQRLRHALREYFPAALAAFEDLDAADTLELLARAPDPDTAAKLSTAQISAALKRARRRDLPVKTAKIQSVLRATQLGRPAALTAAYAASVRALVAVLATLNEQIKMLQGQVEAYFGEHPAAKIILSQPGLGQILGARVLAEFGDERHRYLSAKTRKNYAGTSPITRASGKKRTVAARYVHNDRLIDALITQAFASLQTSAGARAYYERQRARGANYNAALRQLANRLVGILHGCLKTGTLYNETTAWSHQPTPAAA

SEQ ID NO: 514073 - protein, 342 aa, unidentified
MVHVGLDLSRTRLDVHVMDESGAPLAVTTALPEAGGLAALVSRIGAEFGGPVYAAIESMNGARFVHDQLELAGWQVEIADAQKVKGLAPLACKTDKIDAWVLAELSRRDLVPAIWLPTPTVRAERERARWRLHLVRHRTALKNRIHATLLAFGHPCPVSDLFGVGGRELLARLALPEPWAADTTAALHLIDELDAEIADCEHALRRAGADHRYVPLLMTAPGIGWVLGYTIAAEIGDIARFASPTKLAGYTGLCPRVYQSGGKDHRGPLAKNGPKYLRWALIEAATHASRHPVYAERYRRTKTRLGRQRGPKIAQVDLARRLSEAIWHMLSTNKPFAPAGAA

SEQ ID NO: 514074 - protein, 369 aa, unidentified
MKKNNTVKQSPKRATAGNAGPITIGMDVGDKMSRYCVLGGDGEVQSEGSVGTSRKAMAQKFSEIRRCRIAFEVGTHSPWLSRLLSGLGLEVIVANARQVQLISASTRKNDRMDAHMLGRLARVDPQLLRPIRHRSEQAQADLMTIRMRAALVEARTGLVNAARGFSKAMGERLPACDTDAMGVEKLAALPAGLRARLQPLMEEIEGLTNQIKKLEGHIERIARIEYPETELLRQVSGVGTLIALTFVLTVEDRERFQKSRDVGCYVGLRPKQSESGQSQPQLRITKEGDRYLRTLLVQGAHLILNRRGPDTDLKRWGLKLAARGGKNGKKRAIVAVARKLAVLLHRLWICGEVYEPLGNSRIATAKQAA

SEQ ID NO: 514075 - protein, 429 aa, unidentified
MSYRIAGIDVHKKMLAVVVSDVEIESEYQFERRMFSSSPEQLRSLAAWLVAQEAEEVVMESTAQYWKPVWEALERYWKPAREKREGRRRRSGTLHLAQALSNRGRRGRKNDFRDAERLVKRLVAEELTLSFVPDAEQRLWRTVTRKKYQLRRERVRIHNHLESLLEEAHIKLSSLVSDLLGVSARRMLNALADGETNPAALAALADQKLRATPQQLCDALGACTELKPVYRRLLRMTLQQLQLLEQQIGQLDQELATLLHPHQDPVQRLAEVPGFGVDSAQQIIAEVGPTAATFPSKKCLSSWVGACPGEEESAGVNYSHRSPNGNRHMRRLLNQAANAAVRVKGSIFEIIYRRCVPRLGHNQAIGVIAHRQCRLIWLILHQGARYEERGPAVTERSRYQRTWRMIRQLRSLGYRIESPNPQPSQALAQ

SEQ ID NO: 514076 - protein, 316 aa, unidentified
MANLTKSKSSVNVGVDVGKSFLDVYIHEKQIYFQEENNHKGIQNILKRLAHYRVERLVVEATGRYEFSLAEAAYLKEIPVCIMKPLSIRRYAGAVEQLAKTDKIDAAIIAEFAAVIKPKPTPQKSKNLIAIKDLLARRRQVMEMRTQELNRLKIMGKSLEASCKRIIKVLDKEVERLEKSLSEYVDEQSEWSEKRELLISTPGVGNTLVYTLLADLPEIGTLNNKEIGALVGVAPMNRDSGSLRGKRKIKGGRASVRTILYMATLSATQCNPVIKNFYKKLVEQGKHKKVAIVACMRKFITILNAMVRDKKEWCHD

SEQ ID NO: 514077 - protein, 457 aa, unidentified
MRTIGIDLAVTATHKAVVADDSGRFVTSVLAFRATWEEMAHLVACAREGVAVDYPVQAVMEPTGMAWFTVAVPLSHLGVTVYLVNGRKVHDLRRYYKRHAGSDRISARVLAKLPVVDAESLYPLAIPGAVQLACQRGCKQDDRLQSWITAIHNRLLDIDRFAWPGLEQVLPDAFGPAALLFRQDWYDPTRVVEAGTQRLSMAFAAIASPKDDLEWVKGLVEVAIGVLKLYGLEAIDYDRLQAEVRCEQRLLIQLEREQAQVQEDTVRPSYHQLHPSGHLETLYGVGVKGAPVFASFIGEPDRFADNRHFRGWHGLVPDSRQSGESESKGLHISQAGPDLIKKYGYITADTARRFDPQIAAIYYDQMVNKGKHHTQAVCACATHVLDRIRVVLRDDRPYELRDVDGKAVTPAQARAIIAERYQVPEEVRKRNSKKGRHQQADQQLERRQEQKGSRPRR

SEQ ID NO: 514078 - protein, 337 aa, unidentified
MKRYLGVDLHRTQFVVCTRQENGESWLRRCGIEQLGAFVAQLQAEDELAVEAMGTTARFYEAVVGQVARVVVVNPHKFKVISESVKKTDRHDAEALALYLSKGLLPEVRMKPRKDRELLHLAETRDLLVKQRSALKGKINNLLAMQGINLKREALSSQVALERVLAIDVGARVKVELRVLVAQLRGPSTSIAELEALIEEEGEQLPGHANLTSIKGIGTLSATVLLTTIGAVNDFADENKLAAYLGLVPHVQNSNATQRSGGITKMGNKLARTALVQCGLIAQRYSPYLKQFYQRVKQRRGGGKAKIALARKLAKIVYDTLKNNWVFADFPSFTLAA

SEQ ID NO: 514079 - protein, 385 aa, unidentified
MTTATPIRITQETTDRPALFLAFELGANQWKLGFTTGAAQRPRERNVPARNIEAVQEEIRKAKQRFGLPEEAPVISCYEAGRDGFWLHRWLVTQGVANCVVDSASIEVNRRHRRAKTDRLDVQKLLTMLLRYAAGERKVWSIVRVPSVEEEDRRQLHRALATAKQDRTRVINRIKGLLASHGLVMPPGGAFPQQLEHLRLWDGTPLPVGLRRRLDQEWEHVQALVQRIAQLEAERRAVLRTAEDAVTKKVQQLLMLKGIGINSAWVFVMEFFGWRAFRNRKEVGALSGLTPTPYASGNTAYERGIAKAGNLHIRAMAIEIAWGWLRFQPESALTQWYQQRFGYGSSRLRRIGIVALARKLLIALWRFVETGVLPDGAALKGAVRI

SEQ ID NO: 514080 - protein, 366 aa, unidentified
MDTIYIGVDFHARQQTICYLKTETGELVTCELKHQDKQKVRAFYAQFRGQVVVGLEASGYSPWFERLLEELGCEVWLGHATEIRRRARWRQKNDRRDAELILHLMLHNEFPRLHRPAVQSREVLRMLRYRQKLIKMRTMSKNSLQAIALQAGLAKGSRLFTKAGQQELGTAEMSPVLHWQREHWLQLMEPLNQQLLETMVWFKAQSKDDVCITRLRTHPGIGLLTSLCIVHTLQPVTRFRNTRKVAAYAGFDPIERSSGERKCFLGISKAGSRLLRYLLVEAAQTAVRKDEDLKRFYKRLAERRGRPKAKVAAARKLLIRAYIMLRDEIDYAEFRHRAVAARLARRGQGPSNVPEVLIGQPASPEQ

SEQ ID NO: 514081 - protein, 398 aa, unidentified
MFTAAFASLTKMNFNKLLSGNITKYQKEGFIMISVGIDVSKGKSTVCIMKPCGEILESPFDIGHTADELDSLISLIKSFDEETRVVMEDTGHYHLPVATYLSSHNIFVCCVNALRMKKFCSQSIRRAKTDKIDSIKIASFGITYWNELVKAYPSNVIYDELKFLARQYYQVTGMLVKSKVNFSNLLDQVMPKINDVLSNQGENHKLTEFVNRYIHFQNILDMGEMKFTSDYCKWAKKKGYRLNERKAAEILALAQNGIPTLPNSQSVKIAVSEAVKLIHSIEESRNTILAQMQDLCNTLPEYSVVKEMDCIGDTLAPRIIAEIGDVRRFKNKHSLIAYAGIDAPPYQSGAFHASDLLYRFFLCFFSQLCSFCLLIFLSRFLIFLQYLRQAVLFPRYVV

SEQ ID NO: 514082 - protein, 344 aa, unidentified
MPIVGGLDIHRKQITFDYLDTMTGQVRRGQVSPADRAHLRAWLARFAGLEDVAFAVEGCTGWRYVAEELAAAGVTVHLAEPAGTAFARGRKRHAKTDKTGSRHLRMLLAEGRLPECWIPPGHILEARALLELYHDLRTGHTAWVQRIHAVLFHHGAPALGEGTLRTGQGVAALQAAAAHLSPAGQLQVATALEVLEALETQLHLLRHQLLAVARHLTGAKVLAARLYGVGPVTGLAITCWLAGEGRFSSSRKTVRFAGLDITVSSSDRNGPPGKLSRQGPPVLRWAVYEAGKTHARTSAPDHAYYAAVKDRKNSKRACLSEARKILRQAHHILAEPGDDALAAA

SEQ ID NO: 514083 - protein, 347 aa, unidentified
MRFYTKEHKFFCGIDLHAKTMYVCILDQQGGIQLQRNIRTEPEIFLRTISKYREDIVVAVECIFTWYWLADLCAKENITFVLGHALYMKAIHGGKAKNDRIDAHKIAVLLRGGMLPMAYVYPREMRATRDLLRRRTYLVRKRAELLAHVQNTNYQYNLAEIGKKIAYKANREGVAERFPEVAVQKNIQLDLNLLDYYDQLLTKLEHELSLTAKVHDADSYFRIRSIPGIGRILGLVILYEIQDINRFPSVQDFVSYCRLVKSQKESAGKRYGTSGKKIGNAHLKWAFSEAAVLFLRRNPEARKYKEKLQKKHGKAKAMAIIAHKLARAIYYILKRKTVFDMTKFFSK

SEQ ID NO: 514084 - protein, 384 aa, unidentified
MRKVIMIGCDLHAETMVLKLAVGLGKPEVRMLPNTGPGRAKLLEWLRQRSIEAGGARVVFAYEASSQGFGLYDQLIDAGFECHVLAPTKIARSPKQQRDKGDEKDAEQLLELVRGHVLAGNSLPDVWVPSLETRDDRELVRSRLDAADKLSSLKTQVKSLLARNQLRRPEGSGKGWTRLFVAWLRGLNLKPGARAVLDSLLRQLEFYDRELKQLDLLLVQLAAEPRYARPLGEACQLQGVGVLTALVFLTEVGDPRRFGNRRQIAAYLGLVPSRHESGSRSDCKGHITRQGPSRVRKVLCQATWARVRYENGDQAAYRRIVRKNPKHKKIAVVATMRRLAIQIWHAAARGMENGDSSERTSRGKNQRPQVPPPDPRLLPSLRSG

SEQ ID NO: 514085 - protein, 344 aa, unidentified
MSEIVTIGLDIAKSVFQVHGVDAAGQVVVTRQLKRGQMLKFFAALPPVLIGIEACGTAHHWGRQLQNLGHDVKLIPPIYVKPYVKRQKNDAADAEAICEAVTRPTMRFVEIKSVDQQAGGVLHKTRALLIKQRTMMFNAVRSHLAEFGLVTGTGVAQVVRMVDRLAKGDELDLPELARETLGVLARHIQELQDKLTRIDKQLTRWHYRNDVSNILETIPGVGVITASALASMVTNAQSFRSARHFAAWLGLVPRQNSSGGKTRLGKITKGGNRYLRQLLVVGATSVLRHVRAGSVKGFEWAKALLDRRPPKVVAVALANKMARIAWVVMTRGVEYERKELAIAA

SEQ ID NO: 514086 - protein, 386 aa, unidentified
MVELTIIGIDPHKESWTAVATDQRSNRLAAMRYPVSPAGYRKLRRFALKYSEPVWAIEGAYGLGAPLAALLIDDGVAVWDVPAKLAARVRLLSTGHGRKSDQDDALSVAVVAATSTRLRPVQADAASMELKVLTEYRDDLVRTRTQTVNRLHAIMNLLILAGAPRQLSADTAAKLLRRVHSADELSTTRRMIAVNLITEIRRLDKRITAVTERITTRTAATGTTLTVICGIGSLTAARFLARTATIHRFPTQNHFAAYAGAAPREVSSGDVIRHRLSRGGDRQLNYALHVIAITQIAMKAGPGRVFYDRKRREGKTKKEALRALKRRLATVVYRRMLADVETKAVSPAGQSGTTLISSVTGSNPITGSSEKSLTGPTSNKPNQTAA

SEQ ID NO: 514087 - protein, 423 aa, unidentified
MSYRIAGIDVHKKMLAVVICNVEIESEFQFERRMFGGNPEQLHSLAEWLLQQEVEEVVMESTAQYWKPVWEALERHWKPRYNQADGLRKAGTLHLAQAESNRGRRGRKRDFDDAERLVKRLVARELTLSFVPNAEQRLWRTVTRKKYQLRRDRIRLQNQLESLLEEAHIKLSSFVSDLLGFSARRMLKALAEGETNPAALAALADKRLRATPEQLCDALGACTELNAVYRRLLKMSLEECRLIDEQIDQLDKEMASLLTEHQHAVQRLAEVPGLGVDSAQQIIAEVGPAAATFPSEKCLSSWVGACPGDKESAGVNYSHRSPKGNRHMRRLLNQAANAAARTKGSLFEIVYRRSIPRLGHNQAIGVIAHRLCRLIWLILHQGVRYEERGPAVTKRSKQLRTWKMIRQLKALGYRIEPGNVQPV

SEQ ID NO: 514088 - protein, 343 aa, unidentified
MQTITTIGLDIAKSVFQVHGVDAGGQVIIRRQLMRRQVVAFFQKLLPCLIGIEACASSHHWSRELQALGHTVRLMPPAYVKPYVKRQKNDMADAEAICEAVTRANMRFVPIKTPEQQSGLMLHRTRHMFIRQQTAVINSIRAHLAEFGIVAPVGRKGVTELLRIVADPNDKRMPEVARACLAALGTQLLALKEQILEFDRMILAWHRSNQTSKRLHYIPGVGPMLATALVASVADPRTFRSGRNFSAWIGLVPKQHSSGGKERLGGISKQGDRYLRSLFVAGALAVIRYAKIHGTGHRPWLTALLGRRPTKVAAIALANKIARMAWAIMAKGERYKQPAALAR

SEQ ID NO: 514089 - protein, 369 aa, unidentified
MSKFIMVGDDLHEDSMLLKIAADRGPAEKQSFGNTPSGRRALIGYLRGRSAGAGGAWVVIAYEASGLGFNFRDEMTAAGFTCHVLAPTRIARSPRHRRQKCDEKDADRLLELLRGHLLAGNELPTVWVPDAQTRDDREVVRARMDLTGKATAVKTQIRTLLKRNGIEKPSGLERGWGARFRAWLQGLAGPRGRLRGGARCALGTLLRQLGALEEELGRLDRHIEKLAAQPRHAAAVRALDAVPGVGLLLAVGFVTEMGALNRFGNRKQVGAFLGLVPASHESGDGDDRKGHITHQGSWRLRRLLCQGAWARVRHDPGEGAVYARLVERNPKHKKIAVVACMRRLAVLLWHLGRNAQGQAPPREKHPLAA

SEQ ID NO: 514090 - protein, 385 aa, unidentified
MEHAVGKAAERSEAGFPTATGDRSIVSGSRKAVTKRDRRRFRGRSPHSRQSRRASSSSHLQDGDHAMEGSITLFAGVDVSKKSLDLCLLPEDRKQSFAHDKSGIQRLLAALPAAGTCLIAVEATGGYHRNLVAELANAGHKVAVVNPRQVRDFARGLGILAKTDRLDAQVIARFAQHVQPRVTPPLSPKAAELEQLVSRRRQLIDLRTAELNRMQTLSSKNVRKSLQKMVDVLRKEIRHLDSDILALIESDDDWKDKMDRLGSVPGVGPVTAASLLAELPELGQVNRQEIAALVGVAPFNRDSGRFRGKRSIWGGRASIRNVLYMAALTARKHNPVLKAFAQRLEAAGKPFKVVITACMRKLLIILNTILKEHRQWQAEKLLANA

SEQ ID NO: 514091 - protein, 331 aa, unidentified
MHYSHYIGVDISKNTLDAAIYAAEMRRSDTKHLPNDKTGLKELVAWAKAAGAKPNDMLICAEHTGVYSNELQLFCEKKGIALCLENPLQIKRSMGLVRGKDDQIDAIRIAQYAYDHKDKLKLFHRPSGNIITLANLLRERRLYVRQKATLMAQQAEIGSYESATSRNRRESLIDKHAAAVKSVEKQMMEIIKGDKTLKKTYDLISSVVGIGPITAIDTIVYTNNFQNFDTPRQYASFIGVAPFDHTSGTSVNGRTRVSQFCRKQQKVSITMAARSAIVNDPWMKNYYHRKMKEKGEQRNQHGVVLNAVKFKLVLRMFSVVKSGTPYKVMKY

SEQ ID NO: 514092 - protein, 370 aa, unidentified
MKKNSTVKQSPKRAAARKGGPITIGMDLGDNTSRYCVLDEQGEIVREASVVTKKKPMLQKFAALKRCRIAIEVGTHSPWVSRLLKGLGHEVIVANARQVKLISASSRKDDRLDAQTLARLARADPQLLRPIQHRSEKAQGHLTVIRVRAALVEARTSLVNTARGLAKATGERLVKCDTDQLRAERLEGLRAELREALEPLIKEIESLTEKIHASDRKIEQMARAEYPETALLQQVSGVGTLIALTFVLTIEDRERFQKSRDVGCYVGLRPKRSESGQSRPQLRITKEGDVYLRKMLVQGAHYILGYRGPDTDLRRWGLRLAAHGGKNAKKRAVVAVARKLAVLLHRLWVTGEVYEPLRNSPTARSKKRAA

SEQ ID NO: 514093 - protein, 433 aa, unidentified
MQEAEDEPLFADRAAGIDIAKAGIEVTIRVPSDTRRRGRQQETRSFRTTRKELLALADWLRCWQVTKVGMESTGDYWKPVYFLLEAEGLDCVLYHAAQVKALPGRPKTDKLDSAWLAKITERGALPGSFVPPEEIRRLRTHTRYRRHLTQARTAEKQRVEKLLEDAHLKLSSVISDIHGVSGRAMLEAIAAGQRNPTTLAQLARGSMRGKIARLEEALDCAFVTEQHAAVLAMMLATIDYYTARIEELTGKIEVLCQPYLHQIEQLDAVPGTGVITAQDIIAEIGTDMTVFPTAAHLVSWAKWCPQVAQSGGKRKGANATGRGNRYLSAALGEAAVSAGRTQSFPGAKYRRLVKRMPKRKALVAAGNSLLTIYHALLSDPEATYADLGTDYYERRANIRRQARNHVRGLERLGYKVTVEPIDPATGELEAAAS

SEQ ID NO: 514094 - protein, 273 aa, unidentified
MEGPIVSIDVSNGNSHYMCFIKNNKRFGKVKKIDHDIEGFKRLLEDIQKLEAETNEKVCAVFEATGVYTKPLERFLSKNSIKTYIINPLESARKRKEEIHNKKTDKLDPISISKVYYDKEEMMELKKKDETYNWLRKKNRLYEDQLNHLRKYKVTFQNQLSICFPGYLDLFKDGYSDIPMTILKKYPHPDLLKNKKAETVASTLEEYRYISSIDGIGPNLAARIIAEIGDIEEFKSREALVAYAGLDPHIYQSGDQDGKHLKISKKGMMLAYK

SEQ ID NO: 514095 - protein, 317 aa, unidentified
MTKTNITTAGIDTSKAKLDIAIHGRSERWQIDNTSRGWRRLAADLAKVNVTRVGIEASGGYERGVVRYLREKGFTVWLLQPIQVRAFARVHLRRAKNDVLDAVLIAAFAALTDQPSRELDERLAELAQHLTFVEQTEEDIARFKTRLEHIADPRRRRLVLADIARLKARRSVEMLRIVRQLRRHDDLARRLDLVRSVPGIGERTALALIIRMPELGRVSREEVAALAGLAPFDDDSGKHKGQRHIAGGRGRLRRSLFAAALPAAFRWNKALIEFYIRLTARGKAHNAALIACARKLLIYANTVVQRGTPWSERSATT

SEQ ID NO: 514096 - protein, 402 aa, unidentified
MFFAGVDWADDHHDAAVVDEAGQLVGSKRVSHSPDGIADLRAFLLGIAGGPDQVPCFVETNHGLLVAALLEMGFPIYPVNPKTVDRRRRPSGAKTDHIDAYLLARTGRSDLADLRRLQPDNPLVQELKILTRDLQTLIQSQTRLLNQLRACLKAYFPVALNLFSNLEQPTTQAFLKAYPTLEAARAAPGQELATLLRRQRHPYPDRKAREILAKLRQPQLAADPVTTRAKSRLMLALLAQLAPVMEQIEAYDQEIHRFFSLHPDSALFDSLPGAGERIAPRLLAEWGDDRDRYVFANSIQALAGTCPVAYQSGSYRKAHKRYACIKPFRDALHQFARQSALREPWAAAFYQRKRAEGKSHSMAIRALSNIWVRIIFAMWLKHEPYDASLFLAAKDAHACSTA

SEQ ID NO: 514097 - protein, 482 aa, unidentified
MKTKNSPALAVGIDVHKKRHYARVKIRETREIISPILKIYNSKRGLDFLLEKVNHLMEKYQAKKVIFALEPTGIYWKPLGYALHDRGCLVHLVNPVQVHYKRKEEDPAANKNDKIDPGLICDLVCDGKSNPARFMLGIFRLLQKTVRSRRDIILELSSKKIKLKTVIYELCPELVDAFTDIAGRVSMAILRFSPSIDLLESTPLEELSSIFRIYGSHKTKISPEKLLSQVRFSLGIRNDNQAHIKQIQMILEQIDLLKRQISILEKDINGYLKELGQTLTSIKGIGPILAAEVIAEVGDINTFSSGRQLVKLAGLDTVESSSGETKRRRYISKKGISSLRTTAILAAFSLIKSCPPFTDYFLYQTKVLAKKPMQAIIAVADKFLRVCFYMLKNKTSFDPKRIGTGNLRTKAKFLNQSLEVSLDSKEIANLDLNLLEIFSKSPKVVLFDEEDPTWVKIRVNSKVETFDLGEPRGRILALLNAL

SEQ ID NO: 514098 - protein, 339 aa, unidentified
MIVQGTSVGLDVHALSVVAHAIDEETGKIARARLCPDHGEVLGWLHQLRDPVRVTYEAGPTGFGLARAINNSPGMECVVAAPSKLQRPAGDRIKTDARDAAHLARLLRLGEITPVTVPAPEIEAVRDLVRVRDDARADLMRVRHRLSKLLLRQGIVYSGGTPWTCVHESWLRKQRFADHHLKAAFDHSFDAVLAATAARNRLDEQIQDVAASARFADPVNRLGCLRGISALTGLALTVEIGDWSRFTGSSIGAYVGLVPSEFSSGTSRVQGSITKAGNTHVRRLLIEAAWHHRKSYSTSGPSLRARWAKVDPALRARGHAGNRRLYSRWQGFTARKKNP

SEQ ID NO: 514099 - protein, 440 aa, unidentified
MKILLNSEVLEMNYNTQNAKIASITEKSLIVGIDVGSETHYARAFSWRNYEYSKKPFAFSNDEDGFASFKAWMDDIAEKHEMEKVIPGMEPTGHYWLNLGAYLQGQGMRPVHVNPHHVKKSKELDDNNPNKNDRKDPKTIAGLVNEGRFSYPYIPTGIYAEIRNLSNLRIQTQEEITRIKNRIARWFSIYFPEIKDVYRNPDAVSGLMVIKQAPLPCDIKGLGVDGVNKIWRDARLKGAGLKRAKNLVTAAEHSIGNTEAPRSARKEIRNLLNDYEIYKSRMDELMEEIEELLSGIPYIDKLMGISGIGIKTVSCFIAEVGDIERFDNPKQVQKLAGYAIVADSSGKHNGESRISHRGRKRLRYALYEAAVSVIGKNKEFKEIHHYYRTREKNPLKKMQSVIAVACKLIRIFYAILTKGIDYDGQKMLRDIVRPGMQSAA

SEQ ID NO: 514100 - protein, 393 aa, unidentified
MKVTRIGLDIAKQIFELHGVDRHGRVAIRKTLRRERVLEYFSQLPACEVALEACGGAHYWHREISKLGHTVRLLPAHKVKPYLDGNKNNAHDAAAICEASSRPSMRWVEPKTIAQQDLQSLHRVRQVTVRQCTLLANHIRGLLLEYGIAVARGTAALQRALAQLLEPDEQRLSPLLKQLIAGQWRMLKLHEQQVKVHDRRIANIARHDASCQALLKVEGIGPLTATALVATAGNGRQFKNGRHLSAYLGLVPGHSNTGHKTVMLPITKRGSRYLRTLLVHGARSTLYHARRKTDPRSLWLQRLQAKRGHNVAAVALANKNARIAWALLRFGQAYRPNLAHAPVAEHGATPAASAPGRGAGLTLKLHRVSAASAESPIFPSRPQRVKGGTEKCS

SEQ ID NO: 514101 - protein, 391 aa, unidentified
MEQIGFDIWCGLDVGKQAHYACALDTAGKKVFDKPLPQDQAKLEDLFTKIQTHGRVLVVVDQPNTIGALPIAVARSMGITVAYLPGLAMRRAADLYPGNAKTDARDAFIIADTARTMPHTLRRVDAGEETLAELKVLVGFDEDLAAEATRLSNRIRGLLTQIHPALERVVGPRLTTKQGLAVIEQLGGPQGMAAASKSKLLRIITKAYPRNAPPFADAITTALGEQTVVVAGTASAEQVLPKLAASLRQVLDQRAELAVQVEKVVDAHPLAEVLTSMPGVGVRTAARILLDVGDASQFPTAGHLAAYAGLAPVTRRSGTSIRGEFPARSGNKHLKRALFLSSFAALRSDPISRAYYDRKRAQGKKHNAALICPELRHFSAHPPQGGSRVSR

SEQ ID NO: 514102 - protein, 412 aa, unidentified
MEVLHPHCAGLDIHKDTVVACVRHMVDGAVKREVRTFKTTTKDLMVLSEWLSAEGCTDVAMEATGIYWKPVWHILADGDFKLMLANAAHVKNVPGRKTDVNDATWLADLMAHGLIRGSFVPDEPTQEMRNFLRTRKQFVRERTSHVQRIQKTLEDANIKLDSVITDIMGLSGRRMIEALIAGETDPFALAALAHRRIKASQAELEAALRGRVSDHHRFMLRLLLQHIDAIDAAIGQIDQEVDAHVEPFRTAIQILSSIPGISDLSAEVIVSEIGIDMNRFPTEGHLISWAGLCPRNDESAGKRRSTRMRKGAPWLKTTLIQCAWAAARTKGSYLQAQFQRVRSRRGAKKAIGAVAASVLTAAYHMLKNGTLYEDLGSDHFDRRAKGKQILRLVSRIQNLGFAVQITPIGAAT

SEQ ID NO: 514103 - protein, 356 aa, unidentified
MSIVAHSHPFVVGVDTHARNHVYAILAPGTGALVDTREFPTTAAGINRAMAWIARRTDADADTLWVIEGAASYGAILAGTVATHGYPVAEAPRMDARKRRGVGKSDALDAHQIAAATLGLPVQELRRPRLNDGIRQGVRILVTARDSMSKDRTRAVNALTALVRANDLGLDARKKLSATQISEVSRWRDREEELSLSIARSEAVRLAKHVLDLDEQLQANEKQLDELVKASEAAPLLDEKGFAAISAARCLTAWSHEGRVRNEAAFASLAGVNPIPASSGNTVRHRLNRGGDRTLNSALHMVAISKMTYDAETREYVEKRRAEHKTDKEIRRCIKRYLARRAYRTLNASVTAMNAT

SEQ ID NO: 514104 - protein, 356 aa, unidentified
MRRGLKSVCETHFDPAETDMNYCGIDLHSNNCVVIVSDESDRIVYQKRLPNELTQIAAALEPYRHELAGVVIESTYNWYWLVDGLMDSGYQVHLAHPAAIRKYDGLKHSGDFADAAYLAQLLRLGLLPEGYVYPREERGARDLARKRMQLVRYRTAQILSIEGIMMRQTGSRISGEAVKRLTADQVNEFAFMPDVTLAVEANRAVSQALAQQIEVLEKRLMERVSLRAEYRLLKTVPGIGDTLATTIMLETGSIGRFAHVGNFSSYCRCVDSLRESNGKKKGEGNTRNGNKYLAWAFVEAANFAMRYCPQARSFYDRKKSRTNRVLAIKALAHKLARACYHMLRDQKPFDVHLCFG

SEQ ID NO: 514105 - protein, 451 aa, unidentified
MKKNVSMQIVNPNAAGIDVGSRSHFAAIGQGNDDVREFGVYNEDHQALIEWFKENEITSVAMESTGTYWQSLFASMQFEGFQVILCNGKFTKNIKGKKTDVQDCQWIQKLHTIGLLSGGFLPDDATEHLRTFCRHRSNLLEQAADTTRKMQKYLRLLNLRLDVVVNDVTGLTGIAIINAICNGETNPEFLASFRHGNCRKSKEELVKALQSNGRKDFLFALKHEYKMYLSIQEAIADCDNEIKTLLNEQINNDSNKREHFIEKKVHKKVNKNSPKNFDVNLMAYQYFEGIDLMAIEGVSHSTVLSVMSEVGLEGLKKFESAKQFASWLRLAPNNKISGGKILSKKVPKGSNRLKIALRNAANAIGLLKDTPLSNFFHRIAFRKGRSSAISATATKLAVIIWNMVVKKQQYHNEAGYEFIDQKRKRKVMEMRKLISKFGISTFELNLNINGL

SEQ ID NO: 514106 - protein, 275 aa, unidentified
MLTQVKGGVLCVLSVLMSVKNKIDLCLLTAGPGGKKKHKVLTNEPAVARKVVDWLNAQKCVPESVTVVLEATGIYHENLAYGLHEAGVSVCMANPCRVREFAHGMDILNKNDAVDAFVLACYGELKSPAVWVPPSPEVRKLRALLRQRDALREDVQRTVNRLEKANSTSTPQEVIRSLERMKSWLNEELARIEKLITDHTDNDPGLKADLDLLKSIKGVKDQVGREMLALLKDGTFKSASQVAAYLGLTPVEKTSGSSVRGRPHMSKNRAVRSTG

SEQ ID NO: 514107 - protein, 404 aa, unidentified
MIFVGIDWSESHHDVCVMDADGKVLAKDRIPEGVQGVAQLHEMVAVHAEEPSDVVVGIELDRGLLVGALLAAGYAVHAINPLSVDRYRDRHRTSGAKSDPGDAKVLADLVRTDRHLHREVAGDSELAEAVKVLARAHQGLIWSRQRQLNQLRNALREFYPAALEAFGTDLASPEALAVLEVTPTPAEGRSLSTTKIAAALKRAGRRRRITERAEEIKQALATSQLEAPAVLARAYGDVVRSTVRIVAEMTAQIDALAAELEASFEEHPDAEILRSLPGLGVVLGARVLAEFGDDPDRYADPKARKNYAGTSPITKASGRSKVALARFARNRRLADALQMWAFCSLSCSPGARRYYDAHRARGHTHRRAIRSLANRWVRILHGCLWRRERYSEERAWPTLTEAAA

SEQ ID NO: 514108 - protein, 343 aa, unidentified
MEHYAGIDVSLESASVCVVDASGRIVSEAKVASEPDVLIRWFGNLGVEVSRIGLEAGPLSQWLYAGMREAALPVELLETRHVRDAFKAMPVKTDRKDARGIAQLIRLGWFRAVHCKSLPAQELRAVLTARKLVQGKRHDIEMSLRGILRGFGLKVGPTTTRSFEGRIRELVEGHPTLLAVADALLLARATLGEQLGKLQKRLVSLARDDMRARLLMTTPGVGVLVALTYVSAIDDPARFRSSKATGAHFGLTPKKYQSGETDVTGRISKIGDASVRTALYEAANVILTRPVKGSLLKSWAMRVAKRTGMRKARVALARKLAVILHRMLANGSAFVAGKAAAKA

SEQ ID NO: 514109 - protein, 411 aa, unidentified
MENIFLRCAGLDVHKASVEACVRRIEPSGRLHQQTRHWGTMTRDILMMADWMAAQGVTHVAMESTGVYWKPIFNILEDRFKVLLVNARHLKQVPGRKSDIRDCQWIAQLLQHGLLKGSFIPPLPQRELRDLTRHRTQLVEEKTRTSNRIEKVLEDANIKLGSVASEVMGVSSRAMIQALLEGEKDPAQIADLARRSLRGKIPELQKALEGHLTEHHRFLLRLLWKELTQQEALIAELEAKIEERTRAFAPEIERLDAVPGVDRRVAEVVLAELGGDMRPFPTHRHLSAWAGMCPGNEESAGKRRKRRITPGNRWLKRTLVQAAWAASHTKNSYLASQYRRLVGRRGKKRALIAVGHSILVILYYLLKEGRQYADLGTDFFDRLEPQRLTRYYIKRLQNLGHKVTLEPCATV

SEQ ID NO: 514110 - protein, 401 aa, unidentified
MNAVGIDVSKGKSMVCVMRPFGEVVLEPFEVLHTAQNLHDLAEKLKALDGETRVVLEATGNYHKPVAFVLHDAGLFVSVVNPVLIHDYDNNSLRRVKTDKKDAVKIANYTLDKWTRLRQYLPEDDTRLALKNCYRQYQQAVAIRTMLKNNLISSLDLTFPDANKLFSSPVKNNGCEKWVDFIGDFWHSECVSSLSANAFAKKYLKWCQKHGYVFTRSKSDEIYACAVNSASLPKSPTSKLLIQQQVAQLKAVSQSVAAFRQEMLRLSQQLPEFDTVMEMYGVGPSLGPQLMAEIGDVRRFSSKKSLIAFAGIEPQPNDSGKVVGNDKGISKVGSAVLRRTLFLIMTVILQTQPQDEPVFQFMNKKRSEGKPYKVYMMASANKFLRIYYAKVKAVMDSERSQ

SEQ ID NO: 514111 - protein, 346 aa, unidentified
MRYSTTVGVDLAKNVIQVSVVSGRGKEVLNRSFTRRKFAEFLGNQKASLIAFECCASAHYWARMAQRHGHEPRIIPAKAVSPFRQGHKTDSNDALAVAEAARRPNIKDAPMKTVEQQGLQSIQRSRELLIQECTALSNHLRGILLEFGVTIPLGFASLLKALPEILEDGENEISDVYRPTLHRLHNRMLELRRDIEAMTKEIDVLVKQHPVCSRLTAIEGIGPIGALSLYAVLGSGQAFTKSREFSAYLGLTPRQFSSGGKTNIVGISKKVGNRRLRAILIQGARAYVFRMKEPKSLKDRWLKELIERAGVNRAAVALANKNVRTAWAMVTHGTEYERRAQLEMAA

SEQ ID NO: 514112 - protein, 327 aa, unidentified
MQDRAKGKERDVKEPSTSIGIDVAKATLDVAVRPAGARWQVPYTEEGVEGLVQQVQELEPTLVVLEATGRLEVVLVSALAQARLPVAVVNPRQVRDFAKATGRLAKTDAIDAEVLAHFAEAVRPTPRPLPDAQVQALDALVTRRRQVVAMLTAEQNRLHTTSPATRADILAHLRWLERRLAKLDAELGEALRDSPLWREREDLLRSVPGIGPVATMTLVAELPELGTLNRREIAALVGVAPLNRDSGTRRGKRTVWGGRAPVRAALYMATLVATRYNPVIRAFYQRLCLAGKPKKVALTACMRKLLTILNAMLKQHTVWEPNHALTA

SEQ ID NO: 514113 - protein, 348 aa, unidentified
MSGAYEGRQIVGMDLHRRRSVLVRMTDTGEHLETVRISNDPDYLREVMARAGEAPDVVLEATYGWYWAADTLAELGAHVHLAHPLGVKMFSLRRVKNDQRDAADLADLLRMGRLPEAWIAPPATRELRGWVRHRAKLVGLRSNLKCQVHAVLAAAGVQVPMSDLFSPSGQKLLAATMLAVESRSRVDSLLRVITALDFEIDTFARLVAGRLRTDPSYRAIQQIPGVGPLLGAVFVAEIGDITRFGRPAQLASWAGLTPTHRESDTTVHRGRITKQGSRLVRWAAVEAVQRVPAHTRLGQVRDRVAARRGRNIGIVAAARELVGLVFYGLRDHHIRCLAAPTATAARAG

SEQ ID NO: 514114 - protein, 348 aa, unidentified
MVTIGIDPHKRTHTAVAVDELGRQLSAQTVPARQEGFGQLMVWAHQLDPEPVWVIEDCRHVSGPLERFFLDHGQTVVRLPPRLMAGARHSGRERGKSDPIDALAIARTALREGIDTLPTARLSGPELEIRQLLMHRQRLVNIRTALINELRWQLHDLWPDWEIPARALDRAIWQGRVHSRLGRVEATARVRIARDEICRIKDLTRTINQLAEELTELVSRVAPQLLTERGLGILTAAKLIGEIAGIDRFENDAQLARLAGCAPIPVSSGNTNRYRLDPGGNRQLNNAFYTLAINKMRHDPQTALYIAKQRARGKTQRDAIRSLKRHLVRRIYRLLTEPNNVKVTICLT

SEQ ID NO: 514115 - protein, 319 aa, unidentified
MEKVTHGRIIGIDVSRDWLDIHCLPDGQRHRIPNTDNGHVAVSDLAHDQRAVVCFEATGGQEWRLWSYLQDAGVEARQVPPAQVKAFARSLGTRAKTDRIDAELIARFLVFRPEAGRTLPAEHLRLLRALTTRRAQVVEMRKRLLAQIRAHRKSGTAELFEDIDVELKERLDVAITELESRISELLGRYRHLAGTARILRSVPGIGPVASSTLITELPELGALTGEEAAALTGLAPVAQDSGTLRGKRAIAGGRRALRHVMFQAALVASHHNPTLKAFADRLRKAGKPHKVIVTAVARKLVIIANALCKSRREWEHRHP

SEQ ID NO: 514116 - protein, 281 aa, unidentified
MEHYVGLDVSLKLTAICIVDRTGKIVREGVVTSDPETIAAFIKSHAPHVARVGLETGATSTWLWTELNKMGLPVICIDARHAKAVLKMQINKSDRNDAVGIARIMQCGWYKEVHVKDLDSHATKALLVSRALLVKIKRDLENQIRGLLKNLGLVIGRAKMNVFAARAAELAEARPELAAAVEPLLKAREAVERQIADLDRKVLRLARNDAQVRRFMTAPGVGPITALCFLATVDDPTRFKRSRSVGAYVGLTTRRYASGEIDWTGRISKCGDAAKLPLRGS

SEQ ID NO: 514117 - protein, 346 aa, unidentified
MGKSITDLSSVTTVGLDLAKHVFQVHGVDASGRVVVAKAIRRNKLLEFFASLPPCLVGLEASGSAHHWARELIKLGHDARIMPPAYVKPYIRRQKNDASDAAAICEAVTRPSMRFVGVRSLENQAALMRHKAREMLVAQRTQLLNGLRGHLTEVGVIAPQGPRHARELAELIEACDETIPFEVCEALAPLVVQLRNLDEAIARLDRIIAKLAQKDETARRLMSIPGFGPITASAMAATIQDTSSFAGPREFAAFLGLTPKQNSSGGKPKLGRISKMGNRYLRKLLVVGAHAVLFHRKPHTDPLRMWAKKLIDKKPFKLVAVALANKMARIAFAILRGKTVYREIPA

SEQ ID NO: 514118 - protein, 420 aa, unidentified
MDELNKTFYTAFVGIDWAAAKHDICIQEAGSEQREFITIPHQVEKIDEWAHSLYQRFGGPIAVAVELSKGPIVYALQKYDFFVIYPVNPTTLAKYREAFSPSGAKDDPTDAELAVDLILRHPERFTPLQPQSVDLRTLAILVEHRRELVGDKIRITNRLRVALKQYYPQALDWFDHIDTVLFCDFIVRWPTLTQIKRARPNTLKTFFHQHSMRFAKVLETRLASIKTATPLTMDDGVIIPHRLQALVLIEQLRVTMEAIKQFDKEIERLAQQHVDYALFNTLPGAGPTLAPRLLVAFGEDRERYSNAAELQKYSGVAPVTKRSGKKCWVHWRWQCPTFLRQTFVEWAAQTINKSYWAGAYYRQQRAKGCTYQAAVRALAFKWIRILFRCWQTCTPYNETKYLKALERRGSPLLKQLGEKT

SEQ ID NO: 514119 - protein, 389 aa, unidentified
MKIYVGIDIAKLNHFAAAISSDGEIIIEPFKFTNDADGFQLLVSKLESFDKNSLIIGLESTAHYGDNLVRYLVTELYQVCVLNPIKTCQMRKNNVRKTKTDKVDTYVIAKTLMMQDNLRFVSFFDLDMMDLKALGRFRQKTIKQRTRLKIQLTTYVDQVFPEIQYFFKSGLHQNAVYALLKEAPSPKEIASMHMTHLANLLKVNSHGHFTKEQAKELRVLAQKSVGANDSAISIQITQTIQQIELLDSQLEKIEAEMTDIMKFNDSVIMTIPGIGYINGGMILGEIGDIHRFSNPNKLLAFAGLDPSVYQSGNFQAKTTRMSKRGSRVLRYALVNAAWNVVRNNATFKAYYDAKRSEGRSHYNALEHCAGKLVRVIWKMLTDEVEFNLE

SEQ ID NO: 514120 - protein, 433 aa, unidentified
MIAASIERCAGIDVGKKFLAVCVLVGPLESEPQAYRQHFGTTVSELEQLRDWLKGHGVTHVVMESTGSYWKPVFNILEDAVEVYLANPQEVKNRKGHKTDDKDGWWLAHLLRHAMIHPSFIPSRAIRQLRDFTRRRKRLLGTANSERNRVQKVLEDANVKLGNVLSDVFGASGQMMLDALLEGKASPGEIAQFAKRRAKKKIPEIIAALEGHQMSDHHRKLIRYSLEHLRFLEEQIAGLDEDIMAQIQRAGLKPQFELVQSVPAIGEISAAIILAETGGQMKTFPSEKNLSSWAGLCPGNNRSAGKSKSSHTTSGNPWLRGALVECAWAAAAKKDCFLKEKFWRIAGKTREHKKGPALIAVAHTLLKLIHQVLSTGQPYHDKQSPPLDEQQKRRIIRHHVRRLGKLGIAVYTLRPAASGGAGAPSVPIPLVPG

SEQ ID NO: 514121 - protein, 408 aa, unidentified
MPNVVEFPQIVERGCGLDVHKESVVATIKGTGIIEETRTFGTFTCDLLALGLWLKENQVTHLAMESTGIYWKPVYNILSAEFSIILVNARHIKHVPGHKTDKKDSNWIAKLLISGLLKGSFIPEQPIRELRELYRYKRKLIGQRVAERNRLQKILEDANIKLASVVSDVFGVSGTAIVQALIQGDTDVFHLAALAKGSLKKKVALLQLALQGNITMHHRFMLKTLMHSLENIESLISDIDLQIGQTLQPYQQQLRLLETIPGVGAETAGGIIAEVGCNMEVFPSEKHLASWAGVCPGNNESAGKKKSERITHGNKSLKTALVEAAWAASHTRDTYLKRKYNSLIARRGKKRALIAVGHKILCAAYFILKNMEEYKEPNDTALMEKRKQAQIQRYFKRLHELGVAPRLN

SEQ ID NO: 514122 - protein, 338 aa, unidentified
MKVHILGIDLAKNVFQLHGVDRKGRPVLVRRVRREQLLKVLGELEPCLIGIEASTGAFYWQRQFEKLGHAVKIMAPQYVKPFVRRQKNDSNDAEAICTAVQQRNMRFVPKKTLEQQDIQALHRARQRLVNHRTALISQMRGLLLDRGIAIAVSATRARRLIPKILSESNDELTEMMREIVSSLYAFMLQIDERIKAFDRKITAIFKASDVCQRIAKIRGIGPKTATAMIAAIGDGSDFKNGRHLAAWLGLVPRQHSSGDRKVMMGITKRGSQHLRTLLVHGARAVVRTAVRKTDSRSIWVNELRQRRGYNRATVAVANKNARVIWAVLTSGEPYRAAA

SEQ ID NO: 514123 - protein, 281 aa, unidentified
MQTQKLCCGVDVSHTTLDVTFQNNLGELFHLKVGNNQKGFEKILEHTGPAYHFVMEATGVYYIRLAFFLHGKDCCLSVVNALSIKRFIQMHLERNKSDKKDAAWICRYAIEQRPPFWEMPDGAYFESKQLYNTIREYTEQIKRFNNQLHSLGLLPVPSKDTIKSLQKMKQVLQKEVEGLEQKLEAVLQQWQPAQLKSVGSIKGIGKRATAMLIVFTQGFKNTHNHRQLISFAGMAPTEYSSGSSIHGKPRIYKKGGKALRGCALHVRHECYENKHCLQGAL

SEQ ID NO: 514124 - protein, 356 aa, unidentified
MKNSQLDFTGQTLYIGIDVHKKSWQVTILLNGMKVKVFSMNPNPKELNNYLTNHYPNANYHSVYEAGFSGFWANRQLQALGIKNIVVNPADVPTKSKERRKKTDKIDSSKLARELSVGNLDGVYIPSTKAEALRTLIRLRRQIVNDQTRQKNRIKSLLLFLGYSVPEDVETKHWSQRYIKALRNLDIEHEESKATLNELLNNLNFIRSQLVKILEQIKGFIAKDQQADKTVRLLKTIPGIGPILAVILYSEIIDIYRFKKLDELANYVGLSPAIYSSADKEINLGLTKQKNKYIRNYLIESAWIAIRKDPALQMAYGLLCKKMSSNKAIIRISKNLLNRIRTVWINQQEYVIATVA

SEQ ID NO: 514125 - protein, 402 aa, unidentified
MKVSGLDVHKDSIFCANYDGKEYSEVKEYDTMTNSIRTMGEYLKSEGVSHVAMESTSIYWVPIWDILEEMGFDLMLVNPFFIKQMPGRKSDVKDAQWIAALLHKGLLRGSMVPCPIIKELRIYTRKYSRLQQRISQVLTEMDRIMVTANIRISSCVSKLTCKSVIRVIEALIAGETNADKLAKLVYGNTSNKRSGKLQDALTGNLKEHHRQSLKWAKEQYDLYEQQTQECLLYMEKICQEHYAKEMELLQSMPGIKAVSAMIIIAEMGADINVFENSGKIAGWAGLRPRNDESAGKFKSKAITKGNKYLRAILVQVAWSAVRTKGCYFKEKFNRLSLRKSNKKAVIAIARKMLVIIWNIIKDNKPYNPTLAHIYDPVKVARSIAYHQKEIERASKLLPLKVV

SEQ ID NO: 514126 - protein, 392 aa, unidentified
MCAGSRGGRARSQVQTFTTMTADLLRLVDWFAGERVGLAVMEATGDYWKPVFYLLEAHLDRVWLVNARDVAKVPGRKSDVKDAAWLAQVAQYGLVSPSFVPPEPIRRLRDLTRQRTNLVTERVRAVNRLEKVLEDAGIKTSVVLSKTLSVSSRAMIEALVAGERDPDVLAELALGRARAKIADLRQALVGRFNDHHAFLARQALAHIDNIDAQIGAFDARIEVEIAPFHDRVDLLSAIPGVSRRIAEIIIAETGGDMTRFATAAALASWAGVCPGLNTSAGRQLSQATTHGNTWLRAALGDAAAAAARSKGTYLSAYYRRTAKRRGPKRALVATMHKILTAVWHMLHTNTAYHDLGPNHWHTNPDQLQRRKARLIHELRTLGVNTTGLDQAA

SEQ ID NO: 514127 - protein, 408 aa, unidentified
MNLLIGIDWGQEHHHVYFMNPNGAQLASFEIAHAAEGFAELDDKRAKLGVPPTECLVAVETAHNLLVDFLWSRQYIVYVIATTVVKGSRGRITNSGASSDARSAYLLADLLRTERKRFLPWLPDAPLIWQMRAKLSLIEALRRDINRWSNRLRAVLLRYYPQMVGLFSKLTTQIGLQCISAYPTPQVIAELDTEAWTCFCRQHRYTRMDRITETYASLQAPVPQAAPAAVSAYQGEAVFLARLLLSMVQRRAQEIRELGALFKQHPDHAIFASLPGARDLLGPSLLVKFGDHRERFPSPAGPQALAGTCPITVSSGKSKHVFFRRSCDRDFRRIVHQFAMASCRKSFWAQMYWREVYARSGRKNHAYRCLANRWLAIIWKLWYTRQPYDEQYHLRQRQLRRKPRNTKS

SEQ ID NO: 514128 - protein, 345 aa, unidentified
METMYYIGLDVHKRTISYCVKDVSGRVCAEGAVSATRFDLDRWMKTLPGPWTAAMEATVFTGWIYDHLRPHAVALKVAHPLMLRAIAAAKKKNDRIDASKICDCLRCDFLPECYMASTAIRERRRTLRYRNLLVRQMVQMKNKIAMLLMEAGVSYNKQKLHKAGYFRELLATNPDINAELGSLLRLCRETVVRLQRTESALVRSLERDSLLVERVERLMTIPAVGPITALTWALEVGDVQRFSSIKKAISYCGLCGAEKSSGNTVQRTPLSKQRNKHLQTTLIEAAKMAPRNSSQLAMLYNKERQKGNANRATLAVARKLVAYLMAVDRGQRNFQEVETSNCIAA

SEQ ID NO: 514129 - protein, 398 aa, unidentified
MSRIWAGTDCGKTHHHCLVLDSEGDTLLSRRVANDEPELLKLLGDVLDLADGRAVTWALDMTGGEPALLIALLVNHGQELVYIPGIAVNRASDSYRGQGKTDARDARVIADQARMRRDLLPIRPDDDATVELRLLTDRRVDLVAERTRTINRLRSLLTSMFPALERALDLGTSGALMLLTGYQTPAAIRRTGQRRLTTWLRNRKVRGSEALATKAVEAAERQHTAVAGETAIAKMVLTFTKEVMALSEKISETDKLIEGRFREHELAEVIQSLPGIGTVLGAEFLVAVGGSLDAFASPDRLAAFAGVTPAPRDSGKISGNLHRPQRYHRRLQRVFYTSALVSVQFDPNSRQFYDRKRAEGKRHTQAVLALARRRVNVLWALIRDRRCYQVALPVAATA

SEQ ID NO: 514130 - protein, 378 aa, unidentified
MKDIRHVGMDVDSEKVVVAVAEAGGEVRALGAIPYTAEAVRQLVKRLGPPNRLRVCYEAGPHGYGLYWQLTRLGVRCDVIAPTLIPTRSGDRVKTNRRDAEKLARCYRSGDLTPVWVPDAAHEALRDLVRARESAKKDQLRARHRLSKFLLRRGLRAGASGKAWTVKHLQWIKTLRFELAPQEMAFLDYLHEVEHAAERVARLERAIDQAVEAAPAQMRALIAGLQALRGIKQVSAATIVAEVGPLSRFARPKLLMGYSGMVSSESSTGASVRRGGITKAGNAHLRRIVGEAAWAYQYRPAMSAELRKRQAALSEEVKELAWKAQHRLSSRYRRLAAKGKLRQKITVAVGRELLGFIWAIGIQVEKEQQHLRAKGRAA

SEQ ID NO: 514131 - protein, 343 aa, unidentified
MSNDTRIAVDVAKAVFEIAISDRPGRVNRRERPKRHEFLTFLAQQPPATVVMEACGSAHYWAREIQKLGHQVLLLPPHHVRPYIRRNKTDRADAKGILEASRNDDIRPVPVKTVNQQVLTSLHRLRSGWMLERTARLNTLRGLLRELGVFIPVGSREVVPAVWAVIEDADSNLPDALRSIFAEACREIREIEARVELVERQLEVLAEQLPAVEQLQTIPGVGLLTATALVGFIGDIRRFPTARHFASYLGLTPREYSSGLKRNLGRISKRGDGYLRTLLIHGARSVLVHARKQQPDRLREWANALAKTRVHNKVAVALANKLARIVWAVWKNERPFALMAKAS

SEQ ID NO: 514132 - protein, 403 aa, unidentified
MFCGWDWGSTQHGVCLIDDHGVVIKTWMVAHTKSQLTALFDELAQRVEAAEVGQVPVAIERGEGLVVGLIAGAGHPVLMVEPAAFKAARPRWGSAGAKSDLGDAFMLADYARTDGHRLRRVQPVAQATRELAALVRARTSLVEARTAASNQLWAILAEHWPGAAVVFQKLTSEVALAFLSDYPTPQAAALLGEGRMRQFCVRHSYRGGKSPAELVSRLRAAPASANPIAPKVLEAIVRGSTAQIKLLNSEISRLEHDLADALAAHPKTGLIATLPRVATVSLAALIAEIGPLLERCENPEQVAAMCGAAPITRASGKSRTVTFRYTANKPARVAITSFADNSRHSSAWASDCYRRARARGARHPHAVRILARGWVRVIWVCWTTNTVYDPLRHRGERLLATMT

SEQ ID NO: 514133 - protein, 433 aa, unidentified
MQEAEDEPLFADCAAGIDIAKAGIEVTIRVPSDTRRGGRQQETRSFRTTRKDLLGLADWLRCWGVTKIGMESTGDYWKPVYFLLESEGLACVLYHAAQVKALPGRPKTDKLDSAWLAKITERGALPGSFVPPAGIRALRTHTRYRRHLTQARTAEKQRVEKLLEDAHLKLSSVISDIHGVSGRAMLEAIAAGERNPKALAQLARGTMRGKIARLEEALDCAFVTEQHAAVLAMMLATIDYYSAQIGELTAKIEVLCQPYLHQIAQLDAVPGTGVITAQDVIAEIGTDMTVFPAAAHLVSWAKWCPQVAQSGGKRKGANASGRGNRYLGAALGEAAASAGRTYSFPGAKYRRLVKRMPKKKALVATGNSLLTIYHALLSDPQAIYTDLGTDYYERRTNIRRQARNHVRGLERLGYTVTIEPVNPATGELQPANS

SEQ ID NO: 514134 - protein, 347 aa, unidentified
MDQQCHYVGLDVSLETTSICVIDDAGAIIWRGKCHSDPDTITAIVRHRAPGAVRVGLETGQLSNWLTLSLRRRGVPVVCMDARHAKAALSLQINKTDANDAFGLAQVVRTGWYREVAVKSMDAHTLRMLLVARSRLVSQRQATANTIRGLLKTFGLVVARGSKGLFPVRVREQIAGNPAVIAIIEPLLAVWHAIRDQVAMLDRQMLARARNDQVARRLMTIPGVGVVIALAYTAVIDDPARFRRSVSVGAYLGLTPRRYQSGEVDTTGHISKCGDSLLRGYLYEAAAVLLCRDARASILKSWGLGLAKRIGMRRAKVAVARKLAVIMHRIWSDHSEYRWTAIPPTAA

SEQ ID NO: 514135 - protein, 503 aa, unidentified
MTDVTLVRARGGYSHSWVSPLLSMVRESSATLVSVAIRIPFERVSQIRRFPWRCHSLTILEDSMAVRKREDEVFPKAAGIDVGASSHWVAVPAHVTEKSVREFGAMTDDLNAMADWLLECGVDTVALESTGVYWIPLYEVLEQRGLKVWLVDARQMKIVPGRKSDVMDCQWIQKLMSLGFLRAAFRPDAQVLVLRAVERQRQLLITEQGSWVQRMQKALVQMNIQLTEVLTDVMGLTGQAIIRAIVAGERDPNALAQHRNGRVKASIEEIARALTGNWREEHLFVLKQSLAMHDDIARHLAECEAKLQTSLRDLGQKRVDLGKAPRAGSKLHAEYEARQILANWAGVDLTRIDGLGLTAATKILTEIGVDLSRFASVKQFCSWLGLCPGTKISGGKILSSKTKRSTNRVRQVLKVAAMSLSHSKSALGAFYRRMCARMDKPSANTAVAHKLARMVYFMMTRGEAFVDQGQQRYEEQQLQRSVAALKRRAKDLGFVISPLATTT

SEQ ID NO: 514136 - protein, 380 aa, unidentified
MQQHSPTDPTGARPNDAVLFVALELSRASWLVAIQAPGRDKISRHKLAAGVSAELLELVGRQRIRAKHRTGGKLRVMSCYEAGRDGFWLHRLLVANGIENLVIDPASVAVNRRARRVKTDRIDVETLLRAMMAHARGERRVCSVVRVPTPEAEDARRLTRERQALLEERVRHVNWVKSLCALQGVYDFEPLRPRAAERLDGLMTGDGRPFPERLKAEVRRHLERLGQVVHQIAEVEALRDKPASPLAKGVARLVALRGVGPNVASVLQAEILGRCFANRREVAQYAGLAPSPWASGRAQREQGIGKAGNARVRAAMIELAWLWLRHQPDSALSHWFRERVGQARGLVRRIAIVAVARRLLVALWRYATDGVIPEGAAARG

SEQ ID NO: 514137 - protein, 331 aa, unidentified
MRNYSESLGLDISKSHFDAVLHQKKVHRQFENNPGGFIALGKWVKGHKYSWENILVCFENTGYYSLDISYFFQSNNIDYIQEHGLQIKRSIGFRRGKSDKADAFDIAFYCWQNRSDAKLSSPPSILLSKLKQLNRSRDILVKQRVALRNQIQALSAVRDKAIYSEACKSLNKVIRSIDLQLKNLERTIKELLTSDPGIYKSYRLCTSVKGVGPVLAIEIILHTHNFTCFDSWRKFAAYSGIVPYPHQSGSSINWKTKIHPFCDKRLKSLLTMGAISAMKCDIGLKLYYEKRIQEGKPKMSVINIIRNKLIARVFAVVNRGTPYVMIDKYAA

SEQ ID NO: 514138 - protein, 428 aa, unidentified
MSERDYNSQTAKCQRISKATLIVGVDVGNAFNAVGFMNKDGNVLGICEKLYNSREGFEQFVKMIEGLKARHRLRDVLIGMEPTGHYWRKLAYFAKEHNYEVRFVRTTALKHHRELDESSSAKSDRRDALTIANITREGKYIDKVIEDGVLRQLRTLSKARERLLRYSVSAKNSLHAALDDYFPELHEIFWSMGSRSLWVILDQCPFPEDVVSMKVSTLQEMIARSSRKRAGSAGKARVLYEASQKSIGVKQIGSADRYRVRMCLEEVKRTVLTLKDMDRQLKCMVKDIPSASYLMSIPGIGALSAAVFLGELGNLAHFHNARQIVKYAGYDPQETDSGSWVGRKFISKKGRWLLRKYLFFMSMRVVVLSKYFQEYYHRKLETKNRVGQQPRRKEILCAVAIKLIKVIFALLRDKRGFEDTAFAAEARA

SEQ ID NO: 514139 - protein, 428 aa, unidentified
MNETELNRVKEFRQLKKQIQGSETYLIVGIDVAKERHHAFLGTVTGKTLVKKLIFENSASGFSELLARVEAVRAQNGLSEVVFGLEPTSNYHKPLGRYLISKGYHVVLVGGKAVKNNRELLDERWDKHDTKDAANIADLVSRGKCFYYDLPSREIEELRELHSLRARLKKEEHSLNLRIRNNLLAKHFPELDSFYTACERETLAIVRWCLNPQQIAGMPFDEFFKRVAPNARGIAQKLRLQKIHRLAHESIGCPVGGAVQFQAGLLVEKIKQVREQILEVEQGIQHLCVQFPSYEYLLSIPGFGPYVASKVLATIADPRRFDSAKQVIRTSGYDLCAERSGKRSDQAVPVISKKGNSQLRYALYQAAMIASSRHRFFMAYFARMLQGREREQGIRTKMRVKLAAKMLVIAWTLMKKGEPFNPEYLNMR

SEQ ID NO: 514140 - protein, 347 aa, unidentified
MDQQHHVGLDVSVKETAICVVDSHGKVVHRATVESHPEVIGRHLIDLGHAYARVGLEAGPLSPWLYAGLVEVGLPAICVETRHMHAALSARINKTDRNDALGIAQMMRVGLFKPVHVKTPASQQRRLLLTSRKLLQRKAYDIESDLRGQLRNFGLKVGVVGAVGFEQRVRDLVLDLPFVAAVVLPLLEARAALRTQLAKLHKMLLDQVRTDPVCRRLMTAPGVGPVVALTYRTCVDNPARFGRSQCVGAHYGLTPRLYQSGETMRVGRISKCGDRMMRAALYEAALVLLTGSRGRWSGLKVWGLAVAKRRGMQKALVAVARKLAIVLHRMWRDEKDFRWSTGAVTAA

SEQ ID NO: 514141 - protein, 386 aa, unidentified
MQKLNDLSRSLTPLKPDRTLIAVIEMSLSSWLVAGIVPGIERQPLKKLEVDESTLLKLLIRWREEAKKSGHSIERIAVAFEAGRDGFWLARWLRARDIEAHIIHASSVAVSREHRRAKTDRLDTELLKRAFLGWLRGERDHCRMVAIPTIKDEDAKRPNRERESLVGEQSRIVNRMKAALVRLGIRGFNPKLKKAVERLDGLRTPEGEPIPPNTLAELRRDMARRRLVNDQIRQIEDTRLERLEQAPSDGPHAMVRLLARVIGVGIETADMLVQEVLSRNMRDRRAIARYAGLTGSPDESGRKRREKGLARSGNARVRRGMIQLAWRFLMFQKDSTLAQRFRARTENARSTRKTMIVALARKLLIGLWRLVREGVVPDGVVLRPVS

SEQ ID NO: 514142 - protein, 370 aa, unidentified
MLRFHATNDEGGSQMFYGIDLHSDSITIAAMGEEGETSRVFRYHLGTEAFEKFVERLTANDYMIVEASTNTFWFYEKVRYRVGRCIIIDPRKIQGNDGVKVKTDKRDALQLVRLLRYVILTGATVPEVYIPEKPVQEIRQLFTTYYLYKRQMVMTKNRIHSLLKQEGYTVPKKSLDVAKTWDIIARFKLSVSAKIQIQQLYEQIDSIRKGKELIKQEILKRGVIFQEEIELLTSIKGISVFMAIGIMADIVDINRFPSAKKLCAYLRTAPTISSSNKMTRIGSINKNSRKLTISLLIESVEHFRSVEKINRFYTGKKKGKGAGKARVAVVRKIIVAIYYILKKRQYYYYRSEEMHCRKLKEYENFLKKVA

SEQ ID NO: 514143 - protein, 372 aa, unidentified
MNRILKIGMDVHSTNYTLCVVEPQLEGDPIYLYEIQVAPDYRNIINVMQKLEKQFEGDKLHITCGYEAGCLGYTLHRQLKSANVDCVILAPSTMEVPGGKRIKTDKRDAELIAKCLANGGYQAVHVPTTEDEDVRDYIRMRDDQHGLLKLTKQQINAFCLRHGYKYTRTKWTGEHLKWLEALSLSELQREILDEYLLTYNRLNEKLIRLDARIEELADRDTYKENVGKLGCFLGIKTKEALSLIVETGDFKRFAKGNAYSAYIGLTPGENSSSDNVRRLSITKAGNKHARTILVEAAQSICRGRIGAKSKALTARQRGKDPAVIAYADKANERMRRRYYRMINRGMQRNVAVVGVARELACFIWGMMTENIA

SEQ ID NO: 514144 - protein, 319 aa, unidentified
MAQNDLVVVGIDVAKDKVDACIRRFTLRQTFPNTAQGRRKLVAWLRKYQVGKAVMEASGGYEREWRNVLYNSGIEVRIVDPRRVRSFALSAGRLAKNDPIDAEMIAWFAETFSQAPGQIPDAAREELAALTKARKALVDIKIRLQAQDEHAAPEPARKAYARALKSLATEIDKLEGAISAKVKATPEFAERAEIIESVPGLAQATSAILIAGMPELGQVSDKVAAALIGVAPYDDDSGKRRGERYIKGGRRWVRNGIYMPCLGAATQCNPVLKAFYQRLLAKGKEPMVALVACMRKLVIILNTMLARRQKWDPGRHAMG

SEQ ID NO: 514145 - protein, 345 aa, unidentified
MTVYCGVDFHARQQTIAFCDTQNGEIRFIQLKHADHETLRRFYTQFQSPVVVGLEAGGYSDWFERFLEELGIEGWFGNPTEIRRRARSRQKNDWRDAELILDLMMNNEFPRVFRQSPESRAVLAQLRYRHKLVQLRTQVTNSLHALAIREGLSLRAALLTKEGRAKLNALPLIVVKANQRVEWLALIDQLSEYIKRVERELSKLAAVDPQVIRVRTHPGIGLLTGLALVHTLAPVSRFANSRKVTAFVGLEPREFTSDSRQRWGGISKAGSPLLRFLLVEAAQHAARADSELKNTYQHLSLRRGKPKAKIAVARKLLVRAYIMLRDEIDYSTYLRRTVAVRSSRH

SEQ ID NO: 514146 - protein, 344 aa, unidentified
MSEITTIGVDLAKQVFQVHGVDAEGAVVLRKQVRRGQVLALFSRLPRCVVGMEACATSHYWARELAALGHEVRLMPAQYVKAYVKRNKNDAADAEAICEAAVRPTMRFVPIKTAEQQAAVLLHRCRERLVRQRTMLVNALRGHLAEFGIIAPQGLRNVGQLIAIVRDENDARLPDLGRQVLQVIATQLEQLGAAVAALEKQLMDWHKASPVSQRLASIPGIGPIIATAIAATVVDPIAFRSGREFAAWLGLVPRQNSTGGKTRLGGISKRGNRYLRRLLINGASANLLRSKATNADPWVMGLRRRRPSLVVAVALANKTARIAWAVMQRQENYRQNYQRVAAAA

SEQ ID NO: 514147 - protein, 376 aa, unidentified
MERGSLMLNTTTFVGLDVHARSIKAVALDAMTGEVRSATFAYDAAAVAEWVRSLDPAAKCVYESGVTGFDLQKRLAALGVDCVVGAVSKMIKPSADRKRKNDRNDAEFLARMLSVGNVVEVWVPDDECEAARDLVRALDDAREDLKRCKQRLSKFLMRHGYAFSETTPTGRRKGNWTAAHWAWIRSISFPEKADGDALAYYVDAVRQAMEDKARLEKLVEAEASKPRWKRRIDSVRCLKGIDVTSAADLVFEAGEFSRFKNARSFAAWLGLTPSEHSSGESVRQGGITKAGNKHLRRVLVESAWHYLGCSPHSKDLAKGQVPDPAARRHAAKGVRRLVERRRAMLERGVHKNKANVATARELACWCWAVGRMVENG

SEQ ID NO: 514148 - protein, 409 aa, unidentified
MQVVHEVCCGLDVHKKSVTACVLWASGRRKQIRAFGTFTRELLELGDWLRACGVTHVAMESTGVYWKPVWNLLEGQFEVLLVNAQHIKAVPGRKTDQKDSEWIADLLQHGLLRASFVPPTPIRELRDLTRYRASLAQEINRIANRIQKVLEDANIKLASVATDTLGASGRAMLEAIIHGEQDSQRLAEMSRGLLRNKIPELRQALEGRVTAHHRFLLRELLDHHYFVESKMQRIEQEVAERLGPFQSEVARLCTIPGVDRVTAWGLLAEIGLNMNQFPDAQHLASWAGLCPGSHESAGKRKSGKIRKGSLWLRRCLCQGAWAVSTKKNNYLSALYRRLAARRGTKRATIAVAHNLLVIAYYILRDGTCYRDLGPDYFDRLNPEGLRRRLTKRLEGLGFKVTLEPLAQVA

SEQ ID NO: 514149 - protein, 464 aa, unidentified
MPSKKTPKKRALDELACVFPNAAGLDIGSAEIVAAVPPDRDAEPVRVFATFTPDLHALVAWLVACGIDTVAMESTGVFWIPIYELLEAAGITPYLVNARHVKTVPGRKTDWNDAQWLQKLHALGLLQASFRPDAEIRTLRTLVRYRAELIERRAPHINHMIQALKHMNIQLSLVLTDITGKSGMAMLRAIIAGERDPQQLAQFRESGCKHSEAEITKAVTGTWDDAQLFILQQAVEIFDYYTAKITACDDKLEQQYQAMESRAEKDAPLPDLPPAKKDSRSKNALRFNARAQIARVVGVDLVAVMGLSAVTVQTIISEIGTDMECFPTLKHFCSWLGLAPHNDKSGGKVVRSRTMKVRNRANQAFRQAAQSVAQSDSSFGAYYRAMRARLGPKQAIVATAHKIARTVYHVLKTREPYREETAAEYDRKRRERELKHLARRAQKLGYTLTAVPDRTSESQPEPAG

SEQ ID NO: 514150 - protein, 340 aa, unidentified
MSEITTIGLDLAKHVFQAHGIDAEGTTVLRKRLRRGQVLAFFSRIPRCVVGLEACATAHYWARELGALGHEVRLMPAQYVKAYIKRNKHDAADAEAICEAVQRPTMRFVPVKTTEQQATALLHRGREQLVRQRTMLVNALRAHLAEFGMVAAQGLRNVGELIAIVRDDGDTRLPDVARQVLQVLAAQLEQIEAAIAALEKQLMAWHKTNAVSQRLASIPGIGPIIATAIATTVADPGVFRSGREFAAWLGLVPRQNSTGGKTRLGGITKRGNRYLRRLLINGASANLLRSKATKADPWVIGIRRRRPPLVVAVALANKTARIAWAVMLRQKEYQPRALAA

SEQ ID NO: 514151 - protein, 380 aa, unidentified
MEKVCGLDVHKDSVFACILDEQGKKILEKRYRTLTPDLTTLREALIEQGCGSVAMESTSIYWIPVWHVLESDFSLKLANPYFIKQLPGRKSDVKDAQWIAECLQKDLIKGSFVPEGILQQMRQVSRQLRRLSKSITRVKQQMDNQLQRCNIRFSNYVSNQGNNVSLRKIVDALIAGERDPSRLVRLVHGRTKNKHGHQVIAASMEGVINPTDIEMLKGCMEQINLFEKQQAACLNHLEELADAYFAGEISLLCTIPGIQKYSAMCILSEIGNDMSVFGKASHLVGWAGLRPRNDESAGKIQSRKTMHGNKYLRQMLVEVSWSAARSKKTFLGKKYYLLSKRMKSQKALLSITRKILVIIFNVLQTGQPFDANRNLQDVKA

SEQ ID NO: 514152 - protein, 409 aa, unidentified
MLKIVYPNCCGIDVHKTFVVAVIAITNNQGITEYHCKRFSTFTNGLTQLRDWLEYYSCFDVCMESTGKYWIPVFNILEEQTNVCLAHPKYVKAIRGKKTDKKDAQWIADLFKHDLVASSFIPPLKIRQLRDLFRYRMKLTQLQVGEKNRYQNCLTWSNLQIASVVSDVFGKSAQAIIKSILDNPQDKPNIEQLVHKRMKNKVQDLEIAMEGALTPEQAEKIRVIKAHYDALAICKEDLEQMIRELGQDYQHQVKLIQTVPGFKEDLSALRIISEIGCDMTVFDSAAKLCSWAGLVPANNESAGKKFSTRISKGGKYLKPFLVQVANAVVKSDKHPELRNKYLKLKKRRGHRKAISAICRRLLVSVYQVLRKQEDYNPVLQGLTEIRNPDKTMSVQDAVRFAQQHGFNVA

SEQ ID NO: 514153 - protein, 424 aa, unidentified
MNLTQNDRLKQVTSDTLIVGVDVGSQTHFCRAFDWRGFELSRRVFKFSNTGMGFLTFLRWTEELMNKTEMKKVIVGCEPTGCYWLTFQKFLQDHDVQLVTVNPFTVNRSMELDDNSPEKSDLKDPKTIALLVKDGRFSTSYLPSGVYAEIREASVCRDQIMKQHVRLSNQIQGWLQKFFPEYFECYADWDSTSGLMLLREAPLPQDILKIGAGGINQIWRDAKVRAAGIKRAQTLVEAAQNSVGLEAGEAARLEIWVLVNDYILKAEQLKRLDEYLEEKVKEVPNVEKLLAIKGVGMSTVIGFIAEVGDIGRFTDPKQIQKLAGLEIVKKSSGKKKGQPRISKRGRRKLRRTMYESARALMTWNPAFQDVFLYYRNRTKKPLGGMQAKIAVACKAIRIFYVVLKTGCDFDEEKFRKDIIRPEAA

SEQ ID NO: 514154 - protein, 466 aa, unidentified
MRTIGLDLAVRAAHKAVVLDERGHFCTPIITVHTQPSELDHLLIRAREGAPSDEVQIVMEPTGMAWFPIAVYYARQGVASYLVNSQEVADLRRYYKRHAKSDRIDARVLARLPLVNPDKLHRLVLPAATAFACQRACKQLDHLATQITAIKNRLQAIDRFAWPGLEEQVFADPFAPAARFFREHWYDPRQVVQVGAELIGQQWEASALNASDGGAWVDPLVALAQQVLTLYGADGQYLDFGQLQAEVQRDQVWLTWLEQQHHTLRLRTVRPLYRAVHPSRNLETLKGVGQDSAAVYASFIGDPRRFSSTRLFRGWTGMVPNSEQSAENEAKGLHLSQAGPDLIKKYAYLDAEIARRYDPQIAAIYYDQMMRKGKHHKQAVCACATHLLDRVLAVLRSDKPYEMRDSDGTAISDQQARAIIVERYSVPQEVRRRTNKRNRRQQADQRAERRARREPGRQPLLEGQLS

SEQ ID NO: 514155 - protein, 341 aa, unidentified
MGVKKYWVGIDLHRNQFTYCVRYSDGKELVGKESMTNLERFARRLGKHSEVAVEATGNTWMFCQVLKKHAGRLVVVNPNQFKVISHSVKKTDKNDAKVLAEFLEKDLLPEVRMKDELQAKIASLTQTREKLVQLRTVLKNKINNLFASRFILLKREELSSEKGLLKVLSYHFDSVSDVELRVMVDQIRSLNKSIEELDKAIEDNGSKMDGFDNLKSVKGIGAKGAATLLSVIGDINDFRSAKQLAAYIGIVPRVSDSNETVHHGRITKLGSKIARTTLVQCALIAKRYNAYLFNFHEGIKARRGGAKANIALARKFLEIIYRILKNKWIFEDFTQFKLKTA

SEQ ID NO: 514156 - protein, 452 aa, unidentified
MQVLHPCCAGLDVHKKSVTGCVIHTLDDGTDRRDIRTFGTATCDLLRLCDWLTQAGCTCVAMESTGVYWKPVYNILEGSFELLLANARHIKNVPGRKTDVKDAEWVAELLRHGLLRPSFVPARPQRELRELTRQRSKLVADRAHVVSRLHKVLEDANIKLASVATDVTGVSARDMLAALIDGKADPQSMAALARGRMRGKREALAQALTGYVRDHHRFLLIHQLEQIDFLEEQIQAYSQEIVRHMREMDAADQAAAASALEASGLLSMPDLLPVATDTMPPPTWAEAVTLVDTVLGLDQRAAECVLAEIGTDMSRFATHKHIASWGGQAPGNNVSAGKRRSGKTTPGNKPLGAILNQAAWATVRSPDSYFAAVYHRLAPRLGKKRAIVAVSHRILIAIYYVLKNRQPFQDKGARYFDERAREQVVTRLVTRLYKMGYAAHLEPVQTVTTAAA

SEQ ID NO: 514157 - protein, 361 aa, unidentified
MAKARTLVGLDVHAARIVAAVLDAETGEVQWFRLGGDIVEAAGLCAGLPRPVRATYEAGPTGYGLARELGRRGVACVVAAPSKIPRASGERVKTDRRDAEHLVRLLLAGKLHAVRVPGAEEEALRDLVRAREAVRVDLMRCRHRLSKLLLRRGIRFQDGRAWTERHRAWLAGIDLGHDAAQATLADAIGAVDALVHRRDGLEREILAQLGDSPWETQITRLRCLRGIDTLTAAGLCAEIGDFERFARAEQLMHYVGLVPSEDSTGEQRRRGTITKTGSGHARRLLVEAAWHYRKRPAISKALHDRHDRQPAHAIAIAWTAQQRLHRTWQRLEQRGKRRTIIAVAAARELAGFCWAITTRTE

SEQ ID NO: 514158 - protein, 356 aa, unidentified
MIKRNKLDFTGQPIYIGMDVHKKSWSVSISTKYGQYKTFSQPPEVDKLVHYLRHHFPGAQYYSTYEAGYCGFWIHDRLREKGIGCLVVNPADVPTKNKERKTKRDRIDCRKLSRSLRNGDLEGIYVPPRGKVEDRSLIRTRLSMVRKQTRCKNQIKSMLLFYGVVIPEEKEMGHWSRRFIRWIEGIRMERASGDMALQIHLEELCHLRQIIAKLNRAILALSRTEEYRSWVLLLRTVPGISTLTAMILLTEIGEISRFPSIDELTSYVGLIPDTDASGEKEHIGGITQRSHPQLRWVLIEASWRAVQKDPALMIAFGQYCKRMRKTKAIVKIARKLLNRIRYVLKNRSEYVPAVLE

SEQ ID NO: 514159 - protein, 370 aa, unidentified
MLDTTTFVGLDVHARSIKAVSLDVMTGEVRCATFGYDAGAVAAWVRSVDPKARCVYESGVTGFDLQKRLSGLGVDCAVGAVSKMIKPSADRRRKNDRNDAEFLARMLSVGNVVEVWVPDDECEAARDLTRALEDARDDLSRSKQRLSKFLLRHGLVFDERTPTGRRKGNWTRAHWSWIESIRFAEGADNEVLAYYVDAVRRAAEEKARLEGLVGAEARKPRWRRRVDSLRCLKGVDTASAADLVFEAGEFSRFRNARSFAAWVGLTPSEHSSGESDRRGAITKAGNKHLRKTLVEAAWHYLTCSGRPKDLARGQAPDPAARRHAAKGVRRLVDRREALLARGVHGNKANVATARELACWVWAVGLMAEEA

SEQ ID NO: 514160 - protein, 400 aa, unidentified
MRTVFGIDVSKASSEVAIVINGEKIHGYTMPNDTIGFTRLLDDLKTVQKPEIIFEARGVYSHRLQAFLEENGYAYTQLNPLEAKKQLDSLRVRKTDKIDAETLAISQFVLNRKPTYIQEEVYQELRDLSRFYQNLTEDIVRTKNRLHKVLQVTFPEMENILSTPTREQYWNLVMTFPYKDFVLELSKDELLEGIRQSTSKRISDKRVAYLAQKLAALANQSYCAVKKNSPILEEVRYYAKELLRLSEQRQAVLEQMVELAQPLPEYEILLSIPGIAETTATSMIGELGDIRRFQSANQINAFIGIDLRHYESGNFLVKEHITKRGNPYARKILFKCIHNIAAASHTNHCHIEDFYEKRKRQSQTTSTKPHTIASIHRLIRTMYYLITHNKLYDYTSTQNR

SEQ ID NO: 514161 - protein, 253 aa, unidentified
MGDKIGLGLDVAKSTIEVCALRNKVKRGDRTVIDNSIAGGQKLLTWLHGTDLSDVHVYLEPTGKYSRVIAAFLHEAGLKVSQVNSYAVLNHGRSKNYRSKTDRIDAYLLADYCLKENPPIWEPPAPSQAELSEIQARIDELGETLIQEGNRLAAGGISSLVQLDIKEHIAHLLVRKESLEKAAKDLVHADALLAANFKIIHSIIGLGDKSSLALLSAVRFDRFPKARSVGCFAGLTPRRYQSGEVDPIVRAGN

SEQ ID NO: 514162 - protein, 370 aa, unidentified
MLDTTIFVGLDVHARSIKAVFLDVMTGEVRCATFGYDAGAVAEWVRSVDPKAKCVYESGVTGFDLQKRLSGLGVDCVVGAVSKMIKPSADRRRKNDRNDAEFLARMLSVGNVVEVWVPDDECEAARDLTRALEDARDDLSRSKQRLSKFLLRHGLVFDERTPTGRRKGNWTRAHWSWIESIRFAEGADNEALAYYVDAVRRAAEDKARLEGLVEAETRKPRWRKRVDSLRCLKGVDTATAADLVFEAGEFSRFRNARSFAAWVGLTPSEHSSGESDRRGAITKAGNKHLRKALVEAAWHYLTCSARPKEPARGQAPDPGARRHAAKGVRRLVERRGALLARGVHNNKANVATARELACWVWAVGLMAEEA

SEQ ID NO: 514163 - protein, 347 aa, unidentified
MKQVTYVGLDVHKKSITAVFGPVKSKPDSMKVTNDPKGWNRLAERLKTCDGQAVYEASSCGFEVYDEMTSRGWSVVVVAPSLLPKSAKEKKNKTDVKDATELRSRLVAHREAGASLPTVWVPPAVVREDRELVRRRLGLGEKAAGIKTEILSLLQIHKVRSVEGTAWTKAHVGELWALCGEMSGLGAPVKRALESQLRELEFLMAETARVEKEVEALAQEARHHAQVRELRKVKGVGTLTAMTFLTELGDASRFSNRRRLANYLGLTPSSYESGEAADRKGHITRQGPPRIRKILNQAVWSRVRWSPEAKERFGRLAARTGVKKAIVAEMRKLGIELWHRAVASIAA

SEQ ID NO: 514164 - protein, 438 aa, unidentified
MSNKVIFNLDELFISVGIDVGADFSWMSIALPNQQFVGKPYKILHNNMHSLTTAVSKIKEAEELYSLESRIFLESTGIYHYPLFCYLRDKGFNCSVINPIITKNSTNINIRKVHNDRFDSKKAALVGLKPDLKVSLMPSDLALNCRNLCREYYDLMDNRSAYVNKLLGELRMAFPQYLGIFSKVTINTSLTLLETYTSPSAFLEADKQEIIDVIKSTARFGLTYAENKYNAIIQAANDAHEFGYIIDSNIIRIRLYIGFIRKYDEEIAGIIEALHELVGSNQDTDFVKQIHLIETFKGAGFLSAVSLMGEIGDFSAFSKPKQLFAYFGLDPAVKQSGKFEGTKVQMSKRGSAIARRVIHTLTLQSISTSRNGEPKNPVLRDYYLKKCESKPKLVAMGAVSHKVCNMIFAILRDNKPFEIITPQEHIKQYNAAKCDIAA

SEQ ID NO: 514165 - protein, 376 aa, unidentified
MREKLRFLGMDVHAETIAVAVAEPDGEVRSLGTIANREDSIRKFIHKLGSPEQLRACYEAGPTGFVLYWQLTQLGVKCDVIAPSLVPKKPGDRVKTDRRDALKLARSHRSDDLTAVWVPDEASEALRDLVRAREAAKQDQLRAQHRLTKFLLRSGRRPPLGVKAWTERYAEWLQQVRYAHPAQEATLLDCLHEVQHMAERVRRLEKSIVEVVQLAPASMQEVIRGLQALRGIAHLSAVTIAVELGNITSRFEGARDLMGYSGAFPSEDSSGKRIRRGGITKSGNAHLRRIVVESAWSYRHRPAIGARLRKRQEGLPAEITAIAWKAQNRLHKRYMTLMARGKEQRKTMTAIARELLGFIWAIGIKAEASCKQQMAA

SEQ ID NO: 514166 - protein, 332 aa, unidentified
MNLVSTLGIDLAKSTFSLHGVNSNGEVVLRRSLCRAKLVELVAQLPPCLIGMEACSGAHEWARRFSASGHTVRLMAAKFVTPYRKSGKNDGNDAEAICEAVARPNMRFVPVKSLEQQSDLTLHRVRQGFVEERTATLNRLRGLLAEFGHVLPVRAVEVHRRVPLLLDKLPTRVAVCARDLLEHAAQLAAKTQEYEHEIRAHVRSNALAARTQTRMGIGPITASALVATVGNGRDFKNGRQFAAWLGLVPRQYSTGGKARLGPITKRGDAYLRTLLVMGARAVLQRAASLTDPLSLWALALRERRGYHRACVAIAAKNARVAWALLSKEPAVA

SEQ ID NO: 514167 - protein, 426 aa, unidentified
MFAESEDDEQIIERVAALDIGKAEVVCCVRLPAPGGGKRRVQEVTTHSTMVGSLSELANRLVELRVERVVMEATSDYWRPPFYLFEAHGLDPWLVNAKDVKHLPGRPKTDVLDSVWLCKVAERQMLRPSFVPPHEIRRLRDLTRYRADLVGVRTAEKNRVEKLLEDACIKLSVVASDIFGVSGRDMLAAMIAGERDPKRLADLARSRMRPKIGLLEEAFAGLKVGTFSDHHRFLLARMLARIDQADADIAALDTQIEDHLAPFADAVARLDEIPGIGPTAAAVIIAEIGTDMTRFPTPGHLASWAKFSPGIKSSAGKSKGNGATGHGNRYLARVLGEAAAGAGRTDTFLGARYRRIMRRRGKKKAIVAVGRSILTIVWHLLADSEARFEDLGPDHYDRRVSTTAKKRSHIRGLEALGYRVTLEPAA

SEQ ID NO: 514168 - protein, 314 aa, unidentified
MYKRQHDGSTQLVKRICSALTSESLDTVSIGLEATSVYGDNLVYFLREDASLASFNRKIHVLNPKQVNKFKESYNDLPKNDWIDSFVIADCLRFGRINKEVYIGDYHSKALQNLTRARYFAVCNLTKEEQRFMNVLFKKYSTMTQEKVFSDTFSTTALAVYDEFESTEALAYMDLQELTAFIIKKGKNRFPDPDAVAKAIQKAARSSYRLPKTVNDSVNQVLSISITSMKALESQIKEFDKAIATQMELLPNVLISIPGIGPVYSAGIMAEIGDINRFNNQAALAKYAGLAWTQHQSGGFEAQNTRLIHSGNRF

SEQ ID NO: 514169 - protein, 351 aa, unidentified
MNTVTIGMDLGDKKHALCILDKEGNVIKQTTITNTSDELKKFFAKYKGAIIALEAGTHSPWISRQLVAMGCNVLVGNPRKLRVIWDSNDKSDNRDAKMLARIARFDPELLYPINHRGEQAQVDLELLQARDILVRNRSRIINHVRSSVKSLGGRLPKCSAECFHRKAGKHLPEELCDILKPLLKIIEQLTVQIKTFDRQVEEISRERYPETELLRAINGVGPLTSLAFILTLEDPTRFDKSRQVGNFLGLTPRRDQSGQVDKQLRITKAGNPYLRRLLVSAGQYILGPFGEQCDLRRFGKRLAARGGKNAKKRAVIAVARKLSVLMHRLWLHGEIYDPNYSVNSRVLAKAA

SEQ ID NO: 514170 - protein, 343 aa, unidentified
MWYVGLDIGLRWHYVVVMDAAGQIAQQERLAHDPGVLQRFFEALEGPVRVVLEATGHWVAVYERIEPYVQEVVLAHPLKVRAIASARIKTDRIDATTLAHLLRTDLIPRAYIPPRPVRAWRELVRHRAFLVRMQTRVKNRVHSLVAKQGLTPPAVSDLFGTAGRAWLAQVALAEPYGAMRTRYLAVLAHLREQLRDVERTIDATATPLPEAQLLETVPGLGRYLALLVLAEVGEIARFPGPKQLVSYAGLCPSTYASGQVLRHGRLTHQGSPWLRWALIEAATHVGRRPTSRLARRFHRLAQRRDAKTARVAVARDLCHVIFHMLTKQEPYREPSSALMIPGR

SEQ ID NO: 514171 - protein, 445 aa, unidentified
MPQFIGLDIHKTVVVGCTVDAHGTVCRRQRFPLTRTTLTAWASQLTAEDAVAVEATTNTWAVIAILQQTPARLVVSNPLRTRAIATAKIKTDRVDAEVLAQLLRCAYLPPVWIPDPATLAARRLTTRRTVLVAERTRLKNRLHSVLHQLLLPCPVTDLFSRAGVAWLAAVELPAAERAAVDADCRLLAAVDQELTALEQTQVEAAGEDPRVRLLLTLPGIDVAVATALLAAIGEVSRFPTPAQLAAYLGLVPSVRQSAHHCYTGHITKQGASHVRWLLVQAAQHLDRHPGPLGAFVRKLQRRKNRSIAIVAAARKLVTLAWHVLRTGAPYRYALPRATQEKLARLRRRATGERRRSGPAPGTPRAPAYGTGQRSRGIPALATVYRQEGLPVLSPIPMAEARVLAIDPAVHQFVTSLDVAHRHPRRARRASDSEPETRDRQRVQPG

SEQ ID NO: 514172 - protein, 350 aa, unidentified
MLIIGCDYHPGFQQIAFVDTETGECGERRLRHREEAEQFYRMLKERSLRVRVGMEASGHARWFERLLSELQFELWIGDAAEIRTKRVRKQKTDRQDAQLLLRLMVEDRFPRIWVADAENRDLRQLLWHRHRLVQMRTRVMNQLHVVALNEGLRRKKALWRPEGRNQLQSLKLAPWASRRRQDLLDLLDQLTPKIQELTRALEAEVEKRPVTRRLMTHPGVGPLTALAFELVIGTAERFDCGKQIASYVGLVPTEESSGDRRRLGHISKQGNTLLRFLLVEAAQVTVRSSPQWRSKFFHLAMRRGRKIAKVAMARKLAVHLYWMWRQGWDYGQLEKLGSHAGEPGNPHGAQ

SEQ ID NO: 514173 - protein, 402 aa, unidentified
MNSVGIDVSKGKSMIAVMRPFGEVVVSPFEIHHTDNELCELTKLLSGLSGETRVVMESTGNYHLPVAWLLNDSGFYVSVVNAMLVHDYGNNSLRRAKTDKKDAIKLANYGLDHWLTLPRYVPEEDTRLMLKNCYRQYQQYSKVRTMLKNNLISLLDTAFPGANRLFSSPPRADGSEKWVDFVAAFWHCECVCGLSEKAFISKYQKWCKKCSYNFSEDKALDIYASACGHFSVMPKTDTAKLLVEQAVSQLRATSAALAALKLEMQSLASSLLEYPMVMRMFGVGPALGPQLMAEIGDVRRFHSKKALVAFAGIDAPPYQSGQMDIYSRSISKRGSASLRRTLFLLMGVYLQNAPVNEPVYQFMDKKRSEGKPYKVYMMASANKFLRIYYASVKAYLDALDEA

SEQ ID NO: 514174 - protein, 344 aa, unidentified
MDHFAGLDVSVKETSICIVDDTGKIVRELKVASEPEALLAVLKNPAYNFKRIGLEAGPLSQWLFGALAEAELPVVCVETRHMQAVLKAQINKTDRNDARGIAQMMRVGLFRPVHVKTIRSQKLRMLLTHRQLLQSKAIAIENDLRATLRNFGLKVGMVGKVRFEARIKELVENLPDLAALVEPLLIVRRVLREQMVILHRRLLAVVRDDEVCRRLMTVPGVGPVVSLTYRATVDAPARFRKSKAVGAVFGLTCSKYQSGEIDRSGRISRCGDEMMRVMLYEAAQSMLRSKKWSWLKAWAMQIARRRGMKKAIVALARRLAVIMHRIWVDGTEFRWTREQVPAAA

SEQ ID NO: 514175 - protein, 317 aa, unidentified
MFMDDSINLCVGLDVSKDSLDGHQLPEGRWFTVPNTAKGHAALLAQLPAPGTCRIVLEATGAYERRVVGELVAAGHFVSVVNPRQVRDFAKAHGILAKTDRIDARVIARFARDVKPRPVAKTSEKQGELDQLVTRRRQLIHLRTAESNRLQDGLAKLVRRSVQRSIDAIGKDITRLDRAILKLVESDDDWKQRFELLKTVPGVGDVTAATLVAELPELGKLNRQEISALVGVAPFPDDSGNRTGKRFVRGGRKSLRCALYMAALVGMRHNPVLQQFSERLKAAGKVPKVILTACMRKLLVIINTMVKTNTHWNLRHA

SEQ ID NO: 514176 - protein, 387 aa, unidentified
MYYIGIDISKYKHDCAVIDDLGDIVAPSWSFTNDCEGFSLFKQLLDNLEGEKRIGFESTGHYGQNLKLFLESNNFTFMEFNPLLISRFVRSKSLRNTKTDSIDALSIARYVMTVEYKPYPPSFYHLDKLKSLTRFRDSLVRQRSRQLVELTNVLDKVFPEFKPFFKGRFSATALYILAHYQTPEKIANMNAGSYEPLRKLSRGRFFMSDFVQLKALAKNTVGVSIDYLLDQMNTLLEIYTQMDSRVDELDAQIKECVRGIDPPILSLPGIGELSAAVILSEFGDFSKFDSPSKMLSFAGLEPGYYQSGQSEHTGHMVKHGSSQLRYALMNCCLPLVPNEPTFAEYYAKKRAEGKPHRVAMTHVAKKLLRVIYTLQTKDILYDPSLLR

SEQ ID NO: 514177 - protein, 420 aa, unidentified
MTRIQTKKTQVVNHKSLIVAVDIGKRTNMGYYRFSHNRRAKPFPFGNHAHGFGLFWDRISQVQRQNQLEEIVVGFESTGSYGVPLVHFLKEKGVKLVQVNPMHTKRLKELTSNSPNKTDRKDPKVIADIMELGHALTVIVPEGSAAELRRLTQARERSVRRRTGLLNQLQDLVFLVFPEFLTVMKGVKSKTARYLLNRYSTPGDLVACGDLDLLCSRVKKISRGMIGRERIEPLYLSACSSVGIQEGRNSLVLEIREVLSWIELVDGFIAQLEERMGFHLQQIPYSSSILSIKGVGPITAAGLIGEVGDFGYFRTIPEMEKLAGLDLFEISSGLHKGRRRISKRGRPLLRKLLYFGAVNVVRTGGILHGWYHRALERGMPKTKALVAVARKLLRIVFAVVRDHREFISDYRNQPGLRMTA

SEQ ID NO: 514178 - protein, 342 aa, unidentified
MDHSAGLDVAVKETSVCIVDETGRIVREVKVASEPEELLAVLMNPAYHFKRIGLEAGPLSQWLYSALAEAGLPVICVETRHMRAVLKAQINKTDRNDARGIAQMMRVGLYRPVHVKTLRSQKLRMLLTHRKLLQSKAIAIDNDLRGTLRNFGLKVGMVGKVRFEARIKELVENIPDLAVLVEPLLIVRRVLREQFVIQHRRLLAIVRDDEVCRRLMTVPGVGPVVSLTYRATVDVPARFHKSKSVGAVFGLTCAKYQSGEVEWSGRISRCGDEMMRVMLYEAAQSMLRSKKWSWLKAWAMQIARRRGMKKAIVALARRLAVIMHRIWVDGTEFRWTREVAAA

SEQ ID NO: 514179 - protein, 349 aa, unidentified
MKKVVKQVVGIDVAQDELVVCLGKIYDDWSPTLEAHKTFTNKQKGFEGLIAWVAKLTESDIPVRYVMEATGVYHEPFAYFLFEQNQEVSIVLPNKISSFFRTLETRTITDKTASEAIAMFGLEKKIDRWEPPKGIYKRIQQLTRERGQLVDESTVILNQIHAEKAGAFPNKMSLQRAQKRLDLLKKQVAEIMKEINVLIKADEEVQRNVLLICSISGIGQLTAATILGETNGFNLIRNKKQLTSYAGLDVREKQSGTSVKGKSSISKRGNKLLRKAMHLPALSALQRNERFKAIFIRIVSKTGLKMKGVVAIQRKLLELSFTVYKTQTPYDKDYFKRNELINEVENISI

SEQ ID NO: 514180 - protein, 337 aa, unidentified
MTRIICGVDVASKSLEARIGQQGAASSFINDPEGIAALGAFCLTYQVELVAMEATGGYEQQAFAQLSGQGLAVAILNPRAVRQFAQSMGSLEKTDAIDAGMIAWYAEVKKSQPVCLAPENQQHLRALVTRLRQLTSMRVVQLNQQRLVSDRKVQASFKKLLALLAHQIGELEKSIAVLLEKDPLWRELDQAFRAIKGVADRTVARLMAEMPGSPATGLRRWGGMPEIGTLSNKTISKLAGVAPLANDSGKHQGKCSVRGGRAAVREILFIVASVVGRYEPDFIAFRERLRAAGKPPKVVRIALAHKLLVRLNAKAREVRQRLTAVQMQPIALPAGCL

SEQ ID NO: 514181 - protein, 475 aa, unidentified
MGKIKHIKASKRTELQEKLRDIPYDKVLVVAIDPAKYSPKALICNYFGEILVNPFFFTINSKGLILLLTKIQETVNNISAQKVLVCIETTGHYHEIIVRYLQEFDYEILLINAYTTSESRAENLNWSKTDDIDLFAIASALIDGKTTKSRLLDGNYEKLKDLCRYRRYEVQKRSAIKSKIRVLMDKIWPNFQGKGKIVNGTGKVEKIFSKFWGKAPLFIMKNYPHPSLIKKFNKTDLREISRKNNLKFRTSTIEKLLLAAENAYTRPYKELEVEIELLTMTIADYENANQKIELLRDKIENILVQNPGLLLLSAPEIGVVTAAEFSAEMGPVTQYDYAGQVIKTAGTNPLVKESGGKKARYGSISKQGNPQFRHIVYLIGRNLAIGKTNLYFKSYADRLRKKNKNSKKIYIAVGNKFIKVAFAMLRDHKLFDPPMWKGESLTSNIFDKIDSPENKEIALKTLENYLGVNSSKLAG

SEQ ID NO: 514182 - protein, 341 aa, unidentified
MFYIGCDVSEKSSYVYITDGKGRKVEGHEIPTDKDGYRQYFKKWVGKHVKVAVEAGGHSRWIHDTLKKMAISVYIVNPNKVKLIAKNKKKTDKVDATFLAKLLRIDELPERVYVAEGDSRELRDLLRSRHQLVTSATCLMNHLWGMLRQEGIKLKAKAFNDESTFSRLLTNKSVPEHLHPIITSYEKTIAELRNQRGTLDDVIAEYGNKDIDLLKSVPGIGEVASKTTYAAISTVTRFKRAKQLTSYCGLVPSVFSSGERANYGHITREGRSEVRHVAVQGVRAILRSTNSESKPLRKWYERIAKRRGSKTAVVALARKLIEIIFYVLRDRKPYNAQLLHV

SEQ ID NO: 514183 - protein, 469 aa, unidentified
MANGQNSKRNAKRADRAFPLALPVLRARVAGIDIGSREHWVSGPRREDGQPNVRTFGTTTPQLERLADWLAEQGVESVAMESTSVYWIPVYELLESRGFEVLLVNARQLHNVPGRKTDMLDCQWIQLLHSCGLLRGSFRPADAICRLRGLQRQRENLVREQTKSIQWLQKALDQMNIQVHHAVADITGKTGLAIIRAIVAGERDPKKLAALRDRRCRKSEPQIAECLTGNWRDDHLYNLAMALRLYDTLQEMITAYDKRLEQELDTQLAPDHHDTPVPPHPKSSKERAIERRNEQSLRSHLWRFAGVDLTRIDGLSAPSACTVLAEIGPDLSRFPTEDHFVSWLRLAPKTGYSAGKPVKKTRNAMGATRVALVLRMAAQSVQRSKSAIGAFFRHVARAKGYSVAIFATARKLAQHIYRMLRHGQDYVDIGQEAYEAQFTKRRIAGITTAARDLGYNLVPIPKAATEVSG

SEQ ID NO: 514184 - protein, 460 aa, unidentified
MNRKKSKSRVDRTMPMMHPNAAAIDVGATLHMAAVRADRATEPVRSFGTFTTDLHRLVDWFTECGVETVVMESTSVYWIPIFELLDARGFTVFLVNARDAKHVPGRKTDVSDAQWLQRLHSYGLLRASFRPKGQIAELRAYVRQRERLLEYAASHIQHMQKALTEMNLQLHHVVADITGSTGLRIIRAILAGERDPEVLACLRHYSCHSSAETIAKALTGSYRTEHLFALEQALALYDAYHEKASACDVRIEAVLKELCIHRGRGIGSVAPAPRRRHRTDQANALAFDVRAALFALLGKDITTIDGLGPYLSLKLVAECGDDLSSWPSAKHFTSWLGLAPSNKVSGGKMLSSRTRRSGGRAAALLRLAAVTVGRTDTALGAFYRRLSSRIGKAKAVTATARKVAVLFYNAVRHGMEYVDPGASSYETRYRTRVVNNLHRRAKAFGFVLQPLEPKAGAVVS

SEQ ID NO: 514185 - protein, 411 aa, unidentified
MRTNTCGKLSQLLNIFERWFSHMYSYFVGIDIAKNTHWASCLSSDGEIILEPFSFSNDNSGFQKFISKLESLDKTKILIGLESTAHYGENIISYLFNLDYNIGLINPIQTANLRRSNIRKTKNDKVDTKTIIKALTLGNYSLITSRDINNLKLKGLCRSRRNLVTMRSKAKIQLVSYLDQIFPELAQFFKGNLHLNVSYQLLKEYSSPKQISSLHLTKLSNILHDNSHGRYNKQDAIRLRELAKNSVGIDNPSLSLQIKHSILQIELYNEQIAEVEALYKQILDEMNTPILSIPGMSYNQAAVIIGCIGDINRFEHSCQLLAYAGLDPSVIQSGNFQARSTRMSKRGSGMLRYSLVYSAHNVVKNNKTFRDYYELKRSQGKSHYCALGHVAHKLVRIIFKMLKDNVAFNLD

SEQ ID NO: 514186 - protein, 349 aa, unidentified
MNNFKYHLGIDLHKNTSFWTLLDHDRRKLYSRNLPTSVEGIEKGLQEMSIDPKEVEAAIEPVSQWGWYGDLLAEKGLTVRLVDVYKTKLIAGTKLKNDRVDSMALAELLRSDFLPCAYRAPEETRDQREFMRHRAFLVRLRAKVRGRVHQILWKHGVINPHSDIFGLKAKQWLLSLSLRSPYNTERDELVSMWQDLSERIEKHNISCKEMVGRSAHASLLQSIPGVGVITSLTIMAEVGDFSRFKRPEQLASYAGLVSSSYSSGERTRLGHITHRGSVWLRTALVEATNTVNPKWGGLYDFYLRIKEKKGSKVARVALARKMLVVSWHLITKDQYWRKEKVGHSESVKR

SEQ ID NO: 514187 - protein, 323 aa, unidentified
MIHSFHLGIDVAKAKLDCALRQPDGKIRHRVVDNTPAGFSALDVWLAKQGADAMHVCMEATGTYWEAVAEHLAARPDCRVSVINPAQIKAFGASQLIRTKTDKVDAKLIAQFGAERRPDPWVPATPAEQALRALVLRLDALQSMRIQESNRLEVARPTVRDGIVSHLKWLDEEIERVIKAIREHIDSDPSLRDKQRLLDSVPGLGERTIAVLLAFAAEPARFETARQLTAFAGLDPRQHESGSSVKGKPRLSKVGHAFLRKALYMPAMVALYRTDWGKLFRDRLAARGKPPKLVIGAMMRKLIHVAYGVLKSGKTFQPELHRA

SEQ ID NO: 514188 - protein, 339 aa, unidentified
MSEREYVGIDLHRRRSVIVRVDQQGNHLSTVRLANNPAEVMAAVDAAGPNPEVVVEATFGWYWLVDLLQGMGCSVHLASPSQLNWGNRRVKNDERDALDLVRKLRLGELPEAWIAPPEVRQLRELVRYRAKSVRLRSGLKAQVHGVMGKEGILPGLGDMFGPGGQKLLDAMDMADNYITRVESLRDLIEIYDREITMLDRQIHQQLKDHPGYQAIQAIPGVGRVIGAIMVAEIGDVSRFASAEKLCSWAGLTPKHYESDTKVVRGRVTKQGSKLLRWAAIEAVSANHGGTRLQADYHRIADRRGKKKARVAVARRLLTLVFYGLRDGTIRSLQSDQDAA

SEQ ID NO: 514189 - protein, 360 aa, unidentified
MRIIGCDLHARQQTLAMLDTISGEVVNRTLMHEGSEVREFYSELPRPVLVGIEAIGPMQWFLNLLEELGIACQVGDAAKIRAAEPRKQKHDRRDAELILRLLVEKRFPEIWKPHKELLDLRALLLHRHQWVRLRTQIQNALQAIALANGLRRGPSLWGNDGQAKIAFLPLPPHASYRRSALQATYRKMQEEIENLTDQVAEQAGQRCGARLLMTHPGVGPVTALATDVFLGDAQRFPDGKALASYVGLIPREYSSGERPRLGAITKQGSPLLRFLWNEAGAHAARRDPELRRFYRRKLVQKGLGKARVAVARKLGIRLWIMLRDEIDYQEFCRRGQKQSGAVCAGMPETGFGANRHRPVD

SEQ ID NO: 514190 - protein, 333 aa, unidentified
MENVSIIGLDLAKNVFQVHGARSDGSVAFRRKLSRAKLLSFFAAAPKCLVAMEACASARHWARQIGELGHEVRLIAPIYVKPFVKRNKNDAADAEAIAEAASRPTMRFVAVKSVEKQAAGVAFKTRDLLVRQRTQTINAVRGHMAEYGVVAPNGPVHVERLIEATQDPQSGLPSSILDVCRLLLDHIAALSEQIALLERELRERARADDTAKRLMSIPGIGVICATAMEALAAPPESFAKGRDFAAWLAGRHVEDGAARSSPVARQRRHRSSSMGRAKGRARGILARANDEEEAAPGRRGGSGKPHGADRLGIDGQGRRLSSFKSGRRLRRSV

SEQ ID NO: 514191 - protein, 429 aa, unidentified
MNYNQNHKIAQITPETLIIGVDIAKHSHVARAQDFRGMELDNTCFFENTKEGFQSFLDWINQLSQESRLTKVIVGMEPTGHYWLNLAHILKENNIKFVSVNPLHVKRSKELDDNSPTKNDIKDAKVIAQLVKDGRYAEPTIPQGVYAELRVAKKIRDLLNVDLQMVQGQVHNWLDRYFPEFLTVFKSWEGKAAIHFLKLECLPHEYIQYTDEELFTYLRQVVKRSIGMKKIQALKEAASRSIGIRQGAEMARLELRALLEKYEFIQTKFEELDHQLDKLLQHIPGVTQMLEVTGIGRDTVAGFFAEVGDLNEYQHPRQIVKLEGLRENTSGKHKGQTKITKRGRKKLRGLLFRAAMILVAKNKAFKALHNYYTTRPDNPLKKMQSLIALCNKLIRILFSIGKRQFTFQEEKMLRDIPHMAPLVEPKAAA

SEQ ID NO: 514192 - protein, 331 aa, unidentified
MNQIYGIDLSKEKFDVNFINSKGIEACKVVKNNFKAINKFLVSLPKNALLCIENTGIYGDLILFLANIMNIKISVISGYEIKHSLGFIKGKSDKVDAKRIREYGERFTDKLKISAFDSIPLHELREIYALRALLIKQRKMLLTHYHEKKLCPFNSLISNKIIQKQLQHLDSGIKQAEDQILTIIEETKSFNENYILLTSIKGIGPVTASELIIKTNNFNKIDTARKAASFAGICPFPNSSGKMVKKSKTSPMADKSLKTLLYLCASSAVQHNKEYRLYYHKKKNEGKHHYLILNNVSNKLLRTIYSIIHSRKKYDPNHICLDPRQTDKIVA

SEQ ID NO: 514193 - protein, 417 aa, unidentified
MTDLVPPTVFARYVAVDLHKDYVVVGGVNTRLEVVLSPRRIELEAWPRWAQANLHKTDALVVESTSNAWDFYDGVAPLVGQAVVANPRLVKLIASGRVKTDKVDTLALAKLLATGFIPTVWVPPLEVREARGLLAHRRRLVRNRTMVTNRLQSVLQRHNLPAPAGEPFSAANRPWWDTLQVSSTEQLRVRQDLATLAHLAQQITELDTEVVRLSTQAPWADHVPYVIQLPGFSVLLTMTVLAAIGDVTRFESAKKLVGYAGLGASVHASGATHRTGGITKTGRRELRWALVEAAWSAVRYHPYWKAEFERLARRMADNKAIVAIARKLLVAIWHVLTEQVADRHADEKMVATKLMRWSWKLTDEQRGGLTSRQFIRLQLMRLQLGEDLTHLKYGNMPRRIASAEEVLAVRPELRDQG

SEQ ID NO: 514194 - protein, 349 aa, unidentified
MTEQRISYAGERVYVGVDVHKETYTVTCVCHTQRVKTATVPAEPASLAASLLRWFPGATLASAYEAGFSAFVLHRALIQAGITNIVVNPASIAVAAHDKVKTDRRDSKRLAIDLADGRLRGISIPTEAEELARLLPRTRAQIVEHRATIARQIKAKLHQFGLIAPSSRRLISNRYLRERATWPLPPELGVSLTLLAEQWRFATRQLIEMRRLLRDQAKAHEETEKVYRSVPGIGAVVARTLATELGDMTRFANERALFSYTGLTPSEYSSGSSVRRGHISRQGSSRVRHLLVETAWRALPRDEVLKEIFDRIAATRGKKRAIVAIARRLTGRIRACFRQGTTYAVGTYA

SEQ ID NO: 514195 - protein, 349 aa, unidentified
MTMLAEHVDVVIGVDTHKHTHTGAVVRAATGAVVEKITVSTDPDGYAELIEMADRHAALRAWAIEGTGTYGADLTRHLGDAGELVLELDRPKRPPRRMGAKNDELDAVRTARDALGREHNATPRRGTDRAALSVLLAGRRSAVEAAKVAQVQLQALICAAPEQLRTKFRGQRSKTVTNTAARLRVRGDWDLETRTYATVLRDLARRRIALLKEAKTHEGAINLIVKSWRPDLLDDFGVGPIVAATILCAWSHTGRCRNDGAFAKLAGVAPIPASTGVTNRHRYNPFGDRQLNRALHLIVVHRMRRDATTRAYTERRRGEGKTDREIRRCLKRYVARQLFRQLEQPVDSQ

SEQ ID NO: 514196 - protein, 319 aa, unidentified
MEQLAYKIYIGIDVSKAKLDIKSDEKSQAFTINNQKKDFKQLNKYFPTNKQTILVVLESTGGYEKPIVKWLLSKGIPVAIVNAKRVKDYAKATGQFAKNDKLDAAIIRDYAVTFAKKLHLEEMKGKLEEKIEDLMRRKKQVTSLRAKEKQHLASIQNAEMKRSITRAVKFYNKEMDKIEKKLLQVAAEDESIQARFDLLVTVKGVGLTTAFTLIGELPELGRVGKNQIAALVGVAPFCRDSGTMKGKRTIWGGRAQVRTALYMAALSARRYNPAIKIFYDRLIAQGKPKKLALVACMRKLLVIMNVMVKNNEPWHAEMI

SEQ ID NO: 514197 - protein, 458 aa, unidentified
MYRELLPLRQALSTELKANLPPAQPGVDPELLLQSYLDRLTMCVGCDVADQSFTLMALDAAGEDLGHLLHAPNSPLGFEHAWEWLEATRSQHHLRVVLLAIETTGVFYWAWWDFLAGRPNLARVLYNPRTTEHMTEVLSKKVRNDLVDAYALAEQVRLAATPEVVLSEDSELLTARLCSRAARDLAQQINRYKNQLRALLRAYNPALSQVFPGAKLHHPAVYALLQHAIFPDECVQAGVDTVTSILQAHCRSAFAPHHAQQLLTLCRQTLSRDIGRDAIRLRVHQLIDDITTSQQRKTFFNKTGYRLIQHRPQTPLLRAATGAGISNTLALVSEIGDVRRFRSGEHLASFLGLTTSKHISGTTLFVSKHVTKQGSPNARYAAVNVAQHLSQRVPKYQQMYQRIKSRKPPRKGHYIALVAIARDFVTHVLYDMWYSMRPFFLEVEDYRAYRQLNPRSDD

SEQ ID NO: 514198 - protein, 312 aa, unidentified
MRAVGIDVAMNQLDCAFHCGLSAQFENSPSGFKKLLRWLGSNKSELRLLLEATGGYETAALNCLSKAGIWVSRINPRQVRDFAKATGQLAKTDKLDAKILARMAHMLWDTMLQYVPPTAEQACFREWVTRRHQVVKAIGTQRQQVATIKDKNLKTLSKKLLVSMNEQLKQLDERLAKVVESQAKSVALTCKGCGPVLKATLLALLPELGTLNRKEISKLVGLAPLNCESGTMKGQRHIWGGRADVRSVLYMAALVAVRWEPKLKEFYDHLRAKGKSGKLALVASAHKLLIILNARMRDFLTPPIMDGASAID

SEQ ID NO: 514199 - protein, 347 aa, unidentified
MLHAGLDLSRRKVDVCLLSDEGKHLDQLAVAPDVDSLRTLARRIEELHREQVYAVVESMTGARLVHDTLEQEGWSVEIADAQKVKGLAPLACKTDKIDSMVLAVLSHRDLVPAIWLPDPRVRDQRELARFRMHLVHHKSALKNRVHSTLINFGRPCPVTDLFGAEGRRLLARLDVPEPWRSNVCASLELIDHLERQIDQINRRLRAGHADHAYVPLLMSVPGIRWVLAFTIAAEIGEIERFSSPEKLTGYTGLCPRVDQSGERDRRGPLTKHGPSYLRWALLEATMHALRHPAYSERYQRTKKRLGKQRGAKVAQVDIARRLAHAIWHMLTRNEPFAPRGAAFRLAA

SEQ ID NO: 514200 - protein, 324 aa, unidentified
MQKSIIGIDISKKDFTVSLLREQKHSVRSFQNHREGYENLLAWLKECEVKPDIFCMEATGSYGEALADFLYAHDHRVSVVNPFQIKSFAHTLLKRHKTDKVDCKVIAYYAERFEPEPYVPLDPNIKELRQLYRCALALNKHLTGFRNRLEHRDRLCDEVTACWDDMIAQAEQKLRAIEQRMTELVQASQSAQQDFEHLQTIPGIAKKTALALLAELPDIAMFDNARQLAAFAGLTPRHCTSGTSLQRKARISKVGSSTLRKALFLPAITAKNHNPVMKAFVKNLADKGKPAKVIIAAIMRKLLHLVFAIIKHKIPFNPHFHVAT

SEQ ID NO: 514201 - protein, 331 aa, unidentified
MENALQIVGADLSKKTIDLRIHQAKDGIRIENSSTGFKQMMTWFRRTTKDLSGIIVVMEHTGLYSFCFEKFLFEKGIRFSKVNPIDIKFTIGFTRGKSDKIDAARIARYGAEKQGSLPIQTPTSKALEGLKMLSTSREKLVRTRASLKTSVEEFRNIGMSDREPPIKAQLKVIKSLDKEIKILDDQIQSTIQKEKELKQTYTLLTSIPSVGAVVATNVIIKTGNFKRFPNSRKFSCYCGIAPFEHTSGTSIRGKTRVNHMADKSMKTLLDLAAKTAIRCDPEIRDFFLSRTAAGKPKMSTINIVRNKIVGRIFAVAKRQTPYVIAGSLQAA

SEQ ID NO: 514202 - protein, 355 aa, unidentified
MNDTKYIGLDVHQATISVAVLDSTGKLVMEAILETKAETILQFIHGLRGSVHVTWEEGTCAAWLHDLLKPHVASVLVCDPRKNALLKAGDKNDRIDARKLADLLRTGLLSPVYHGENGVRALQELARSYLTLNRDVTRVMNRLKAIYRSWAIPCAGQRVYAPRYRSEWLGKITETAVRHRAEIYYQQLDALRSLRRQIRRDLLAESGKHGATKLLRRIPSIGPIRAALLIALMQTPYRFRTKRQLWAYSGLALRTSASGEYRFVEGQLKRSKKFLAIRGLNVNHNPDLKNIFKGAAIRAAAVPGPFQQFYAALVATGMKPTMARLTLARKIAAITLIVWKKGVCFDAEYLKPQAA

SEQ ID NO: 514203 - protein, 403 aa, unidentified
MRVPAALEKAWAGIDVGKGHHWVCVVDQDGRQLLSVKVANDEAEIAAVIGSVTGLAGNVTWAVDIVGAPSALLLALLSQAGQPVRYASGRLVAAMSGAYSGEGKTDPKDAFVIAETTRLRRSLPVTGHKTDLVRNLGLLTARRADLVADRVRMINRLRDVLTSVFPALEREFDYSSCKGALVLLTGYATPARIRRTGQARLAGWLQQRRVRGYAGVAARAVAAARSQQITLPGQDIAADIVAELAVGILALDQRVTELDRQIAAMFAEHPQAEVIQSMPGFGPILGATLLVTAGDLAAFPTAGHLAAAAGLVPVPNDSGRRAGNLHKPRRYSRPLRRVLYLSAQTSMMRDGPSRDYYLKKRQHSRTHNQAVIALARRRVDVLWALLRDNRTYAATPPQHVTAA

SEQ ID NO: 514204 - protein, 401 aa, unidentified
MQDTQQRDTVDVFVGVDVGKGHHHAVALDRNGKRLYNKALPNDEAKLRALITELRTHGRLLFVVDQPSTIGALPVAVARAEGVLVAYLPGLAMRRIADLHAGEAKTDARDAAIIAEAARSMPHTLRSLRLADEQLAELTMLCGFDDDLAAQLTQTSNRIRGLLTQIHPALERVLGPRLDHPAVLDLLERYPSPAALASTTEKTLANRLTKLAPRMGKGLAAEVVQALSEQAVIVPGTQAATIVMPRLAQQLAALRQQRDEIAAEVERLVLAHPLWPVLTSMPGVGVRTAARLLTEVAHKAFASAAHLAAYAGLAPVTRRSGSSIRGEHPSRRGNKVLKRALCLSAFAALRDPVSRAYYSRKIQQGKRHNQALIALARRRCDVLFAMLRDGTIYQPKSAPDA

SEQ ID NO: 514205 - protein, 391 aa, unidentified
MIYVGIDVAKDKHDCFITNSDGEILFKVFTITNNLYGFNDLYQRIESVMEDITKVKVGLEATGHYNYNLLGYLIDKGLPAYVINPLHTNLYRKNLSLRQTKTDKVDARTIASMLMSDVNLKSYSDTSYHNEELKSLTRYRFDKVKERAKLKSSISRLVCILFPELEKLVPTLHMASVYAMLSEFPGAKHVANAHLTRLTNLLSESSKGRYGKETAITFRDAARNSIGSNMPAKSLELKHTIKLIQEISSEIDEIENEIKLIMDEINSPILSIPGINYRMGAMIIAEIGDFNRFDSPDKILAYAGFSPSTYQSGQLDGAYAHMEKRGSRYLRYALYNAAKYVCHWDSTFAEYLAKKRAEGKHYNVALSHAVKKLVRVIYHLEKTNQKYIKAA

SEQ ID NO: 514206 - protein, 464 aa, unidentified
MRKARKMGRKRGQKVVEVTSGLEALHAHAAGIDVGNAEHYVAVPPGSASPAVQTFGSFTADLHRLAKWLLACQVETVVMQSTGVYWMGLYQVLESYGLQVYVVNAKHTRTLPGRKTDVLECQWLQKLHTFGLLNNSFLPPEEIRVLRTYLRQRESLVAAAGSCIQQMQKVLTEMNVQLANVLSDLSGVTGMAILKAILSGERDPRQLAALAQPGVRASRKEIAQSLEGHWREDLLFVLRQVHDLYFFHLESIAECDRHIEAHLQSFQAKVDLQAHPLPAARPQDRLPRRKHIPQTNLRQELYRITGVDLTRIDGIQVQTAQVVISEVGADMTRWPSEHHFSSWLGLSPNNQVTGGKVIRRGTKKVLNRAARALRLAAQTLHRSKSYLGAKYRRLRAKLGAPKAITAMAHHLARLIYRLLRFGTEYHDQGVEHYERKYRETEMKWLQKQAARLKMQLVPSPGLAG

SEQ ID NO: 514207 - protein, 403 aa, unidentified
MNSVGIDISKGRSTVAVMRPFGEVVISPFEVRHTDSELSELARQLKILDGETRVVMEATGNYHAPVAKLLHDAGLYVSVVNAKLVHDYGNNDLRRVKTDKKDAVKLANYGLDRWLTLPRYIPEEDTRLLLKNCYRQYRQYSKVQTVLKNNLISLLDTVFPNANRLFSSPIRGDGSEKWVDFVAEFWHCRCVTEKSEKAFTNKYQRWCRKHGYNFSEAKAHTIHAEACGHIDVIPKSETTKLLVEQAVAQLRATSTALAALKHEMQALTSQLPEYPAVMDLFGVGPTLGPQLIAEIGDVRRFYSKKALVAYAGLDAPPNDSGDVTGRHKSMSKIGASSLRRTLFLVMSVYLQTAPLDEPVYQFMDRKRAEGKPYRVYMMASANKFLRIYYATVKAYLESLEHTA

SEQ ID NO: 514208 - protein, 371 aa, unidentified
METNSHSKRRLLVAMELSNSKWRLAFSAGEKVRQKVIEARNRACFLKEVDRAKEKLGLAKDASVVCCYEAGRDGFWIYRWLESKEMACHVVDPASIEVNRRKRRAKTDRLDAQSLVRLLHRYEDGAGYVWSVVRVPSEEQEDELRLHREMSRLKKERAAHLCRLKSLLILQGIKVTGNLKTLHQRLEKITRWNRKALPAALLEELRRECLRMEQINEQIKTLEQQKLERIKTPKSNADHQAADLLRLKGVGEVSAWVLAKEFFGWREFKNRREVGALSGLTPTPYDSGNARIEQGISKAGSPRVRNVTIELAWSWLRLQPDSELTKWFNERYAQGSKRMRRVGIVALARKLLVALWKYVEFGIVPEGAIIH

SEQ ID NO: 514209 - protein, 334 aa, unidentified
MVAGTLGSLDKEGATKMVKSITLAAGIDTSKSKLDVGIHGQTRVETFENTPAGWRKMQAWLVAEGVGRVGIEATGGYERGVARHLQAGGTTVVVLQPKQVKAFGQLHLRRAKSDRIDAFLIAACTHLLDAKDRMPPDPRFDALSDHLTYIEQIEEDIARFKTRLEHVDEKRLQRTINADIARLAKRRDDELKRLQVSLRAYADLARRFDLVLSIPGIGARTALSIVVRLPELGQVSREQAASLAGLAPFVRQSGVWKGEAHICGGRGRLRRALYAATLPAVFHWNPVLKALYERLTQRGKSHTSASVACARKLLIFANIVVSRGTPWTEHPKAA

SEQ ID NO: 514210 - protein, 387 aa, unidentified
MYFVGIDISKFKHDCAIIDELCDTVMPSWSFSNDREGFSHFKALLDSLEGEKKIGLESTGHYGQNLKQFLESNGFTFMEFNPLLVSRFVRSKSLRNTKTDSIDALSIAQYVMTVEYKPYPSSFYHLDKLKSLTRFRNSLVRQRSKQLVELTNVLDKLFPEFKPFFKDKFSVTALYILAHYQTPERIANMNARSYEALRKLSRGRFTLSNFIQLKALAKNTVGTQSDYLLDQMNILLELYSQLDSKVDELEAQIKECVRGIDPPCLSIPGVGELSAAMILSEFGDFSKFQNPSKMLAFAGLEPGYFQSGQSEYTGHMVKHGSSRLRYALMNCCLPLISNEPVFAAYYAKKRSEGKPHRVALTHVAKKLLRVIYTLQTKNIRYDPTMIH

SEQ ID NO: 514211 - protein, 363 aa, unidentified
MNYIGVDLHKKSITICVLNENLKVLARKTVFCDQTDQIVEFFRQYRPFKVVVEATASYLWFVELVEPLAEEVVLANPKKLRVIAESTKKTDRLDAQVLTEFLARDQIPRAYMPTPRQRQHRRLVRHRQYLRQRMTSVRCKIRHILSDYNADRKDLFSTQCGPAYFKEIALSDADRFVIKQLWSEWQDHQSRLLALTKKIKAFIVKAPNREKETRAILKTAPGVGFVTAEVIVSEVGDVSRFRNAKQICAYAGLVPVVRQTGGKKSKDLRITKEGSGLLRWALVESAWRLVKTSPKWSAFFSQLRKRSGSKRAIVAVARKLLCVLYAMLKTSTPYKIVATQTKAPRPTRRRLVRKSSAKETVTT

SEQ ID NO: 514212 - protein, 266 aa, unidentified
MSQHHAAIAGIDLGDRYSHLCLLDTENGEVIEESRITTNREAFEKRFSGAEPMRVAIEASTHSPWVSRILEDHGHEVLVANTRKVRLIYGEGRKTDRIDAEKLARLARLDPKLLWPIKHRGESSQCHLALLHSRDALVGTRTKLVNHIRGTVKAFGARLPKCTAQSFHHKVAEHLPRELAPALGPVLETIASLSERIREYDRRLEEVADELYPETKLLRQIHGVGALTALAFVLTLEDPSRFAKSRQVGPYLGLVPATDQSGKSDP

SEQ ID NO: 514213 - protein, 355 aa, unidentified
MNKIKSNFEGQTIFVGMDIHKSSWNLGIHLNDMFIKNVHQKPNPSIMANYLKQHFPGANYKAAYEAGKFGFWIQRQLTALGIECLVVNPADIPRSQKDSLQKTDPRDARNLGLRLQSGVLHGIHIPDEQQEADRIFFRHRKRILKDLNRCKNRIKGMLAFSGIDIPEQYDNASWSHNFINWLKALDCKQKSRRRALDYMIAQMEYLRKELLTISNEIRKMMREQRYKTNYYLLRTIPGIGPLTAASILVEIGDVHRFETFYHLNSFVGLLPMEHSSGQSENKLSLTVRKHRQLRSDLVESAWTAKRTDPAMALYFQEQIKRKDSKIVIIKIARKLLNRIRFVLVNQQPYEFGIVK

SEQ ID NO: 514214 - protein, 278 aa, unidentified
MTTTPGPYRLFVGVDIAARSFAASWITCACPPARALTFAQTPDGFTAFQERLCSLDLPPAQTLLVLEATGSYWVALALSLHDAGFVVALVNPAQVYNYARSLPRRAKTDALDAQLLAQFAAERQPARWTPPPQVYHELRQRLLVRDGLLSMRKPSRNQRHALEQWPVQIASALKQLDELSAELDQRIATLEAEISAVLSDGAWAVSARLLSSITGIGLITSAWLLVGTLNFEGCASAAAAAAYVGLVPLAHSSGTSVRGRGSGQAGMRGCARRCIWRR

SEQ ID NO: 514215 - protein, 456 aa, unidentified
MQIMYHRCCGIDVHKKMIVACLLIITAQGVHKEIQTFSTMVSDLFRLREWLKAQRCEAVAMESTGVYWKCIWNVLEGEMELLLCNAQHIKAVPGRKTDIKDAEWIADLLQHGLLRASFVPARPQRELRDLTRYRSSLAADRARLVNRIQKTLEDTNIKLASVATDITGKSGRAILEAMLHGEHNPEILAELAQGRMKEKREQLAQALQGTLTDHHRFLLASQLRQLDFLTLQVREIDREIAHRLGLQSDPDDPEPADSIGSLPAKEEIPDPPETSESGPPPCVQPDSPQPLKSAEAIRILDEVPGINVRVGAIVVAELGLEMARFPDEAHLASWVGLCPAAKISANKRLSTKTGKGNRWLRQALIEAANAAARSKGTFLGAYYQRLRKRMGHKKAIVALAHRILVIIYHLLKEQQSYRELGPDHVDEQAAEIARRRALRTLEQLGYEVTLQSAEVA

SEQ ID NO: 514216 - protein, 350 aa, unidentified
MSEHYAGRQIVGMDLHRRRSVLVRMTDTGEQLETIRISNDPEYLKAVMARAGEAPEVVLEAAYGWYWAADTLAELGASVHLAHPLGVKMFSYRRVKNDQRDAADLADLLRMGRLPEAWIAPPATRELRGWVRHRAKLVGLRSSLKCQVHGVLAHAGIWVPMSDLFGVAGQQLLAELSTGERLSIESRSRLDSALRVIGALEFEIALFTKLVNGRLRTDPGYRTIQQIPGVGPVLAAVFVAEIGDITRFHRPAQLASWAGLTPKHHESDTTVHRGRITKQGSRLVRWAAVEAVQRVGGHTRLGQHRDRVAARRGRNIGVVAAARELLTLVFYGLRDHHIRALSPPAGRPVA

SEQ ID NO: 514217 - protein, 437 aa, unidentified
MNHLRFQTNRQMLQGKIVIGIDPAKLNHQAAVVDMTGTQQGNSFAFPASAAGYGETLWRHLARIVTVHRPEDVVFAIETSCNLWETLAFYLHSRGYTVVLVSPLSTHHARPVMNLEFSHTDPKDAFLVATIAQRGAFHRYESFNPHTNAMHQLAITYDKLRQDLAHNRARIRSLLDRVFPEFLHILKPDTQTAMHLLKNSLFPDEFLHLDLCAESLRIEQISRRQLGRSTLEALQQQARRTIGVARQSHERLADRLTLDAYLALVETLQTQLDRVLDELIARANELPQFARITSLSGVGNRLGALFLAEVRDLSRYSHYKHIEKLAGLNLRLHQSGRYTGNRRLSRIGNPRLRWIIYKMTEETAKRVPEVRIKYLRRQLKRRRHVKNVVAATPQLLQLIVSMERHQHAYELRNDTLEELQQLENQYAQLKAARKSAA

SEQ ID NO: 514218 - protein, 345 aa, unidentified
MELHTIGIDLGKTAFHLVGLNLCGEVVVRKKFSRKQLLHFTANLQVKLMGMEACGGSHFLGRALREQGHEVRLMPAQYVKPYVKTNKSDYIDAEAIAEAVGRPKMRFVPIKTDDQLDLQSLHRVRERWVMRRTAVINQIRGLLLERGITLRQGRGHVDAALPGILEDASAMLSGALRMLLAQLKLELDHLQVRIDEADAMIKKVAGENEACRRLVAIPGIGPVTATAIIAAIGNGAAFKNGRGFSAWLGIVPGEYTTGGKQKLLGISKRGNSYLRRLFVQGARAVLQQRAKQSSGLSAWLAQLTTRTHSNVAAVALANKLARMAWAVLAKNEAYRPPMLVGAATA

SEQ ID NO: 514219 - protein, 480 aa, unidentified
MNVKATRTKKQVNVENQAIKLLSKEELGIKIEVIKKELRSYTWRDLETNGKFAKNDKLSFITDDMLIAGCDIGSETHYIRAIDVRGRELSSRAFEFSNTSEGFANAKAWMLALAAKNDKKQIALGLEPTGHYWFALAAWMVSNGISVVQVNPYAVKQSKEIEDNSQLKDDRKDPKLIANLVKDGNYGMPYLPEKVYADMRRLSMFRDQLTEDRIRNINRLHRELKIYFPEYMDAFGKIDGAFTLEVLKVSAIPSDITALGAEGIKNIWHNEKLRGRGYSRANEIVSYAEKSVGLTDGTDAGREAVKWYAEQILKLDEQLAVIESTLHEKCREIPYAENILEIRGVGENILAGILAEMGDISRFDDVKEIQKLSGMGLVACSSGKHKGQTKISHRGRKRLRYWLFQAAKSAVSHADEFKQLHEYYTTRTNNPLKKMQSLVVIACKILRVIYTILKTGTTYDPQKLLKDIKRPTASQAPMAA

SEQ ID NO: 514220 - protein, 422 aa, unidentified
MIHAVLECCAGIDVGKKWIAVCVLTGPAKGDAQAEIRKYATTNQCLEQLSEWLVECGCTHVVMESTGEYWRPIFNVLEEATELEIILANSQQVKGLRGHKTDPSDAHWLAHLLRHNMIRPSYIPPPPIRQLRDLTRRRKQLVRNGAQERNRIQKILEDANLKLGNVLSDVFGLSGQLMIDRLLEGEATPEEVAELAQKSARKKIPEIRAALEGNRMNAMHRRLINLSLDHMAFLEEQLRVLDEEIVQHLKANGLEQPYHLLQTIPGVKEAGAASILAEFGPDMGVFGSAKKLSSWAGVAPGNNESAGKKKRAPALRGNPWVRSTLTESAWSASRKKDSEFKNHYDGWKGRLGHKRAIVAVAHLLAETVFEVLSTGKAYSKPGANPMPETQAASLIRHHTRRIKTLRKRLKPRPEQGQIQHAV

SEQ ID NO: 514221 - protein, 340 aa, unidentified
MPIVMGLDQHRAQLAAEWIDTVTGEVSRARIVPGDRTAVRVFFETFRGSGLEVALEATTGWRFVVEELERVGAEVHLAEAAEASALKGKKRRAKTDFADARHLRELLLIGRIPESWIPPAHILDLRARVRTRHLLSHQRTEWQQRMHAVLYHHGVPQRRDLLNRKSREWLAGVELPDAAREQLEIALHVICAIEQRLVPFDRELNQIARAQPGCRTLMHEIYGIGALTSVTILAELGDVRRFQNSRDVVRYGGMDITVYQSDDHRAPGHLSRQGPPALRWALYEAAQRARFPASPDRAYYEQLAARIGGNRACLALARKLLKRCYHLLKNLGDQAIAPVA

SEQ ID NO: 514222 - protein, 391 aa, unidentified
MICVGIDVAKDKHDCYILDSEGTTLADCFTIPNNLDGFKRLLQTIKDCTQKSDKIKVGLEATGHYSCNILGFLLDNDLPVYVMNPLHTNLYRKSLSLRKTKTDRVDARTIATMLLSDVDLKSYTDTAYHNEELKSLTRYRFDKVQERAKLKQSVSRLVTILFPELEQLVSSIHGTSIYALLSEYPGAKQISEAHLTRLANILVTTSRGHYRKDRATHIRDAARTSIGSVMPAKSLELKHTIKLIQELTSEINEIEDAIRKIMDELKPPILSIPGMGFYSAAMILAEVGDFSNFNSPDKVLAYAGCSPSTYQSGKLTNCYAHMEKRGSRYLRYALYTATKYVCYWNPVFTEYLTKKQAEGKHYNVALSHATKKLVRLIYALQKSGKAYLAIT

SEQ ID NO: 514223 - protein, 387 aa, unidentified
MPQPNDLSRSPAALDQDSTLIAVIEMSQSSWLVAGIVPGIERHPAKKLEPDEAALLRLLHRWRDEATKAGRTISRIAVAFEAGRDGFWLARWLRTHDIEAHVIHSSSIAVSREHRRAKTDRLDTALLKRAFLGWLRGEPDHCSMAAIPTIEAEDAKRPSRERESLVGERTRIGNRMKSTFARLGIRGFKPTLRKASQRLEGLRTPEGTPLPTNTLAELRRDMARLRFINDQIREIEAGRLERLAQCADEGAHPMVRLLARVIGVGIETADMLVQEVLSRQLRDRRAVARYGGLTGSPDESGARRREKGLARAGNARVRRGMIQLAWRFLMFQKDSALAQWYRARTADARGATRKTMIIALARKLLVALWQLVTTGEVPHGVILRPAV

SEQ ID NO: 514224 - protein, 411 aa, unidentified
MEKVYDKCCGIDVHKKLIVACFRKGNKQEVRDFGATTRELLELADWLKGGGCEMVAMESTASYWKPLYNILESSDLNAMVVNARHMKAVPGRKTDVKDAEWIADLLQHGLLQASYIPAKDQRELRELVRYRKSLVGERGRELNRLQKMLEGANIKLSGTVRDINGKSARNILEYILTGESFDEAKYDEMYEKKVIAHNLKASKEQIIDDLNGVMTPLQRRMMKELLAHLDELNAHIKNLDDEIDNFMKPEEKQAASAIEDVTGIGHTSAQAVISVIGTDMSRFPTDAHIASWAGLCPGDNESAGKRKSGKTRKGNALLRSTLVTCAHSAVRNKSSYFYAQFMRISAHRGKKRAYVAVAHSMLVAIYHILKDGVVFKDLGADYYNQFNKERKINAYLKKLKALGWEAPVVAA

SEQ ID NO: 514225 - protein, 350 aa, unidentified
MAIVGGFDVHRKQITFDYVDNDGLVQWGQIRPATRKTLRSWLAKHCPEGAGEFALEGCTGWRYVSEELTAAGVGVHLGDPAEIAALRGPKKRAKTDRADARLLRTLLVEGRFPESWIPPAHVAEIRALGRLYCALMEERRGWQQRIHAQLFHQGCPPVKALLSEPGREVLVAAELSAAGRQYVDTALRRIDELTAEIDPLRMQLVRFARRQSGCRVLQRHYGVGWLCAVIIWAEVGDPRRFSSSDQLVRFAGLDVTVYSSDGKRAPGHLSRQGSPELRWAAFEAAKCAARRGSPDYAYYHNLAAKHEGRNGKNPTLAVERKILRRCYHTLRELGDAVLAMPIAEAEEVAA

SEQ ID NO: 514226 - protein, 448 aa, unidentified
MPSIRPNAIRIKRFRELKADLRTRRDRLLVGIDVAKAQHVAQVRLAHTRILDKQLVIPNTQAGFATFWAHLQRRQAETGCPDIVCAVEPTGTYHEALAQFLEARGADVVLVSNTVAHANRRTLDGTWGKSDPKDAHNLGELLERGMVLFYSRPAGPTAVLRRLVRLLRRARTELAACKARFRNTLLPLLGPAGEPLSPALVASLPAPLQGLLPPAQRRGLPAVGGPLPPALAFECTDLAARLVAVRARIAAIEAELVRIAQPLPAYTWLRSIPGIGPTLAAILLAEIGDIAWYTQFSQLRKLAGLDIQRVESGQWAGTARISKGGRSLLRWALYQAALGAARTPPWRARREGLIAKRRGDRYAFFKATVELAAKLLRLVWGVWRSGCAYDPARVGPGPAARPRELRGRRRAPPSPQGQAEIGEPRGNQAARSSGTPAGYRGNGTSRRS

SEQ ID NO: 514227 - protein, 351 aa, unidentified
MSHKTAVTVAHTIGIDPGKNTLHLIGLDDKGAIVLREKIARGRIAARLANVPRCLIGIEAGMATHYVARELSLLGHDVKQVPPAYAKPFRQGHKNDFRDAYAVAEAVQRPSTRCVPVKTDNQLDLQALHRVRSRLISDRTAVINQIRSFLLERGIPVRQGLRFLRHRLPEILATRTDVLSPRMVRIVEDLVGDWSHLDERIENVTDEIEALAHGDASCRQLMTVPGIGPIIASAIVAAIGSGIAFARGRDFAAWLGLVPKQMSTGDRTILGRITKRGNRYLRTLFMQGARVILLRPINWAKHSFGVWLAAAARRLHHNVLATALANKLARIAWTVLAQGRSYEARIEPKAA

SEQ ID NO: 514228 - protein, 415 aa, unidentified
MALKIVYKICCGIDVHKTFVVACIASTDKHGVTSYERHRFSTYTKGLKNLLQWLLEHNCKDVCMESTGKYWIPVYNILEKDCSIVLAHPKYVKAIRGKKTDKKDAKWIADLFKHDLVAGSFMPPADIRQLRDLMRYRFKLTCFKSSEKNRLQNCLTVSNIQLGNVVSDTFGKSAQAILDKILENPEDTSFDLEPLVFKGLKKKLPELRDAIDGYITSEQAGKLKVIKAHYENLESRKAELEELILALAAPYQQELAILQTAPGISSDFTAIGIISEIGTNMEAFPSAKHLCSWAGLTPTNNESAGKKKSVRVSKAGCYIKPLLVQCANAVVKSSKHPEMRNRYLRIKKRRGHKKAIIAIARMLLTALYHMLKNGENYNAELYRKSDQPPVDREITIEQAILIARNQGYKIKSATA

SEQ ID NO: 514229 - protein, 313 aa, unidentified
MNHQEINVGIDTGKHQLDIYIRPLGEYFTVCNDAKGVKEAIKRIAIHQPTRIIIEATGRLETAFVCAAAKANLPVVVANTYHVHNFAVATGKRAKTDKLDAKMIAHYGEALKPRLSEIKPENIQHISDLLVRRAQLIDMRTMEKNRLSILPKTLHRSLKKVINTLQKEIDQTEETLDALMKDTPDWHELMNLLTSVKGVGKVLAYTLLSDLPELGQLNRKEIAALVGVAPMNRESGAYRGKRKIKGGRHRIRTVLFMAMLSAIQSNPKFKSIYTRMVEAGKPKKVAIVACMRRLITILNTMVKNNSVWDEKLA

SEQ ID NO: 514230 - protein, 338 aa, unidentified
MTILTVGIDLAKNVFAVHGVNAAGKPELVRPAVPRDKLHALIAALPPCVIGMEACSGAHHWARLFQAAGHTVRLVAPKFVVPYRLSGKRGKNDAADAAAICEAVQRRHMRFVPVKCTEQQSRLMVHRARQGFVEQRTATINRIRGLLSEFGVVLPLKASTVRQQARERLEDLPGYANTVIGDLLSEVGHLDERIAQYDVHIKAMARDDERAHRLMRLSGVGETTATCMLAMIGNGHEFDGGRQLAAWLGLTPGQYSSGGKTRLGRITKAGDGYLRSLLILGARAMLVAAKKKTDSISRWAVALAERRGYWKAVVAIAAKNARMAWAVLRRGESFALAT

SEQ ID NO: 514231 - protein, 322 aa, unidentified
MSVSVLGIDIAKQKFDAALLLDGKTKHKSCKNSVEGFETLIIWLEKQGIQKVHACLEATGNYGEDVAIYLHEAGHTVSIVNPARIKGFAQSELIRTKTDKIDAGIIARFCLAMKPEPWIPPAPEIRSLRALVRRVDSLIDMRSQEKNRISTAHESVMHLIKEHIAYLDKEIEKIRRQIADLIDQNPDLKQKKDLLDSIPGLGKATIPHLLAELNDLEKFRHVREVVAFIGLAPKETLSGSSIKGKPRLCKIGHVRLRKALYMPALVSIQCNPMMIAFYNRLKEKGKNGKVIVCAIMRKLVHVIFGVLKSGKKYDPNYKPVLA

SEQ ID NO: 514232 - protein, 349 aa, unidentified
MAVTIVDTSRPVTGGVDTHLDMNVAAALDPIGGLLGVESFPTTPAGNKKLLGWLKSFGTPAQVGVEGTGSYGAPLARYLRRAGVAVVEVDRPNRQERRRKGKTDEYDAIEAARAAQAQRQLGLAKTRDGNIEAIRALLVARRSAKSTKIKTLNQIRHLGFTAPDEIRQSLQGVSRRLIARHAAAMRPRAGSDPVIFATKTSLRILGRRVVALDAEIVELTGMIKDLVKDGHEDLLSLYGVGVDSAAALLVAAGDNPERLKSEASFARLCGVAPIPASSGKVTRLRLNPGGERQANAALWHIVITRMSCDARTKLYVERRTREGLSKKEIIRVLKRYVAREVYYYLKPIA

SEQ ID NO: 514233 - protein, 397 aa, unidentified
MMGVNVKSPNVANATNSRTGRLFVGVDVHKDNHAAMALDCFGEVLENWEIGNEYGDFVSLVDEIEKVAGKKDLVPVFGLEDTYGAGDFLAKYLFGKGHEIKTVNPVLVKRERDFETHPEKSDLADAKGVAKVLIQRIDTLPHYNVTKTIEISRDMGNLVKDRETIVFEQTILKNQLHRILHQSWGSAYRSVFKDVFSKQALIFWSDFPSAIECKKSHKRVVKPDWIRKTDYEELPQTSGITQNQVRRKTKRILAIREELKEIETELKQLLEQTGQKLETLPGCGTTLASVVISEIKDVRRFKTPAQLAKYAGLAPRSYESGKKKRHIKSKSGNRRLNRAIYQIALTQISNQGIEKAKEYFQKKIGESKSKKHALTCLKRQIIDIIWSMLKEKREYYP

SEQ ID NO: 514234 - protein, 338 aa, unidentified
MTIVMGLDQHRAQITCEWIDTSTGEVSRARVAPADRAGVRRFVGRFRGRELEVALEATTGWRFVVEELRRVGARLHLAEPAETAARRGNKKRAKNDRADARHLRELLMAGRLPESWIPPDHILDLRARVRLRHTLSEQRGEWQQRIQAVLFHHGCPQRRNLMTGERRRWLAAQPLPACAREQVTVALAMIAALDAQLAPLNRELRAYARRQPGCRALMGHYGIGELIAVTVLAELGDAGRFSSSSEAVRYGGMDITVHQSDRRRAPGHLSRQGPPALRWALFEAARSAARAGSPDRDYYRQTAERLGANCACLSIARKLLRRSYHTLRELGQEALAPA

SEQ ID NO: 514235 - protein, 297 aa, unidentified
MDKRWVFSNNDAGIEQAVALLCKLRPALVVVEATGGIELPMVTELMLTGIPLVVINPRQVRDFAKATGILAKTDALDARVLAHFAFAVRPALRPLPDAQAQEFSAVLSRRRQLQDMLTMEKNRIRSACKVLRPGIQAHIEWLTEELARIDGDLGRWVRKSPVWRERDNLLRSVKGVGPVVSTTLLADLPELGTLNRKQIAALVGVAPLNRDSGTLRGRRTVWGGRAPVRAALYMATLVAIRHNPTISSFYQRLRAAGKLKKVALVACMHKLLIILNAMIKHLTPWCPHTSQIYGPCS

SEQ ID NO: 514236 - protein, 412 aa, unidentified
MIFVGDDWAEAHHDVYVCNEAGAKILARRLPEGIEGVTVLHQLLAEQVDDPSEVVVGIETDRGLWVQSLVEAGYAVYAINPRAASRYRDRHTISGAKSDPGDAKLLAELVRTDRHNHRPVAGDTNLAEGVKVLARAHQNLIWDRTRATNRLRCSLREYFPAALTTFAELADRDTLAVLAKAPTPAEAKAMPLGKVRSALKAGGRQRNIDTRARQIIEGLRVDELEAPPAVTSAFAATTRSMVSIIVELNVQIAALETELAAHFEQHPDADIYLSLPGIGVILGARALGEFGDDPNRYADAKSRKNYAGTSPITRASGNRHVALARFIRNRRLADAIDQWAFCSLSSSPGARAYYDHQRDNGLSHHKALRALGNRLVGILHGCLRTRTHYNEHTAWAHRNENALTAEKTQDAA

SEQ ID NO: 514237 - protein, 347 aa, unidentified
MAVTIVETRAITGGVDTHADMHVAAALDPIGGLLGVREFPVTPAGYAQLLAWLGGFGNVCLAGIEGTGSYGAGLSRHVTAAGVRVVEVDRSDRQDRRRAGKSDPLDAVSAARAAQSGRARGAPKGRDGAVEAIRALMVAKRSARSERIQTINQARSLIFTGPDDLRTRFTGHTADALVADLAALRPRPGSTVGYATRLALRELGRRTEFLDAQMERLDELIVPLVTAHAPGLLTLYGVGPDTAALLLIAAGDHPERLRSEATWAHLCAAAPIPASSGKVTRHRLNPGGDRQANHALWRIVITRMSSHPPTRAYAERRSNEGLSKKEIIRCLKRYVAREVYPHLRRAD

SEQ ID NO: 514238 - protein, 373 aa, unidentified
MDYNTTYVGMDVHKATISVAIAEEGRDEPISLGLIPNSHDALLKLLKKLQKPGRKLLFCYESGPCGYEIYRFLTGRGVSCIVAATSLIPAKAGDRVKTDKRDAKKLARLFRSGEITPVWVPDETQEALRDMVRSREDAVRDLQRKRHQLGKFLLRLGIHPPEGVRSWSSKHRQWLDALKMEQSAHQVVLSDYRNAMIQAEDRVKHLEKEIEYYVQGSVHEPVINALKALKGIDLITAVGLVAEIGEFGRFKNPAQLMSYAGLVPSEYSSGPRSRRGSITKTGNHHLRWLVVEAAWHYRHTPKIGYKLKKRQQGQSDSIKQISWRAQNRLNFKYRKLVGKGKLKQTAIVGVARELLGFIWSVAIEAEKEMKKAA

SEQ ID NO: 514239 - protein, 334 aa, unidentified
MEQITTVGIDLAKSVFSLHGITHSGAVVLRKTLRREQLLQKVASLPPCLIGMEACSGAHEWGRRFEQHGHTVRLMAPKFVAAYRKSGKNDGNDAEAICEAVTRPSMRFVPVKSAEQQALLSLHRVRQGVVVERTAIINRLRGLMSEFGVVLPLRSVTVRRHAAQAAEALPELARRMVNDLLEQLRSLDRRIEDYDGEIQAQARLSEPAQRLMKIRGVGATTALALVATVGDAREFRNGRQFAAWIGLVPEQYSTGGKPRLGHISKRGDAYLRNLLVQGARSVLQSAHLHQDRLSRWVLELYARRGLHRTLVAIANKNARIAWALLARNETLRPA

SEQ ID NO: 514240 - protein, 391 aa, unidentified
MVCVGIDVAKDKHDCCILDSEGTPLVDCFTIPNNMDGFKSLLQTIQDCSQKSDKIKVGLEATGHYSYNILGFLLDNDLPVYVMNPLHTNLYRKSLSLRKTKTDRVDAKTIATMLLSDVDLKSYTDTAYHNEELKSLTRYRFDKVQERAKLKQSVSRLVTILFPELEQLVSSIHGTSIYALLSEYPGAKQISEAHLTRLANILVKTSRGHYRKDKATHIRDAARTSIGSVMPAKSLELKHTIKLIQELTSEINEIEDAIRKIMDELKPPILSIPGMGFHSAAMILAEVGDFSNFNSPDKVLAYAGCSPSTYQSGKLTNCYAHMEKRGSRYLRYALYTATKYVCYWNPVFTEYLTKKQAEGKHYNVALSHATKKLVRLIYALQKSGKAYLAIT

SEQ ID NO: 514241 - protein, 456 aa, unidentified
MGNARARKIPAQLVEDEDYQLRHERVAGIDIAKAKADVCTRLPPARDGGRRASRLEEVPATAREILALAGRLLADRVELAVMEATSDYWRIWYYLLEGAGLTVQLVNPAHARQLAGRPKTDRLDAQWIARLAEMGLLRPSFVPPPEIRALRDLTRTRQQLVRDRTREWQRLEKLLEGALIKLSSVVSRLARAKTARDILQALADGQRDPKALAALAASQFKGGREGVERALEGMLPGEHHPMLIRLHLDHITFLDRAVAAIEDEIAAALDAIPAAWGISADGVPSPDPGPGAAALTAVERLAEIPGVSPGLAMAIIAETGLDMSRFPTAAHLVSWAGLAPVARQSGPRNRKPKKGQGDAYLKGYCTQAANGAARTETFLGERLRRLSKRLGGNRAKCAVARSILTIIWHLLTSPEARFTDLGPDWHNRKTDRDRKIRAHLRQLHALGLDVTITPAA

SEQ ID NO: 514242 - protein, 344 aa, unidentified
MGEVITIGLDIAKSVFQVHGVDEAGAVVILKRISRAKMLEFFGGLKPCLVGIEACPAAHHWGRELQALGHTVRLMPPNYVKAYLKRSKNDANDAAAICEAVTRPTMRFVPLKTKEQQAALMLHRARQLLVRQRTMLSNAIRGHLAELGIVSAKGRNGTGTLLEIIADAGDSRVPPVARGILEVLARQYSAIGSEIVSIDRSILAWHRSCEASRRLEEIPGIGPVVATALVAEIGDWKAFDSGRSLAAWIGLVPKQNSTGGKDKLGSITKQGNRYLRWLLVAGAMAVIRYAQKHGTQKRPWLGRLMDRRPTKVAAVALANKIARMAWAVIVHGDRYREPQPSLAV

SEQ ID NO: 514243 - protein, 346 aa, unidentified
MAAVRLPGQRAAALHTLTSDSPTILRFVKRLQQEVGAVRCCYEAGPCGFELQRAMTAAGVACEVIAPALIPRRAGDRIKTDRRDAGHLAVLYRAGALTAIHVPTDQEEAVRDLLRCREDIRADLLRARHRLSKFLLRHGRRFTATKSTWSLRHHAWLRAQTWPLPALTQTHEAYLRTVDEAVARLRAVETQLQVLVTLEPLCPRVQRLRCFRGMDDITALTIAAEVGDARRFPSAPGLMAYVGLIPSEHSSGTKRARGAITKTGNAHVRRVLVEAAWHCRHHPFLGKQLRRRQIDAPEAARVHAWRAQQRLYRRYQHPAARGKPKQHIVTAIARELTGFVWATLTQ

SEQ ID NO: 514244 - protein, 357 aa, unidentified
MTSNKKYIGMDVHKESISIAVMNSTGKFVMECVIETKASMLLQFIDGLRGDVRVTFEEGTWAAWLYDLLKPHVSEVVVCNPRKNALLKDGSKSDRIDARKLAELLRGNQLKPVYHGEQGLRTLKELARSYLTISKDVTRVMNRLKALYRSWGIACAGTHVYATRHRSEWLGRISEAGVRRRAEHCYQQLDVLRLLRQQVRRDLLLESKKQQAWRLLGLIPGIGPIRAALLIALIQTPHRFRTKRQLWTYSGLGLETHDSAQYRVVEGQLQRSKKPVTLRGLNQDHNHDLKDIFKGAATRVSSSSNGPLHDFYEHLLAQGRKPTMARLTLARKIAAITLIVWKKEVHFDASYLKSQAA

SEQ ID NO: 514245 - protein, 367 aa, unidentified
MGGADMAQVRSWVGLDVHRASVVAATMDRDSGELRVRRLGGDTREVVAFCAALPGPTRVAYEAGPTGFALARALVAAGVQCVIAAPGKIERPSSDRVKTDQRDAERLLRLLMIDGLHAVRVPSTEEEALRDLVRAREDIRGDLMRARHRMSKLLLRHDVRFDGTAAAWTTHHRRWLGAVDLGERGAQVTLMDYLGAIDALIVRRDTLEHTIDELIPGSPWAHTIARLRCLRGIDTLSAVGLCAEIGDWQRFPKAAHLMSYLGLVPSEDSSGQTRRQGAITKTGSGHGRRLLVEAAWHYRRAPAKGQALQRRQAGQPAHVIAISWQAQQRLYRTWRRLDTERGKRRTIVAVAVARELAGFCWATANAD

SEQ ID NO: 514246 - protein, 457 aa, unidentified
MESYYMGIDVSKGYADFVILDAKKDVVEPNFQLDDTFSSHCRLFEILKRFFDHHSGSVLFAAVESTGGYENNWLHSLGGFQGTLDIRSARLNPLGVRANSKASLRRVITDKISARDVAEYLIAHPEKVTYQQEDSLAGLRRQWGFVRLLVKQKTQILNQFESLLYTANPELIAYCQAGVPAWLLKLLKQYPTATKLAKARATSVARIPYVTAGRAKELIDQAKKSVASATDETTGSLIAVMTEQIIRMEETIRIQTQQMAKQCAIPEVALLKTIPGISDASAIGLMLEIQSVKRFASVKKLAAHFGLHPAFKISGDGTSSVRMSKQGRKEPRKILFMAAMVALTTNPHIRKIYEEHTEKGMKKMAAIGLCMHKILRIIYGMLKNNQAYDSLVDQKNRESRTARQATHTAKNENRRYEMFDQQAPISRRQSNKRKEWKQSQGDNITQRGIGVPIPSAA

SEQ ID NO: 514247 - protein, 372 aa, unidentified
MSLRGAEGLGLPHGGRRPSPLWHATAGEPWDRRHCHARPHSRWISIARTRQVTVAQVICGVDISSISLEACVGPDGPRRSFPNHPEGIAALAWFCQEQGVELVALEATGGYEKQPFALLWAQGLPVAVLNPRAVRRFAEGMGLLEKTDRLDAQMIAWFALAKRVRPCLPATAQQQRLQALVTRLRQLTDLQTAQRNQRRLVTEPAVLAAFEQLLVLVTLQIRSLESTIVQLIASDPLWQQLDQAFRSIKEVADRTVARLMAEMPEIGTLSNKAISKLAGLAPLAQDSGKHQGKRAVRGGRTGVRAILFVVAGVVRRYDPDFSAFYERLSQAGKPKKVIRVALAHKLLVRLNAKAREVRQQLVSPEVCVAAAT

SEQ ID NO: 514248 - protein, 419 aa, unidentified
MKILRSQNTKNVNGQTLVVAVDIGKSVHYGYFRAPMGEEVKRFPFSNTHRGFQEFWQKLSPFQRQQGLKECVIGFESTGPYAEPLFHYLRNQPVKLVQINPMHTKRLKELTGNSPNKTDRKDPRVIADVISLGHALSLVVPEGASAQLRRLTHARERAMKRRIALLNQLHYLMAVVFPEFLEVMKKISTKTAIYLIKHHPTPQHIVAMGPGSLSKVLKKRSRGQVTEQRAQKLFEVAQESIGIHEGQQSMLLEIQYLIFAIEQENGFIADLEKQMIFSLNQIPYSHSILSIKGIGKITAAGLIGEVGDFGKFKTIAEITKLAGLDLYEISSGKHKGQHRISKRGRSLMRKLLYFAVVNMIRSDGLMHQPWHQMVQRGMPPMKAMVALSRKLLRLIFALARDNTVYKENYTQTNTYKLAA

SEQ ID NO: 514249 - protein, 361 aa, unidentified
MKKVSKQSQRMEASQVSPSMTMGLDMGDRFSHYCLLNEEGDVVEEGRLQSTEAAFRRHFENEPRLRLALECGTHSPWVSRLLMVLGHQVIVANARKIRAITASESKNDRNDAEKLARFAAHDPRLLSPLEHRSEQRQVDLNLIHARSTLVRARTMIVNALRGLVKSAGGRLPACSTESLPFRALPAIPPPLMVVATPLVEQIALLNAQIGSMDKQIEKLAAKYPEIVLLRTAPGVGPIVAAAYVLTMNRPEAASNRSAGAFLGLRPGQSQSGDSDPQRRISKTGNSCLRSLLVQSAQYILGRFGPDSELRRWGLKLAASGGKRGKKRAIVAVARKLAVVLHSMWRGGQRFKPFPQAAAAVA

SEQ ID NO: 514250 - protein, 344 aa, unidentified
MDHFAGLDVSVKETSVCIVDDTGRIVREVKVASEPEALLSVLKNPAYHFKRIGLEAGPLSQWLFSALAEAGLPVICVETRHMRAVLKAQINKTDRNDARGMAQMIRAGLYRPVHVKTLRSQKLRMLLTHRKLLQSKAIAIDNDLRGTLRNFGLKVGVVGKVGFEARIRELVENLPDLAALIEPLLIVRRTLREQFCILHRRLLAIVRDDEVCRRLMTTPGVGPVVSLTYRATVDVPARFRKSKSVGAVFGLTCAKYQSGEVDWSGKISRCGDEMMRVMLYEAAQSMMRSKKWSWLKAWAMQIARRRGMKKAIVALARRLAVIMHRIWVDGTEFRWTREQAAAAA

SEQ ID NO: 514251 - protein, 358 aa, unidentified
MKAQVNKIDFTDQNIYAGFDAHLKSWKVTVMAEDVVYKTFTQPPRPEILFNYLQEHFPGGIYHTAYEAGFCGYWIHDKLVSFGINSIVVNPADIPTTDKERVQKEDNRDSRKIARSLSSGILTPIYIPTIKTQRDRTLLRTRAMLVKDLARYKNRIKSFLYFYGISIDDSFINPQSHWSNHFMNWLESIDTGEESGKESLNILISECKNLRTSILKITKQVRQLSQTEPYQTDVILLRSIPGIGLLTAMIILTELENINRFRNIDKMCGYIGLVPSTKSSGEKEKTGDITPRGHSVLRTAIIESSWTAIRNDPSLMKSYLSYKKRMDENKAIIKIAKKLLSRIRFVLINKKPYTCSIV

SEQ ID NO: 514252 - protein, 373 aa, unidentified
MQTITLHLGLDVHKDSITIAIAQAGCRAEIRLFGTIINSIQAVQRALNRIRQAHPGARLEVAYEAGPCGFDLQRALTAHGIPCDVIAPALIPRRPGDRVKTDRRDAMQLARLMRSGDLTPVYVPAVDDEAIRDLSRAREDTLRDLKAAKLRLKAFLLRHDIRYTGRANWSPAHLRWLSEVVCPTPAQQIVFQEYVQTVTEQTERLQRLEHELHEQVKTWCLAPVVEALQALRGVQFTVAVTTVAELGDLTRFENPRQLMSYLGLTPSEYSSGGRRQQGGITKTGNNHARRALVEGAWAYRYPAKVSRHLQLRLEKLPPAIQAISWKAQVRLCKRYRQLMAKGKNANQVVVAIARELSAFMWAIAKQVAGSPKA

SEQ ID NO: 514253 - protein, 454 aa, unidentified
MAKKGRDGGSLPILKANAAGIDIGSAEHWVAVPMDRADEHVRPFSALTHGLHELADWLQACGIQTVAMEATGVYWVPLYEILEERGIDVCLVNAHHAHNVPGRKSDVLDCQWLQQLHSYGLLRASFRPRADFVALRTYLRHRESLLRSNARFIQQMQKSMTLMNIKLDRVVTDVAGETSMRIIRDIVAGQRDPVSLARHRDPRCKASEAEIADSLRGEYRVDLLFTLRHGLELYDVHQQRLVECDVEIQKLVDAIAISMPAVEPPRTATKVRRDRRRDPKLNLHASLHRIAGGVDLYQVAGIAELTAVQLIAEIGTDMTAWPTAKHFASWTTLAPGCRITGGKRYRPKRPHSAHRVAQILRMAAVSAGRTQSAIGAFYRRLSGRIGKAKAVVATAAKLARIIYALLKNGTRFEEAGANAYEQRYRDRVLRNLKRKADALGFDLVEKPALAESVS

SEQ ID NO: 514254 - protein, 341 aa, unidentified
MSELAMVGVDLGKHSFHLHGQDKAGREVFRKKLSRQQIIRFFSNLPACTVAMEACAGAHFVARELMVMGHEAKLISPQFVRPYVKGNKNDFVDAEAICEAASRPSMRFVSPKTEAQQTLSVLHRIRESLVRDRTKIVNQMHGFLLEFGISLPRGLAIMKRLPVILTEHELPTRLTTLLDRLREHFNYLDTQIKDLDKDLARQLADDDLGSRLLSMPCVGPITDSLLAVEMGDGKQYASSRDFAASIGLVPRQYSTGGKANLLGISKRGDKNLRRLLVQCARVYLQQLKNQHGALADWVRSLLIRRHSNVVACALANKLARIAWAISVGHRVFNAGTDAMAI

SEQ ID NO: 514255 - protein, 360 aa, unidentified
MTTTAVSTAAGPILAIDLGKYKCVACAYHATTEHAFHTIDTSRTEVARLIQRTRPAVVVIEACSLSGWVHDLCLELKVPCRVANTAAEAWKFKHSKRKTDRDDALRLAQLFAHGQLPEVVVPARATREWRALIAHRQALVTQRVAAQNRIRSILVGQGLPAPRGAKAWSATGLAGIGQFARPLAECGPEELWRGLLELALTTYRQAEERVAVAQAKLDAIGKADARVRLLDSMPGLGPRTAEAVVAHLDDPRRFRSGKQVAAYGGLVPRQFQSGEDDRRGRITKRGPAVLRKLLVQCAWAMIRYNPWAQAVYVRLSRGQARKKQAVVALARKILVRCWAMLRDGVPWRPDAATTIVVAAT

SEQ ID NO: 514256 - protein, 392 aa, unidentified
MICVGIDVAKDKHDCFITNSDGEVLFNPFSISNNRDGFETLFQRILSVSDDLTKVKVGLEATGHYSYNLLGFLLDKGLTTFVINPLHTNLYRKSLSLRKTKTDKVDSRTIATMMMSDMNLKSYSNTSYHNEELKSLTRYRFDKVKERAKLKTSVSRLVCILFPELEKLVPTLHMPSVYALLSEFPGANAVASAHLTRLSNLLSESSKGRYGKDTAVIFREAARNSIGSVMPAKSLELKHTIKLIQELTSEIDEIETAIKRIMDEEIQSPILSIPGISYRMGAMIIAEIGDFNRFDSADKILAYAGMSPSTYQSGQMDNCYAHMEKRGSRYLRYALYNATKYVCHWDESFGAYLEKKRSEGKHYNVALSHAAKKLVRLIFAMEKSGQAYVPAA

SEQ ID NO: 514257 - protein, 489 aa, unidentified
MSTARKQQGEKKDPMLNARAPKRKVRGSHCQQGKGNQRGSELTITHPDAAGIDVGSQVHYVAVPEGRAQESVRSFGAYTAQLDELVQWLKDCRIKTVAMESTGVYWIPLYQKLEEAGFEVLLVDARQAKHVPGRKSDVQDCQWLEQLHRYGLLRAAFRPEDSVCRLRTLQRHRKDLVESAAMWIQHMQKALNEMNLHLHHVLSDISGLSGLAILDAILAGERDPRKLASLAHYRVQKNQAQIAAALTGDYRPELLFVLRQSLQNYRQIQQQITQCDLSIEQQLAKMTDCQNPNQASEPTPPSPDLGGGKPRKRKSPAILEISLAGHLKRILGVDLTTIPGLNVLAILTLVSEIGTNMTKWRNEKAFVSWLGLSPNNKISGQRVLSSRTRKVVNRAATILRLAAMIVGKTNTPLGSFYRRKRAQLGGPKAVTATARKLGCLIYRLIKNGQGYHEPDLHTYELKYKDQILNSLRKRANTFGFDLVELPKAA

SEQ ID NO: 514258 - protein, 376 aa, unidentified
MSKTEIYIGLDVHKETITAAEAEGGRAGEVRQAGTISNDLHALEKLLRRIRGDREHTLHVCYEAGPCGFVIARRLKQLGIACVVVAPSLIPKQPGDKIKTDRRDAEKLARLLRAGDLSPVYVPDSTDEAIRDLCRARTDAVDDRTRARHRLKSFLLRHGFRYTAKSTWTPAHMRYLRELVLPHPAMKVILEDYLCAIDAANERVNRCEEAMGELLMNWQLRPAVEALMGFKGFKIVAAMITVSELGDIHRFEHPRQLMAYLGLVPSESTSSDKRKQGSITKCGNPHARWLLVECSQHYDTPPKVSKELSMRQAKLDRRAREVSWRAQNRLHARFNRLRGRRLQRNKAMTAVARELTGFIWELLRELPCYTKVASAQ

SEQ ID NO: 514259 - protein, 369 aa, unidentified
MADRITYVGLDVHKEGIVVAVAAGGLRGEVREYGRIANTPTALERLLRKLGGDGVMLRFCYEAGPCGYGIQRQISATGHECVVVAPSLIPRRAGDRVKTDRRDAASLARLHRAGELTAGWVPDARHEAMRDMVRARLDAVHSLRRARQQLSGFLLRQGCHYARPAWTKLYRRWLAGLKFEQAVHHIVLEDYLAAVEAAEARRDRLTTQIEAMLPDWTLAPVVAALQTMRGMALVNAATLIAELGDLSRFADPRQLMAYLGLVPCEHSSGASVRRGGITKAGNGAARRLLIEAAWSYRFPARISRELLLRQEKQPKPIRDIAWKGQVRLCARYRRLARTGKPANVVTTAIARELTGFVWAIARQVIVAAG

SEQ ID NO: 514260 - protein, 349 aa, unidentified
MAMLADTADAVIGVDTHTDTHTACLLDRLGRQLAVITIPADDRGCRMLLAWAQRTAPGPRLAWSVEGTRSHGLGLTRYLQAHGQLVAEAGRPARASRRPGGKSDPADAARAARDALSAQRLAQPRSDGSREALRILLTARAQATTARTAAVNTLKALILGAPDDLRRQRRGLSTPRQASRCRSLRVHASQPIAERVLRAELRRLATHIGGWDKELRANKAQLRQLVAQAMPVLLEQPGVGPMSAAQLLVSWSHKGRCRSEAAFAALAGVSPLEASSGRITRHRLNRFGDRQLNRALHVIINWRMLHHTKTQDYTTQRRAGQKTDPEIRRCLKRYAARQLFRLMETAATT

SEQ ID NO: 514261 - protein, 354 aa, unidentified
MEHDAPSRKIIIGIDTHKDTHAAVALNALGVRLGATIVPVNRVGYRCIDAWARSFGTVMAFGIEGTGSYGAGLARALREAGHHVLEVNRPDRSTRRRNGKTDMLDAEAAARAVLSGQALAEPKTGTSTVEMIRHLKIARDAAVKAKTQAMQTLKSIIVVAAAELREQLEGIRGPITLVRHLASMRPGPLTSPLASAKTALRATARRWLALHQEIEGHDRDLDALVAATAPHLTAAPGIANTTTAELLLLVGDNPERIRSEGAFAKLCGACPIPASSGRTKRHRLNRGGNRQANAALHRIVVTRMRLHQPTIDYVRRRTGEGRTKPEIMRCLKRYVAREVFRSLCRPRPPSPTAP

SEQ ID NO: 514262 - protein, 370 aa, unidentified
MSVRRILAKTINTDLEYEAIGIDLAKNCVSVALLTTDGEVVCIDRLDYSELEKSAQALSPTTFAMEPCTEMNYLVQKLEAWGHRCLVIGGKNVQNYVENHYSGQKTDLNDAQALAFLAQDKQLRTIKAKDIEQQKYASLTTLREQYIKQYRQTIVSLKGICQAWGLNISKGISGKAQLKDLIENHAAFPEELRESLVDMVTHAQTTQKVLNKITKTLEVLAKNDKVCQLIQTIPGLGTICSCRLRATIGDIKRFKNPKDFPAYYGLVPRSIATGHNEKKGKITHRGDRTMRSLMVQGAGCVIRLATCGKLKSKQLTKWILKKQKEKMPWGKLVCAVAAKLLRIVRAILISSKPYNPKIAGVAKCSLSKGS

SEQ ID NO: 514263 - protein, 508 aa, unidentified
MATPTTRRKPASAAGAPRAQAQAHRPPEQRHKTRARPTSEAPGPGTAARVEALPVQHPHAAGIDIGSRSHWVCVGFSTDADAGSTREFPAHTAGLKAIATFLREHRVDTVALESTGIYWIPLYELLQAEGFEVLLVDPSYTHQLRGRPKTDRRDCQWIYRLHSVGLLAAAFRPDEQTCRLRAYLRQRANLVRAASRHVQHMQKALEQMNLKLTEVLSDVTGLTGRAIIRAILRGTRAPEKLAKYRDRGCKASEAEIARALTGSYREEHLFELKPAHEAWQFTLRQVEQVDGQVALQLGRMKGDRALPPLKPKPRPKRRANSPRFDVRAALYYVVGLDLTEIEGVSELTALTVIGEIGPGVSRFATVKKFCSWLGLCPNWKKTGGRVKSSRTRRGVNRAAQALRVAAQGLHHSKGALGGFLRRMKGRLGAQAALTATAHKLARIVYLALKHGMTYVRRGQAEYEAQMKQKQLKALRRKARQLGLEVVEKTSGSVPTATAASEQGRTSEE

SEQ ID NO: 514264 - protein, 389 aa, unidentified
MKIFVGIDIAKLNHFAAAISSDGEILIEPFKFTNDADGFQLLVSKLESFDKNSIIIGLESTAHYGDNLVRYLVAEFYQVCVLNPIKTCQMRKNNVRKTKTDKVDTFVIAKTLMMQDDLRFITFFDLDMMDFKALGRFRQKTIKQRTRLKIQLTTYVDQVFPEIQYFFKSGLHQNAVYALLKEAPSPKEIASMHMTHLANLLKVNSHGHFTKEQAKELRVLAQKSVGANDSAISIQITQTIQQIELLDSQLEKIEVEMTDIMKFNDSVIMTIPGIGYINGGMILGEIGDIHRFSNPNKLLAFAGLDPSVYQSGNFQAKTTRMSKRGSRVLRYALVNAAWNVVRNNATFKAYYDAKRAEGRSHYNALGHCAGKLVRVIWKMLTDEVEFNLE

SEQ ID NO: 514265 - protein, 418 aa, unidentified
MKHSKTEKIGTINKKTLIAALDIGKKVHYAYFRAPSGKDFQPFAFHNTRNGFDKFWERLCRFKEKQMLEEIIIGFESTGPYAEPICHYLRHKSVNLVQVNPMHTKRIKELTGNSPNKTDKKDPRVIADVMSLGHSLTVIVPEGAAAHLRRLTQARERAIERRTAMSNQLQHLVFLIFPELVHIIKPSTKTGMYLIKHYSDPKKLLFVGIDKLNAIIKKVSRGRLGPDRAEQLHGAAKKSVGITEGKESILFEITHLVSKIESENHYVEDLEKQMGDYLEKIPYSHSILSITGIAHVTAAGLIGEVGDFRKFKTISEVLKLAGLDLYEISSGAHQGCRRISKRGRALMRKLLYFAAINTTRKNGILHGPYQRHLAKGMPRIKALMAIARKLIGIIFALVRDHSNYIADYSSQLVFKKAA

SEQ ID NO: 514266 - protein, 346 aa, unidentified
MTHQVAQQVIGGVDTHGLTHHAAVIDAVLGRQLADEEFPATAAGYRALAAWLAGHGEVVAVGVEGTGAYGAELARHLAQVGLVVVEVDRPDRKVRRAKGKTDPIDAYAAAAAVASGRAAGAPKSRIGAVEAIRMLRVARGSAVKSRTQAMNQIRMLLITAPAPLREQVDGLPKAALIRALVRLRPGADLAMPLHAAKFALRDLARRYQVLDEEIDALDAQIAPLVAATAPAVLELFGVGPEVAGQLLTSAGDNPERMRSEAAFARLAGVAPLPASSGRTRRHRLNRGGDRQANHALHTIAVVRMRYHEPTRAYVARRTAEGLSKLEIIRCLKRFIAREVFRALTAS

SEQ ID NO: 514267 - protein, 327 aa, unidentified
MFHVGLDIHTQRISICALDEKGQVIHRSQVRSIEEMVRTLRGLPDRFEVCYEASCGYGTFHDLLRPLAERVLVAHPGRLRLIFRSKDKNDRKDAERLAKLLYLGEAPTVHVPVLDVRTWRELINCRSQVIAKRTRAKNTVRALLRSAVVIAPRRPGLWTKKGLNWLRQLELPTVSQQLRRDLLLEEIETLTRQLQRIEQQLNRRALHTSAVAQLRSIPGVGVRTAEAVAAFVDDPQRFPHAKAVGRYFGLVPCQDQSGDKNRLGHITREGAPVVRQLVAEAAWQALRRSPTVRAYFERAQRGDPQRKKIALVATAHYLVRVMWAMLK

SEQ ID NO: 514268 - protein, 358 aa, unidentified
MRTREKNIFEGQLTIGLDLGDRSSAYCVLNEAGEIVLEHKLATTPEAMKQVFGSMPRCRIAMETGTHSPWVSRLLRELGHEVIVGHAQKVRLITKSRRKDDRLDARTLARLARIDPELLSPVKHRSAQAQLHLTEIRARAVLVSARTALVNAVRGLVKSYGERLRKCDTRQFRREASGLSTGLRRALEPLLCQIESLNESIQEYDRRIEKRAQETYPETALLKQVKGVGDLIATTYVLTLEDPHRFRKSRDAGCFVGLQPGRRNSGESAPQMRISKEGDEYLRTLLVQGAHYILGPFGEDSDLRRWGQKLSARGGKNAKKRAVVAVARKLAVLLHRLWVSGEAYEPLRNSQKAMGAAA

SEQ ID NO: 514269 - protein, 385 aa, unidentified
MRARNGACRLKASKPARKEGDDSKRMINVGIDVHKKRCQACLKDEKGKLIQELSIPNSTQGAEQLARLLESYGEAKIVLESTGNLWTRIYDTLNQSRTAFKVVLANPNKTRIIAEAKIKNDRMDARVLADLVRADLVAESYVPTPEIREQRALLRQRRSFVNDTVAVKNRIHNLLDKYDLKPEFSDIFGKRGLEWLRNLQLPPIERTILDVNLKQLQNLEESIHTLTVKIAQEAINRPDVKLLMGFTGIDYYSAMLLINEMGPITRFPSAKKLVSYAGLAPGIRQSADHTVHGRITRDGNKYIRWILIEAAQNASRFDPKLRPFYLRVAAKRGHQKAITAAARKMLVSIYHVLKRQETYHGQRDELLERKISRLQHTPNTSLQAE

SEQ ID NO: 514270 - protein, 341 aa, unidentified
MSKVTVYVGLDYHKDSIQVCVMDAAGQLLVNRPCPNDAGALARLVAPHGERVRAAIEACCGAAELADELVARFGWDLDLAHPGYVHRMKQSPDKSDYSDAKMLADLVRVGYLPKVWLAPEDVRQLRILVRYRQQLVNQRRAAKLRVTALLRDARVAEPGPRRWGRAWWAWLAACAGLGSEARFVLDGHLADLRRLDEQVARVEARLAAVTEGDPVVGQLLAQRGVGPVTAWALRAEVGRFDRFGTGKQLSRYCGLSPRNASSGPRQADAGLVKAGSELLRAVLIEAAHRLIRYDERWGALAASLRAAGKPACVVAAAVANRWVRWLFHQVQGGTIVLRAAG

SEQ ID NO: 514271 - protein, 356 aa, unidentified
MSRDIKYIGMDVHKEAIVIAVLNGSGKLVMESVVETKASSILQFIHGLRGELHVTWEEGTWAAWLHDLLQPQVAQVLVCNPRRNALLKEGSKSDKVDARKLADLLRTGMLRPVYHGEHGLRTLRELGRSYQTISRDLNRVMNRIKALYRGWGIACGGIQVYAPRFREEWLQKIPHPGVRRRAELLYQQLDGLQTLRRNLRPELLAESRKHKAAKLLRQIPCIGPIRAARLIALMQTPHRFRSKRQLWTYSGLGIETHDSAQYRYVRGQLQRAKKPQQIRGLNQNHNHEMKEIFKGAATRGSCGVGPLRNFYVALLDKGMKPEMARLTLARKIAAIALTLWKKEERFDAEQLKPQAA

SEQ ID NO: 514272 - protein, 343 aa, unidentified
MQISRIGLDLAKYVFQVHGVDAQDEIVLRKTLRRDGVAQFFAELEPCIVGMEACCGSHYWARVLTDLGHEVRLISPQFVKPYVKSNKNDRNDAEAICEAVGRPSMRFVPPKSPEQLEIQAVHRIRQRVVASRTRLVNQVRGLLGEHGVVVARDITRIRRALSEIADSNESGFGDIFIDMLRDMRDELGELDIRLAGYNRRIKNLFRSNEMCQRIGRIEGVGPITATAMVAAIGDKSCFKNGRQFAAWLGLVPKQHSSGGKARLFGISKRGDRYLRTLLIHGARAVLSRAAGKTDARSQWIGRMRERRHPNVVAVALANKNARIIWSLLSKDQEYRPAHEVSFS

SEQ ID NO: 514273 - protein, 414 aa, unidentified
MDKQWNIVCGADIHKKFLIATILSRDGTKITKRFGMTLDELLNFKNWVIENGCEQVAVESTGTYWVPIHTVLEGSIGLIVGNAYKIKHTPGNKNDLGDADWIAELCLNGMIEPSRIFPKADRDLRRLTRIREGYVNDMTREKNRIHHALESCGIKLSSVLSDIFGKAGQSILSGLLEGRTIDDILKGVNLKRIKATAEEIREAIKGSLDFTQILLIRGSLEQMEAIQKRIDEICREIKSKIAYRKEDLKIAMSIPGVGFTSASTLLAEIGDITDFKKPEQLAAWAGLVPSVYQSAGKLITGSITKHGSRHIRWILVQVARVIARGRNSKLKRFFLRVKSKKGSNVAVVALARKILCILHHLLTNREMYKEDGINKKVKIDIGNEFSQREMDLEEMIEYIVRAGYEVRKGSAGGG

SEQ ID NO: 514274 - protein, 338 aa, unidentified
MKLYGGMDLHSTNVVTQLIDEHDRVVYRNKQGCDLADILRGLESFQDVIEGLAVESTYNWYWLVDGLMEAGYRVHLVNTAAVQQYEGLKYTDDDTDAFWLAHLLRLGVLPTGMIYPKECRAVRDLLRKRSQLVRQRTAHIVSIENLYARNTGTRLNSNAIKRLTQEQVQQHFADPNISLAVESNRVILMALSEQIEVLETAILAQAKLDPRYRYLLSISGIGQVLALTIMLETGCIERFRQVGNFASYCRCVGSEKLSNGKKKGRGNTKNGNKYLAWAFIEAANFAIRYNDRAKRFYQRKAAKCNRVVALKAVAHKLARASYYVMRDHVPFDDMKCFV

SEQ ID NO: 514275 - protein, 341 aa, unidentified
MEWTVAIGVDTHKDVHVAVARDRFGAQLDGLEVETTESGYRSLLSWALELGVPAFAVEGCGSYGAGLVRLLELAGLAVWECERPHRRERRRGKNDSIDAALAARRLLTGDGLCLPRGGGQQRDDLRILLLERRSAVRARTAALNQLSALVVTAPDHVRTRLGSLSGERLARAAARQRARPGTSNGVLRRLGRRVERLSQEVAEVERELADLVAELAPDLLSEPGVGPVCGAQLLVSSGDPKRMASEASFAALAGTSPIDASSGKQQRHRLNRGGDRQLNWALHVIALARIRHHAETTSYHERLLATGKTTREARRCINRALARHFYRRLREIPTTCGVPKL

SEQ ID NO: 514276 - protein, 309 aa, unidentified
MEHFIGIDVAKDRLDVHTRPGGEVFAVARDSNGLAMLVERLQRLAPALVALEATGGYETVVASALGAAQLPLAVVNPRQIRDFARATGKLAKTERIDAAAIAHFAEAVRPPARPLADAEARALGELVARRRQVIEMIIAERHRRRMASQRRVIRAIERHLALLQAELSELEGDIDDAIRKSPAWQADADLLVSVPGVGKVTLRTLIAELPELGHLNRRKIAALVGVAPINRDSGTLRGRRTIAGGRPAVRTALYMAALVASRANPVIAAYYAKLRAAGKTGKQALVAGMRRLVVILNAILRDRKPWQPA

SEQ ID NO: 514277 - protein, 418 aa, unidentified
MLQGNVELAAFVGLDWADQKHAVTLQESGSDQRHRITLDHTPEALQSWIQSLRDRFSGRPVAIAVEQKRGALIYALMHVEFLHLYPVNPVTAKMREAFYPSGAKDDPSDADLLLDILISHRRHLRVWTPDDALTRSIQLLTEDRRRVVDERTALTNQLTAVLKTYFPQALDWFGDLHTARACAFLQRWPSLQQLKQASPSSIRKFYKAQGYRGDDKRDQLLANIKKAQPLTQDTAVLLSGSMKVETLVQQIPLLTEAIERYDQKIAALFDQHDDSTLFGSFPGAGPALAPRLLAAFGSNRDRFECASEMQELSGIAPVTEKSGEGIWIHWRLACSKFLRQTFHEFAGCSIVQSDWARACYDQMRKRGKSHHAALRALAFKWIRIMFSCWKNRTPYDEAVYCNSLKIRRSPLADELPAI

SEQ ID NO: 514278 - protein, 347 aa, unidentified
MGYFAGLDVSLEETAICIVDDAGQIVHEARAASEPEALVAFFRTAGMAMERVGLEACSLTAWLRQGLTEAGIAAICIEARQAKAAMGAMPNKTDRNDARGIAQMMRTGWYRAVHVKSPTCRSWRALLTARRMVLNKRRDVENGVRALLREAGLKVGTPSRKNFAARVGELVADDPVLAGLAQSLLSVIDVMTREVDSLTKRVLDEVRVEPTCRRLMTVQGVGPLTALAFRATIDRPNRFRRSRDVGAHLGLTPRRYQSGETDVQGRISRCGDELARTALYEAAHSLLIRSTKWSVLRAWGMNVAKRRGMARARVAVARKLAVILHRIWSDGSEFRWGKQAATPAAAA

SEQ ID NO: 514279 - protein, 390 aa, unidentified
MCVDWRGADGKLKREVRNYQTKRKSPRAMVVWFKELGVTHAALESTANYWRPVFDQLEMVCVVVLLNPYFVKQMPGRKTDVADCIWIARLLRKGLLRASFIPPREIRDLRDLTRLRTVRVEHAVKVGNELRQCLEKAHIKLDSVASNLLGVSGRAMIRAMIKGETDPEVLANLARRRLRGKIPELRAALDGRLNDHYRFLMRQHGDLLETLEQQGEGLEQELERRLPPFDWAVRLPMTAPGIKKIAAATILAEIGENMDCFETARHLTSWAGVCPGNNSSAGKSRSGRNPRGNRYIKGILVQVALAASRTKQAYARALYGRIARHRGKKRAILAVANSLLQAIWYMLKHRQEYKELGVNYYEEQNKEQLTKALVKRLERLGHQVNLRPAA

SEQ ID NO: 514280 - protein, 446 aa, unidentified
MKALPVLDPKAAAIDVGSEKLYTSIAGDTPKIFGTFTIDLEKLCAWFREQGVHSVAMEATGVYWLYLYEVLEAAGFEVVVVNGRHVQNLPGRKTDMADCQWLATLHAHGLLRGGFVPPADIRQLQDYQRLRNDHITGAAAQVQKMQQALERMNIKFHDVISDLVGVSGLKVVRAMLAGERRPGELLALCDMQIQKKKAGRVQESLRGCWKKEQLFALQQALELWEAYQEKIAACDQELATLLHQLVGPQPPERGNAGSLVGPVALAPAKNPGKNTPVIERLQEMLARLCGGRDATQIPGFSTYLVLQLISEVGTDMSRWQTEKHFCSWLGLAGGHKQSGKRKGRAKAHRNRAGRMFCAAARGLANSVDKALGQFYRRVRGRIGGLAANVALAHKLALLFYRLLRYGMTYVEQGLKAYEARVLETETRLLQKLAKKQGFTLIPTAAA

SEQ ID NO: 514281 - protein, 461 aa, unidentified
MNKVKTKSGGFTTMPIVNAHAAGIDVGSRSHFVAIGQGTEDVKEFGVYTGELHELCKHLVSVGCTTVALESTGSYWQPLFVLLQQYKLNPILVNGKFTKNVKGRKTDVQDCQWIQKLHSMGMLEGSFIPDLLTEQIRQYYRHRQCLVESAASYINKMQKALRLINIRLDAVLRDVMGRSGRDIIEAILRGEQDPKVLAALAQPTVKAPRSEIIAALTGDWREEYIFELRQCYELYQYYHQKIDECDKVIEKILTEEVVRKQNEEGTSKVSEVKIKKKKARKNEARINLQHLAVGLTGGIDLSCIEGVGLGFLLTLIAEVGVDLKAFPSGKHFSSWLSVAPDLKKTGGKVINSGKTRKGKGRLAHAFLHTANAIGNMKKDSYLNYFFKRIQRKRGRAVAIVATANKLAKIIWNMLVKKVSYNPIIPAEYLNKIRQNQIRSMQRKIRQLGIRQEELSFLCDYQ

SEQ ID NO: 514282 - protein, 374 aa, unidentified
MDHHSEVFVALDTAKLRNAVAIADAGRNGEVRYLGEIDNSEAETGKLVTKLARKYARLTFCYEAGPTGYGLYRLIKSIGHDCIVVAPSLIPSKPGDRVKTNRRDAVNLVKLLRAGELTAVWVPDERHEAMRDLVRARDAAVKDYRIKRQSVSSLLLRLGRHYPGKKTWGRAHINWLTSVRLEHREQRIAYEEMLLAVRQVRERIDRLEQAMREAVADWTLSPVIEAVQAMRGIDMVGAIAFLAELGDLSRFESPRQLMAYLGLTPSERSTGESVNRGGITKAGNTRARRLLIEAAWSYRFPPRVSKDMQTRVGAAPRIAREIAWKAQMRLCGRFRTLTRKGKRPTIVVTAIARELSAFIWAINREVAGSHATAN

SEQ ID NO: 514283 - protein, 403 aa, unidentified
MSNYFAGLDWASKAHALCIIDAQGRVVERFEIGHDAAGLAELQRCLRRLGSPPIAIERPSGLLVDTLVEAGLTVVPIHPNALKASRPRYRSHGGKSDASDAYVLADLLRTDGHRFKALSPQGDEIKALQALVRGRDDLVATRVQLANQLRTLLESFWPGAAGVFADIDSPIALAFVERYPTPESAKALGPKRMAAFCAQHAYCGRRSAEDLLARLHQAPTAVCAELEMEAKGELARSLARTLKSLVEQIRLLSSRIEHHVASLEDGKIIMSFPRAGRICAAQLLAELGSVRERFVSDEHLAAEAGVAPVTYASGKSKAVVFRWACNHRLRAALTCLADNSRHANAWAAHVYAKAKARGCDHPHAVRILARAWLRVIWRAWLDRKTYDPAQHRAAQLLLKTAGG

SEQ ID NO: 514284 - protein, 372 aa, unidentified
MKQNIIHIGLDVDDTQYHGAAFNKETGEVVNFKSRPTLKGLLQQLDRMARHFKGHKIKLCYEASYVGYCLQRDLISNGVHCDIVSPSSIPSPRGKAIKTDRIDAGYLAQFYANNLLTIVQPPDEEQEQDRDLLRSRQKVMQQRNQLRKHLQSVLRRSGLHYKAETGNKSHWTKHHYCWLERTIDGLCGSLKVNLELLLRQLKSLNEILTEYGQQIDMLASSPRYQSTVQSLTCYKGIKNVFALTIITEIGDIRRFSHPRKLVSWIGMDIREYSSGGKYNRFGITKHGNRYIRTAFVEANQRGYRTAKIGQDLKSRRKHIAPELVNIADRCLRRLNKKGNRLLMAGKHPNKVKVACAREMVGFVWESLNKAAA

SEQ ID NO: 514285 - protein, 398 aa, unidentified
MTESSDYESVQVFIGVDVGKDTHHAVAINRSGKRLFDKALPNDEINLRSIISGLKQHGQILLVVDQPATIGALPVAVARSEGVLVGYLPGLAMRRIADLHAGEAKTDARDAAIIAEAARTLPHALRTLKLADEQIAELSMLCGFDDDLAAQTTQASNRIRGLLTQIHPALERVLGPRLDHPAVLDLLQRYPSPEKLASLGEKKLAAQLCKLAPRLGKRLAADIAQALAEQTVVVPGTNAAAVVLPRLALQLITLRKQRDEVALAVEQRVLAHPLYPVLTSMPGVGVRTAARLLTEVACRAFASVAHLAAYAGLAPVTRRSGSSIRGEHPSRRGNKALKRALFLSAFAALRDPLSRAYYTRKMSQGKRHNQALIALARRRCDVLFAMMRDGTFYTPQAS

SEQ ID NO: 514286 - protein, 401 aa, unidentified
MRKPKQRQTKPRQSKQRKPNDLSRCLAALDLDRTLIAVIEMGASSWLVAGLVPGVERQPLKKLETDEHALLALLERWRGEAVRSGYAITRIVVAYEAGRDGFWLARWLRAQGIEAHVIHAASVAVSREHRRAKTDRLDTELLKRAFLGWLRGERDHCKMVAIPTLAQEDAKRPNRERESLVGEQSRIVNRMKAALARLGIRGFNPKLKKAVERLDGLRTPEGEPIPPNTLAELKHDMERRRLVRSQIRDIEETRLERLEQAPGEGPHVMVRLLARVIGVGVETADMLVQEVLSRNLRDRRAVARYGGLTGSPDESGKKRREKGLARSGNARVRRGMIQLAWRFLMFQKDSALAQWFYARTKNAPQTRKTMIVALARKLLIALWRLVREGTIPEGVVLRPAS

SEQ ID NO: 514287 - protein, 345 aa, unidentified
MKKIIIGIDFSKETFDATLFDCRNSELSEAVQSAVHEKFTNKKEGFQAFLTWIKSFVKKINSAELLLCGEKTGKYSLALSNFLYAKGYSIWLDSGLRIKRSLGISRGKSDKADSLKIALYAYRYQDMAVCYVPLSKNVSRLKELFLYRQHLVSQMKAMAVRKNVTDDFKKELGDVRFIVDSATKIIQQIKATIKKCEEKMQEIIEEDEELKTTHDSITSVKGISLINATAFIAYTNNFKDFGGNAKKIATYWGVAAFAQESGTSVHKGARVSNIASKMLKSLLTQAARIAVRWEPKFSQYFEHLISRGKHQGVALNNVKNKLIHVITALAVSKEKYNPEYECINR

SEQ ID NO: 514288 - protein, 421 aa, unidentified
MKLNQLFSPFPAYIGIDWADRKHDLCIYDGQTQTWTHRTIDSTPQAIADWVTQLRKQYGEAQLVVGLEQKRGPLLYALCQYDNLVLVPINPRTVANYRKAFQPSRAKSDPIDAKLIVELMQRHGDKLDVWTAGCPKHRALRQWVESRRMLVGEKVRLTNRITASLKSYYPQVLDWFEDKHTITFCEFLEHFPNLRSAQDASPETLREFFRSHHVVRKATIARRTEQIQQSGPPLTQDEAIIVPAQALTQALVALLKVILTQLVTFEAEIEALFDSLPDAALFQALPGAGPHLAPRLLAAFGEDRSRFNSAQSFMSYVGIAPVKEESGKKHWVHWRWSCPIFLRQTFVEWVDHARMHSGWSQAFYKQQRLAGKSHQKAIRSLAYKWGRILWRCWQDRTPYNEEKYLAALKRKKSPLIALLAN

SEQ ID NO: 514289 - protein, 314 aa, unidentified
MNNTEHATKSVVGIDVAKDNLVLFIDSRREHLTCPNTGKDLSRLAKRLKKLDPELIVLEASGGYEKAAAAAFSAAHLPVAVVYPRRVRQFAHGLGLIAKNDEIDARLIAYYGRVAEIKPQPRQTDELCGLRALTQRRTQLIEMHLAEQSRLDTAHQSIHSNIKQHISWIERQILKIDGQIQTSIKADPHLNETDSRLRSVPGVGPVLSYTLITELPELGILSNKRIASLVGVALSHAKAAAQTANAFARAAAIRSAASMATVSATRFNPVIKAFYNNLCSKGKLKKVALIASAHKFLSILNSINKNHTLWLHSP

SEQ ID NO: 514290 - protein, 311 aa, unidentified
MANIICGVDVSSETLDCRIGGTTLEARVRRDPEGIAALGRFCVEHGVALVVMEATGGYEKLPFGLLWEAGVPCAIANARSVRRFAEAMGVLEKTDRIDAGIIADYARAKGLTAQAPEGPAQQRLRALVTRLRQLTELKVAQANQRRLVLEPTVLAIIDEMLALIARQSRALEVQIAELLSQDPLWRALDAAFREIKGVAGRTVARLMAEMPEIGTVSNKAVAKLAGLAPIASDSGKRQGRRSVRGGRAQVRSILVVVAGVVARHDPDLAAFHQRLIQAGKPRMSVRIAVARKLLVRLNAKARDARALLLAA

SEQ ID NO: 514291 - protein, 359 aa, unidentified
MNTLTKIERFFKETPFSADDQLFVGVDVHKKSYHVALYLNDAPSIDFVMPANKEQLSQTLKPARPALRQVTYETGFSGYGLARCLTRDHLPVSVAATSKIPRPSAADDKTDKLDSKKLAEYAAKGLLKSVAIPTLKQEADRQLYRMRHRQSRNLAKVKVQIKSFLLMHDITEPVGLSHWSQQAVTCLRTVSLRTTLRLSLDELLSDLDYYASRLKSLEKAMAEHLDKGALARRIALLKTHPGVGSVVACQFATELFHYRDFNSTREVFKYLGLAPRIHQSGEHSIRGSINKMSNSRLRSNLNQAAWRWVAVDVNAKKTYLRILNNCGGIKQKAITAMARKLAGHLWMMLIKDQPYDLTK

SEQ ID NO: 514292 - protein, 343 aa, unidentified
MEHYAGIDVSLESASVCVVDASGRIVREAKVASEPEALITWFGKLGVEVSRIGLEAGPLSQWLYAGMREAGLPVELLETRHVRDAFKAMPVTTDRNDARGIAQLMRLGWFRPVHCKSLPAQELRAVLTARKLVQGKRHDIEMSLRGILRGFGLKVGPTTPRSFEGRVRQLVEGHPTLLAIADALLLARATLAEQLGKLQKRLVSLARDDTRTRLLMSTPGVGVLVALTYVAAIDDPARFRSSKAAGAHFGLTPKKYQSGETDITGRISKIGDASVRTALYEAANVILTRPVKGSSLKSWAMRVAKRAGMRKAKVALARKLAVVLHRMLADGTQFAADKAAAAI

SEQ ID NO: 514293 - protein, 349 aa, unidentified
MIIIGVDFHPGFQQIAFVDSESGEFQEKRLAHREEAESFYRGLASAGEKIRVGMKSSGYARWFERLLSELQIELWIGDATEIERKRARKQKTDREDAQHILQLILKDDFPKIWVASWENRDLRQQLWHRHRLVQMRTRIMNQLQAVALNEGLSYKKRLWRGSGRQQLEGFQLGLWATRRRRDLLELPDRLNPTIAELSQAAEQEAEKCPEANRLMTHPGVGALTALAFVLILGNAERFECGKQVASYLGLVALEKSSGKRRRLGHITKQGNSILRFLLVEAAQATVRKNPEWRSKYFHLALRRGRSIAKVAMARRLAIRLYWMWREKKEYQQTRSFVSHAGQPGNLYRA

SEQ ID NO: 514294 - protein, 386 aa, unidentified
MKTVAGLDVHKDSVYLCILRENGEKIERVYGVLTPQLDSMRDFMAENKVSEVAMESTSVYWIPIWRVLVDSFELKLVNPYFIRQLPGRKSDVKDAQWIAECVMKELIRGSFIPSPLVQRLRLYDRRIFEINAELVRKYSKIDAILQRCNIRLSNYVSNTDCKSYKAVVKQISEGVTSPQELLRHVHKRIINKHGEDTILAALTGVVSDSEIDMLAQYVAESAILEDNKNKCIEKMREICNSEFKEQMKNLQEIPGVSERSALTVLAEIGPDVNAFPSAKHLVSWCGFNPRNDESNKKIKSNKITHGNRFIRIASVQCAWAASRTKDCYFSKFYAFHTQVRKKFKLKVVVAVARKVLVCIWHILKFNVPYKDFEPQKSVTKDCIQFA

SEQ ID NO: 514295 - protein, 367 aa, unidentified
MRKSSKVFVGMDVHKESIDMTIAEVGGEIRRWGQIGGDRAALEKAVRKLESSGAELCFVYEAGPCGFWIQRLIAARGHACWVVSPSLIPQKSGDRVKTDRRDSEKIARMARAEELKPIYVPDESDEALRDLVRARDDAIIAQRRARQQLQALLLRNEIRYVGKCAWTQAHRRWIAQLKLPQPVQQIAFQEYVDAVEVASHRIERLTHAIERSTEGWRFAPVVKHLQALRGVQFVHAVTIICELGDLARFEGPRQLMAYLGLVPTENSSGQRRHQGAITKSGNRFARRALIEAAWAYQYPARITPIIARRQTGLPKHARDIAWKAQLRLCSRFRKLCARKLNRNKAVVAIARELAGFVWAIARDVKLD

SEQ ID NO: 514296 - protein, 331 aa, unidentified
MKIKETIGIDVSKLTIDVTVHSNKAYCKFENTVKDFKKMVNWVFKQSPFSPENVLFVFEHTGLYSHRLAVYLTKENISFSMVPGLEIKRSLGIVRGKDDRVDSRSIARYGYRLRDEISPCKLPSKELKSLKTLLALRETKVKQRSGDKALLKEYKLVYIRKDNEIVFKILEKSIKSLSKYISEIEQEMDKVVKSDRGLKNQYELVTSIKGVGPQIALYTIVLTEGFTKFKTHRQFASYCGVAPFPNVSGTSIRGKTKVSNLANKKMKSLLDLGAKGSLQYNLEIKTFYERRLELGKSKMSTINIIRNKLIARMFAVIKRNSPYVDFMKYAA

SEQ ID NO: 514297 - protein, 343 aa, unidentified
MYFIGVDHHKQVSVMTVLDEDGEELKRGRVPNLRRYVEQFLEGFRPFTAVLEAGRSSYVMADLLRELGGEVKIANAFQVKAIAHARIKTDKRDSRTLAHLLRAGLIPEIYQREAWNRRAQRVMRMRAYWVSKQTEVKNKIRALLAQQREEVRLEVEKHESVLFSPKGLDFLAKLPLEAREKEVLDDLLEGYQELQGHIKKSDGLVRALYGEIAEASRIDTVPGFATTLSVLMAVEIADIRRFSRAAELHSYAGVIPSTYSSGERSYHGHITKQGNVWLRWAALEAVYPAIKKDFGLRVLYSRLARRKGANVAKVAVARRLLTIIYRVLTEERDYIPDMKQSAA

SEQ ID NO: 514298 - protein, 355 aa, unidentified
MNKINSNFEGQTIFVGMDVHKSSWNLGIHLNNMFVKNVHQKPNPAVMANYLKQHFPGAKYKAAYEAGKFGFWIQRQLTSLGIECLVVNPADIPKSQKDSLQKTDPRDARNLGLRLQSGVLHGIHIPDEQQEADRVFFRHRKRIWKDLCRCKNRIKGLLAFTGIDIPDQYDNASWSHNFINWLKAVDCKQKSRRRALDYMISQMEYLRKELLTISNEIRKMMREQRYKTNYYLLRTIPGIGPLTAASILVEIGDVKRFETFYHLNSFLGLLPMEHSSGQSENKLSLTVRKHRQLRSDLVESAWTAKRTDPAMALYFQEQIKRKDSKIVIIKIARKLLNRIRFVLINQQPYEMGIVK

SEQ ID NO: 514299 - protein, 408 aa, unidentified
MEVVVVVGAGLDVHKKKIVACCLDGRSSPPAVVTCTFGTFQDELERMRKWLLARECTHVAMESTGVYWMPVHQALEGHFEIVLGNPRHMANVPGRKTDVSDAHWIAKLLRHGLIQPNFVPPREIRDLRQATRYRRKLMQTRTACLLRVEKLLQCANIKLSSVASNIFGVSGRLMLDKLADNMTDPRELSELAKGTLRGKRGALLRAFRGSFSKDNASLLRVELKVIADLEARLEGLEKLIDRKIGPLEDVIERLDTIPGVNRVLAIDLIAEIGTDMTAWPSDRQFAAWTGTCPGNRESAGVRQKAKTREGNPYVKTILIQAAVCARQTIGSHLSARFHRLAARRGPRRAAVAVAREIAVAAYHMISKQVPYTPPRTADPAVAREQRSRQLIRELTKLGYEVNCNPVKT

SEQ ID NO: 514300 - protein, 321 aa, unidentified
MQSSDFIGIDVAKATLEIATADATSPTQTLANDRTALSSWLATLPATAQLALESTGRYHELAVELATGRGLPVYLVNPRALHHYAKAVHRGAKTDRLDARLIARYLAHEHAQLRPYTPPSAAVQELLRLQRQRTQLVVTLTGLRQSLAELDVCRPEQRTALQGVRQLIAALDARSAELLAAEPARADLAKRLATIPGFGPLNSRHYATLLPRLDPPRLSALISYVGLDPRPRDSGTFRGQRKLSKHGPAETRRLSYLAAMAAARYDDAWKTLKNQLIARGRSTTEAFCILARRLLRIAYALYRDGGVYDPAKLAPEGGQTT

SEQ ID NO: 514301 - protein, 409 aa, unidentified
MRIIGLDIHRAFAEAVAWEDGRLRRLSRVDMRRDLLAAFAAKLSPNDVVVIEATGNASSAAAVIAPHVKKVVTANPKQVRIIAYAKIKTDTIDAGVLAQLYASGFLPEVWIPDEPTQALRRQVTRRNQIVRQRSRLKNVIQSILHSHLIPSCPHADLCGAKGRSWLSEQIVPEDERLAIDRHLREFDRLGDDLQVIERDLARSALEDEGVKRLMTIPGVDMTVALAMKAAIGDVSRFDEPQKLVSYLGLNPSVRQSGPGPAYHGRITKQGRGHARGMLVEAAWAAARAPGPLRAFFLRVRARRGQHVAAVATARKLAVVIWHLLTKGESYAWARPSLHAKKLRDVELKAGSKAVRGQKGAAHAYNIKSHREEERRWVEQAEGAYARFVTGWNPRGPRKARTDAANEVRR

SEQ ID NO: 514302 - protein, 344 aa, unidentified
MSNLDTCGIEISAKELVVRLRRGEGLEPLRNFTNTPEGHLIILRYLRRAGRVVRVCMESTGLYGLDLALALSGQEGIEVMVANPRAVRHFAHALMKRSKDDQIDAGVLEQFAVHMPFKPWQRPSVAMLALHALARRLRERVEMQTAEKNRQHAAGLSQATPPVVRRDLARSLRAQKRALERLTRQARKLIAQDPQLTERFALLDSVPGIGETSAVQLLGELGVLAPDLEARQWVAYAGLDPRHCRSGTSVHKKPRISKAGNKHLRHALFMPALVAVQHDPHLRAFYQHLLAKGKFKMQALVAVMRKILHALHAMFKTHQPYDGSKLFRLNPAPAQEVTHALVAS

SEQ ID NO: 514303 - protein, 310 aa, unidentified
MQVTTIGLDLAKNVFQIHGIDEHGEVAFNRALRRAQVLAFFERLEPCLVGIEACGTSHHWARELIKLGHNVKLIPPAYVKPYVKRGKSDAVDAAAICEAVTRPTMRFVEVKTPEQQAILSVHRTRDLIVRQRTQTINMLRAQLAEFGIVFPQGVYHALQFAKDCVGGEQTELPMNAQAVVFDLCDQLLFLHAKILRHTRHMTQIAKSEKRVALLHTIPGVGPITAPAIVATVGSGKQFNNGREFAAWLGLTPLNKSSGGKECLGHISKMGDQYIRRLLVLGMTSRIRSIRSKPEKFDPWFADILSRKPSK

SEQ ID NO: 514304 - protein, 328 aa, unidentified
MAGTQCVGVDVSADEITVAIEGRAQRVTLTNDANGHQRLVRLLTRRGKASRVCLEATGIYHLDLALALHRATGIAVMVVNPTAARDFGRALLLRSKTDRVDAGVLLEFAQRMPFETWQPPAPEILDLRAIVRRIEALTLTRTQERNRLHAAGRCAELTSAIAWDIEAHLEHLAQSMERLQQQALAIVTAHPELDRRFARLVSVRGIASVSALRILAELAVLPADMTPRQWVAHAGLDPRALDSGTSLHKPARISKKGNRHLRAALYMPAMVAVREEPNVRGFYQKRITGGLKPIQALVAVERKLLHAIHGMWSSNSDFDGEKFCVKSA

SEQ ID NO: 514305 - protein, 375 aa, unidentified
MIKDSEVFVAFDTSKLRNAVAIAEAGRAGEVRFLGEIENTAGATTKLVRKLEAKYERITFCYEAGPTGYELQRHIRGLGHECIVAAPSLIPKKPGDRVKTNRRDAVSLVKLSRAGELTAVWVPERRHEAMRDLTRAREAAVIDLRAKRQRISALLLRQGRPYPADKKTWTKVHMNWLASQRFEQPELGVVFAEMMFATRQAQERVERLEQAIRTAVPDWSLAEMVTAFMAFRGIDLVSATCLLAELGDLTRFPTAPEVMGYVGLGCSEGSTGDRIKRGGITKSGNRRARRTLVECAWSYQHPPRVGIAKQAKVAAAPTKVREIAWKAQCRLNRRYRVLLRRGKLKTVAITAVARELAGFLWAAARELSSPQRVAK

SEQ ID NO: 514306 - protein, 415 aa, unidentified
MKIVFPTCCGVDVHKTFLVATIITTPTDNLQPHYQKKRFSTFNSDLNRFADWLLKHDCLDVCMESTGKYWVPVFNILEKRGIRVVIANPKWVKAVKGNKDDTKDSKWIGDLFRIGLVKNSFIPNLDIRILREFTRYRYKLVSMKSSEKNRFQNAFTVCNVALDSVVSDMFGKSATAITDYLTSDECFAPEHCVSLLQRSLKKKAKQVLESIEGYSIADEQKLRIKIIREHHNFLEQMIAKVDTCVNEMVKKYEGEINLLCTIPGIERNSAITIISEVGTHMEQFASSKQLCCWAGLTPGNNKSAGKKKSVQISRAGVYLKPALVQVAHAAVKDNKHPYYKLKYERIANRRGKKRAIIAIARMILTAIYSMFRTGEVWNPVDLFKIDMPEHLKGQQLAKAIKQATKFLEKQGLTVA

SEQ ID NO: 514307 - protein, 380 aa, unidentified
MKKIRFIGLDVHAETIAVAVAESGRGAEVRSMGIIPNRAESVRKLVKKLGPSDQLRACYEAGPTGYALYWRLAELGVKCEVIAPTLVPMKSGDRVKTDRKDAERLARSFRAGDLTAVWVPDPAHEALRDLVRARLAAKRDQTRARHRLSKFLLRHGRRPKNNIGAWTGAYLNWIKRDVHFDQSAQEATLADYVHEVEHAQERIDRLENAIDEAIALMPERMKEVVESLQSLRGIAKISAVTIMAEVGEVSRFKTARQLMGYSGAVSREYSSGERTRRGRITKTGNAHLRRIIVEAAWSYRHRPSIGAALKTRQKTASPEVKEIAWKAQNRLHRRYVRLMAKGKTKQKVVTAVARELLGFIWAIGVTVEQKHGSTAIKRAA

SEQ ID NO: 514308 - protein, 336 aa, unidentified
MAQKHILGIDVSSKDLVIFDTASGSHATIDNTEAAIHKACLQNLWSKDSHLVGLESTGDYGLQTMKTFLVLGFEIKLLNPILTQNAIKRTIRGAKTDATDSELIAELVSKGEGQEISENSLNTEKKTLIRVERKLSAMQSDLKRITKALALKQAAGVDVVIAQGIVSELLEHFNASETQLWQTIADQDTALAKQEQIINSHVGCGMKLSAIISEEAGDIKRFASARQLIAYAGIDPKVSQSGEKDTRGRMTKRGNPNLRHALYLAAASASRFDPQLKDYFERKRTEGKHYTVAVCAVARKMCERIYSTVTHDRMYEKREPAVKEPSLSPENLLTGI

SEQ ID NO: 514309 - protein, 344 aa, unidentified
MTYYAALDVSVRTVAICIVDQEGAIQLERSVRSELADILKALNDFGAPIANVGFEAGVLTQYLTYGLKAAGHEVVCMEARQVSAALAAMRNKTDKNDARGIAQILRTGWYSRVHVKSIESHYVRALLASRKAIFNKCIDLENEVRGLLKVFGVKLPPRVYHGAFDSEARKAIEGDAPLSEALAPMLDARLVLLRTFRDLDARVKRMAREDKVCARFMTVPGVGSLTALTFKAAVDDPARFASSRTVGAHFGLTPRRFQSGETDNPGRISRAGDADVRAALYIAANSMMMRSVQWSWLKAWGTRLIKTKGRRRAVVAVARKLAVILHRMWADQTDFRWSNSEATA

SEQ ID NO: 514310 - protein, 525 aa, unidentified
MSEVSLMHQTKYRGIITEAGLLTTPPWEPAFRLAKPLRKSVSPFGGDLCFGWLGGLRLYLYEPLGCVSAFWNWMPAGKDKTMHYQKVLRMLQSIPYLSVGLDVGADFTWMSIMLPNGTLTGKPFKILHSDPHSRDLGVAKIKEAQETYSLESRCFLESTGIYHIPLLCFLRDKGFDCSVINPIITKNSTNMNIRKLHNDKFDSKKAAKVGLDASLKTSIVPDDAVIDLRNLVRDYYYFKDLQSAVVLKLHAELKVSFPAYLNVFSKITTQTSLKLLEAYPLAADMLAAPKDELVESIRQTARFGEKYAVSKYEAICAAAKDAAVFGRALPSNALRIRLYIKTYREYQEHLGSILKELHKAVEKLEGTPVYDRILLLQSLRGVGFLSSVVLIAEMGSFDLFPSPKKLYAYFGLDPAVKQSGKFNADKVHMSKRGSSLARRILHMVALNNLKVDKGTKTPVNPVIHSYYADKCKNKKKNVAVGAVMHKICNIIFAMLRDNKPFEIITPEEHCERYLETHPDKAQNAA

SEQ ID NO: 514311 - protein, 400 aa, unidentified
MFVGWDWASTTHDVTVIDDAGRIVDRWAPEHTEMGLDATMARLTRHGRPEQLPVAIERPSGLVVDRLLAAGHPVIPIHPNAFHAARPRWGAAAAKSDPGDSFKLADYLRTDGHRLRRLRPLDAATRELQALSRLRDDHVAAKTAASNQLGALLEAHWPGAKHVFSRIGSQIALAFLDAYPTPESAARLGEARLAAFCRRHSYRGGRSPAELLGRLRSAPAAPVGLAPEVLAELVGAQVRLLRILLATIAELDRALGAGLLGHAKAGLLAPLPRIGEVSLAQVIAEVGPILDRASTVEHATAECGAAPVTKASGKSKAVTFRWAANTKARNALATFASNSRHSSPWAAKVYADARRRGKHHPHAVRILARAWLRVMWACWHNDTIYDPARHGAERRLAART

SEQ ID NO: 514312 - protein, 402 aa, unidentified
MNAVGIDVSKGKSTVAVMRPFGEVVLSPFEVSHTGKDLSALAEKLKSLPGETRVVMEHTGYYHAPVALALHESGIYVSAVNAMLVHDYGNNSLRRAKTDRKDAIKLANYALDQWLSLPQYHPEEDTRLMLKTCYRQYEQFSKIRTMQKNNLISLLDNTFPDANKLFSSPAKTDGSEKWVDFVEQYWHCQCVCEMTQKAFIRSYEKWCRKHGYNFSEDKALDIYVSAYGHFCVMPKCEATKLLIQQAVAQLQASSRALAAIKQQMQDLASTLPEYPAVMGMYGVGPSLGPQLMAEIGDVRRFHSKSALVAFAGIDAPPYQSGQLDICSRSISKRGSAQLRRTLFLVMSVILQNSPAAEPIYQYMDKKRSEGKPYKVYMMASANKFLRRYYATVKAYLEQSDFV

SEQ ID NO: 514313 - protein, 359 aa, unidentified
MEQKRFVGIDLGKRTYEMKIIGINGKVTGTNGQTNPSGRKLLYRKLLATDRVAIEVCSLGMVMAKEIQKEVGCEVVLLNPSQLVLIYRSLKKNDKEDALKLARLVQKYKNEELPKVELPTEHEENLRQILTEIRQLKNDRTKEINRLHAIFVECGITEIKKKDLATIDNRIKCIKMLKGIALAQAERILKKLELVETQIEEVEELLDKEIDGDKNIEKLTEIPGVGKQLASAYVAFIGDGSRFPNASTIGAATGLVPRLDMSSTVCRMGHITKCGNKNLRTLLILAAWSHVRSRYGGALKDKFLYMTRFQSKGKKIAIVAIARKLAELMYILLKNDTSYEKRPSPTISQLVDEAMKFSS

SEQ ID NO: 514314 - protein, 338 aa, unidentified
MKITTIGLDIAKSVFHAVGVDKAGKVLKKKMLRRKDLLPFLAQIEPCLIVMEACSGANYWAREFELLGHNVKLIAPQFVVPFRQGNKNDYNDALAIAEAAQRPNMRFVKPKSVEQQDVQLLHRMRERLNKQSTALINQVRGMLAEYGIVITKSKSAFKVQFPEILANETNALTTKGRAIFYQLYEEFSDIEKRLKSCDAQVLTEIKNNVICQRLETIPGIGPVTATAFYAAAGDGKDFTNGRHFSAWCGLVPKQHSSGGKDNLLGISKRGNAYLRTLFIHGARAVLQHSQNKQDKFSCWAIQLAERRGFNRACVAVANKLARMAWVIAAREEEYRLPV

SEQ ID NO: 514315 - protein, 347 aa, unidentified
MRFYTTQHPFYCGIDLHARTMYVCILDQAGETLLHRNMTATPEALLKAIAPYREQIVLAAECMFTWYWLADFCAEHGIPFVLGHALYMKAIHGGKAKNDKIDAHKIAVLLRGGMLPQAYVYPAEMRATRDLLRRRMHLARKRGELLAHVQNTNSQYNLPAIGKKIAYKANRDGVAERFADPAVQKSIEVDLALITYYDELLRDVELTIVKTAKHHDANTLYLLQTVPGIGKILSLVLLYEIHDIERFPRVQDFASYCRLVKCARESAGKRSGTSGAKIGNAHLKWAFSEAAVLFLRDNPAGQKLLTRLEKKHSKGKALTILAHKLARAVYYMLKRQTAFDLETFLHA

SEQ ID NO: 514316 - protein, 348 aa, unidentified
METQRHIGIDLHRSQFTCCVRLENGRNYLTDWKLEDLPRFIKKLRPNDEIAVEVTGNTRLFRDAVAPHVARVVAVDPNQFKVISHSVKKTDPNDARNLALYLEKDLLPEVRMKDKTQAQLASLTQTRDTLVKLRTALKNKINNILSAHGINLQKEALSSEKQLREILAMKFDAMVSIELEVIIEEIRSLNQRVAKLEKTITEEGSKLEGHKNLTSIKGIGPLSGSILLSVIGDIDDFEDEGKLAAYFGIVPRISNSNETERSGRITKRGSKLGRTALVQCALIAQRYSPYLKRYYENIKARRGTGKAIIALARKLLGIIYRTLKNNWVFADFPNFVLAEEGRCGAAIA

SEQ ID NO: 514317 - protein, 400 aa, unidentified
MLSIGIDVSKGKSTVCGMKPGGEIVYTPFEVQHTREGMSELVSLLRSSGEEVRAVLESTGSYHCPVVAALLENGIFVSVINSLRMKRFCSQSIRKVKTDRIDAMQIALYGLAYWQELQPTRLPEDTYRELQLLARQYYQMTSILIKAKVDFNAICDQVLPGMQELMNDHAGRHKLSDFVLQYCHTTHILEMGETRFRKDYCKWAEKKGYRNCERMAALIFATAQNGIPVLPNAPSTQIVITEAIRVLHTVEASRDAILTQMQALAKTLPEYSLVREMPCIGDTLAPRLIAEIGDVRRFHSKRALIAYAGIDAPPYQSGKFCANNRHISKRGNRYLRKTGYEVMQSYVMHKPANDPIFTFIEKKRGEGKRGKLAMVAGLNKFLRVYYGKVTELYRSLPAIE

SEQ ID NO: 514318 - protein, 388 aa, unidentified
MIYVGIDIAKLNHFASAISSDGEELIKPFKFTNDNDGFQLLISKLDSLDKDSLIIGLESTAHYSDNLVRYLVAKNYKVCVLNPIKTSTMRKNNIRKTKTDKVDTYIICKTLMMQESLRFVTFYDLDLMDLKALGRFRQKTIKQRTRLKIQLTSYVDEIFPELQYFFKSGLHQKSVYALLKEAPTPEAIASMHMTHLAHLLKVNSHGRFNKEMAQQLRVLAQKSVGASDSSLSIQVTHTIQQIELLDSQLERVEAEMTEIMKFNDSVIMTIPGIGYINGGMILGEIGDIHRFASPNKLLAYVGLDPSVYQSGSFQAKKTRMSKRGSKVLRYALVNAAHNVVKNNATFKAYYDAKMAEGRTHYNALGHCAGKLVRIIWKMMTDNLEFNLN

SEQ ID NO: 514319 - protein, 411 aa, unidentified
MHYKQKHIYVGVDLHKKTHTAVVINCWNEKLGECTFENKPAAFHELMAYVKSFTKKGMTPVYGLEDVGGYGRSLAVYLLENNQKVKEVNSAFSYAERKSYPTTQKSDSWDAECVAKILLNKLDILPDANPQDVYWTIGQLVTRRNGLVKALVALKNQLHMQLSYHYPSYRKFFSDIDGKCALAFWQKYPAPHLLEGVSVETLAAFLRKSSHNACSTRKAEDILSLVRADGDTTRSYQEQRDFLIQSHVRDIKFKKQEIQYVENEVSRMMDRLDYQLETMPGIDLVTASALVAEIGDINRFASADKLARFAGIAPVNFSSGGKGTNQKSRQGNRVLHGLFYNLAVQQVQISKGSKKPRNPLFYEYFNRKKEEGKTPTQALVCVMRRLVNIIYGMMKNKTAFRMPEQVEQRVS

SEQ ID NO: 514320 - protein, 423 aa, unidentified
MRHKQSAAGMQVLYARVCGLDVHKKSVMACLRVLDPKSGRVDITVQGFGTMSEDLLELRHWLKDAQVTHVAMESTGVYWQPVYNLLEDHFESWVVNAQHIKKVAGRKTDVSDAEWIAQLLQCGLLRPSLVPDRAQRELRDLSRQQTKLVQHRNAVNNRIQKVLESANIKLGSVASDVLGVSGRKMIEALISGEKDPSVLAELAQKKLRDKIPQLRRALAGELSDHHRFLLGELLVQHDFINQRIQVMAQRIDEVAPRPFVAAVQKLDAIGGVAERGAKALLAETGTDMTRFPTHKHFASWAGQCPGNHESAGKRKGGKTPAANRHLDAVLTEMAHAAVRKKNSYFKAQYHRLAGRRGKKRAIGAVKHSLLVTIYYILRDDKPFQDLGPNHFNSLNPQQRIRFHVRKLQELGHTVELSPIANAA

SEQ ID NO: 514321 - protein, 342 aa, unidentified
MLFVGLDVSVAETSVCVMDRDGGLVLEGKVRTDPVAIGLYLAKHAPAAERIGLEAGGSSSWLCRELRDQGFPVVHMEARHAHRALSMRINKTDRNDARGLAELMRVGWFKPAHAKSVEAHRSRSLLLARQRLINMRRDLENQIRNIMKTTGTMLGSTAGRGFSARVRAACDGSEILAAMCMPLLQVVTTIRDQIKAYDRLLLGMARRDETARRLMTVPGVGALTSLAFMSAIDDPARFRRASDVGAYLGLTPRRHQSGEMDWSGRISKLGDGLARTYLFEAACVLLGRIERWSALKAWGVRLVRKVGSKKARIAVARKIAVILHCIWVDGTEFQWAVAPAEA

SEQ ID NO: 514322 - protein, 428 aa, unidentified
MSENSTTHPEPEFVGFVGIDWADQKHAWCSPRAGATQREQGELEHTPEMVEAWVSQRAQRFGPGPIAVAVEQGKGALVFMLNQYEGLHLFPVPSTMSASMRKSLYPSGSKDDPRDAELLLDLLLQHRKKLRRLMPDKEVTRRIQNLVEERRTWVDEKTTQLNRLTGYLKVYFPQMLEWFEKLDTKLVCDFLERWPSLEELQKVAPAELRKFFRQRRGRHQELTERRLEGIRPAMPGIRDRAVLEAKQAMVQVSAQLLRTLLEGIANLDSKIEEAASAHPDFFIFKSLPGAGSALAPRLLAAFGSQRDRYGSAEEVQKHSGIAPVMERSGKKKWVHFRWACPKFLRQSFHEWAGHSISQSAWARAYYQQQRGRGKDHHAAVRALAFKWIRILYRCWQDRVAYDENKYLAALARRGSPLSFVLTVTAPTL

SEQ ID NO: 514323 - protein, 315 aa, unidentified
MMRTQVFVGIDVSKAQLDVAFRPEGRVSVPNDEAGCAQVLERLRAVPPTLVVLEATGGLEIPLTGVLAAAGVPVVVVNPRQVRDFAKATGRLAKTDTLDAQTLAHFAEVMRPELRPLPDEQTQALAAILARRRQLVEMLTAEKNRLGSAPKPVRKSLRTHIAWLERELSHTDSNLAHAIRESPVWREKDALLRSTPGVGPVMTTTLLANLPELGTLTGKQIAALAGVAPLNRDSGTWRGKRTVWGGRAQIRATLYMAALVAARFNPVIRAFYQRLCATGKAKKVALTACMRKLLIILNAMLKHRTPWRTELVQCA

SEQ ID NO: 514324 - protein, 491 aa, unidentified
MVTARKPSSKAKGSHAQRSAPEREARARQRKASKGDPRGSTLSLKHPDAAGIDVGARVHYVAVPEGRAAPSVRSFGAYTAQLDELVQWLKSCGIKTVALESTGVYWIALYQKLEEAGLEVVLVDARRAKHVPGRKSDVQDCQWLQQLHSYGLLAPAFRPKDAICRLRTLQRHRKSLVECAAMWVLHLQKALTAMNLHLHHVLTDLTGQSGLAILDAILRGERDPKKLASLSDWRVKQPQAQIEAALTGDYRAEALFVVEQALQSYRHLQQQIAQCDLAIEKQVAALDDCPRPGQAPTPPGPVPPEAAAAKPRKGRKPPTAQEVSLAGHLKRILGVDLTAIPGLNVLAVLTLLSEIGTDLSKWRHAKAFASWLGLSPNNKVSGQRVLSSRTRQVNNRAATILRLAAVAVGKTDTPLGAFYRRKRAQLGAPKAITATARKLACLIYRLLKEGQGYQEGDVRTYELRYKDQILRALRKRANGFGFDLVELPKAA

SEQ ID NO: 514325 - protein, 414 aa, unidentified
MSETSSPTPPPAVLAYVVGIDIGMESCLMCCLTMEKRQVIKPSQFSNEAAGFEWLFAHLEALKSTPEQILIGLEATSRYGENLYYALRSKGYRVCLLHPGQIHAFAHQRGLRAKTDRLDATTIARALLSEEARFGYVPSDQVVTYRELTRLQQQLTEEMVRYKNEIHALLVVLFPEFTQVFADPSRPSALTVLKAYPSAQVMREADPKQLHQLLREQCPGRYGRKTADKLVQLAKSSVSSGVGVQGRSSSMRILCDQLEHTQNNLTLLQQEIERLLGNDPKAKGVLAISELGPMTVAVLRAELGDLDRFARMDQVVAYAGLDLQVKQSGKWKGQTKLSKRGSGRLRRILYLAALRSIRLPTSPFGVSYHRLVARGMKKGMAVVAVMRKLLIVAAHLIQTQEDYDASKVGVQALS

SEQ ID NO: 514326 - protein, 404 aa, unidentified
MIFVGIDWSEHHHDVCVVDEQGTQLAKVRVPEGMQGVVKLHETIADHAEEPEEVIVGIEIDRGLLVGALVAAGYRVFAINPLSVDRYRDRHATSGAKSDPGDAKVLADLVRTDRHNHRPVAGDSELAEEIKLIARTHQSFVWERQRHVNRLRSALREFYPQALEAFGTELASADAIAVLKIAPTPELGRRLSRSKIAAALRRTGRQRNLEPRAEQIQRALRSEQLRASEGLERTYGVIVSSLTGLIEGLNTQIAGLQDDLERSFEQHPSAEILRSLPGLGIVLGARVLGEFGDDPTRYADARARRNYAGTSPITKASGTRRVVLARFARNERLFDACFLWAFANLTKSPGARRYYDLQRARGKTHNQALRALANRLVGILHGCLRQGELYREDVAWRGRESLAA

SEQ ID NO: 514327 - protein, 344 aa, unidentified
MEQFSRIFVDTSKSVFQVHAVVGPREKPFRRKLRRSEVLAFFAATPPTVVGLEACGAAHCWARALEKLGHEVRLVPPQYVKAYLKRNKNDGRDAEAGCEAMSRPTMRPVPVKSEAQQAVLMLTATRDRLVRERTRLTNAIRGHAAEFGLVAAKGLDRVGPLLEKIAAEAVLPDLALGLFAELGEELAALEARIGRIERALLVWRRQDEVSTRLTAIPGVGTVGAVMLTAKTPDPKGFASGRDFAAWMGLTPKDHSTAGRRRLGAITRAGDEALRSVLVCGAMAVIRQVKAGRRQPTPWLADLLAHKEPKEAAVALANKTARIAWKLMVSGQAYEPEQATAPMAA

SEQ ID NO: 514328 - protein, 428 aa, unidentified
MTHSEIKSTEFAAYIGIDWADQKHDICLREAGSNRIESLQIDHKPDSISNWVSELRQRFQGRSIAIALEQKRGALLYSLMLYEFIILYPVNPHALASYREAFKTSGAKDDPVDADLLREMVYLHHDKLHPWTPDDPLTRELSLLVEYRRRLVDDKTRLTNRLRALLKQYFPQALDWAGELDTLRALEFLTRWPQLEAIQVATPEQVRDFYRQYYRLGEKLPERLAEISAAQPLTRDKAVNNASITMVKGLLETLRGLIAAIEAFDQRIETCFEQHSDKDIFNSLPGAGAILAPRLLAAFGADRARYQSAKEIQCFSGIAPVTERSGKTKFVRRRLACPKFVRQSFHEFAKSSINWSAWARAYYDQQRRRGNKHHEAIRSLAYKWARIIYRCWQDHKPYDESVYIAKLELRGSPLAKLIPTAVEQAEAS

SEQ ID NO: 514329 - protein, 440 aa, unidentified
MSNRTEKQNVPQMKASAKDTVLWVGIDWADQKHCVATRRPDGSDSKLHWVDQKPQKLDEFFLELQKQHLTGHIGVVLEQSRGALLYALLKYSFLELYPINPRCLADFRKAMAASGAKGDPSDADLLCELGCKHGERLRALELEDEATRQLELLNEHRRGIVDEQTGLSNQLGSALKCYYPLILELFADHLVAPIALDFLERWPNLAALQKAKPGVLRAFFHKHNGRSEEKIQERIKAIGEAKPLTNDAVVIACYQLQVQTLIERLRAVQAGIAQYDERIKVVFASHAKARVFSSFPAAGPVLAPRLAAAFGTSEANFPAPDAMLCWSGVAPIQIQSGKSKVVHCRWARPKFLHQTFVEYARTSVLFCPWAREFFKSRTEKGWGKFRIYRALAFKWIRIMWRCWKDNVEYDEAKYLAGLQKRGVQLYASLYAAPDAKKPNE

SEQ ID NO: 514330 - protein, 443 aa, unidentified
MSAKRRYRRTSVKKISLETLKDLALEKAGAGTCVGLDIGKNEIVAVVRWADGAFECPWSVKNPSEITELIGLLKMLRETGDSLTIGLESTGTYGEVVRAAMTATSLEVHRISGKASSDYKEIFDGVPSQHDGKDAAIIAELTCFGKGTPWPFEPRSETNQEMRYQLQRLDVFDRHATEWCGRLEAVLAAHWPELSGLLSPKSSTLINIMLHYGSPARLAADVDAAKNLRLWGGSFLGARKIDQLIDSARTTQGVPVGEADLSWIQEIAKELKQSILQVKSSKKRLETIAQSHAGMSNYVDPVGAVTLCMIWSSVGDPRNYDSSGAFLKSLGLNLKELSSGKRQGQLGITKRGPSLARKFLYLWAMRALKRPELQRWYLDFQKVGRSTSTQHRKMKGLVALMRKLSRSLWYVCQHDQEFDYAKVFPGRPLEKRKRRRRNKRVAA

SEQ ID NO: 514331 - protein, 350 aa, unidentified
MTTIARRITGGVDTHLDVHVAAALDERGALLGVESFPTTVAGYRALLHWLESFGTLELVGVEGTGSYGAGLTRHLLAHEVAVVEVDRPNRQRRRRTGKSDPADAVAAARAALGGDATGSAKSRDGNVESMRVLRVARFSARRSRTQAINQMRSLISTAPDELRSELRDLSIYRILTIASAYRHTGRTDVTTLTKLSLRTLARRALALEEEVKEIDSVLKKLLAETAPALLAVDGIGTDVGTAILVAAGDNPERLKTEATFAKLCGVSPLDASSGKQERHRLNRSGDRQANSALWHIVFTRMVNDQRTQHYIERRMKDGRTKKEAVRCLKRYVAREVFAALPRSEFVLDSP

SEQ ID NO: 514332 - protein, 371 aa, unidentified
MKDTIKYVGLDVSKENIAVSVADPGREGARYLGTIPHTEYHILKVLRKLGQPNELSVCYEAGPTGYPLVRLLTAHGYDCIVIAPSLMPSRPGERVKTDRRDSMRLAQLLRAGELTRVHVPTPEEEALRDLVRMREDVKEDRTRIRQRIGKFLLRHQIAPKEPLRRWTAKYRLWLGRIPFESASQRLVLQEMLHQMDENEERLKRMEAAIHEEATEGHHAPLIQALQTLRGVAETTATGIVAEVCSFTRFGNAKAFMGYTGLVPREYSSGQSRWQGNITKSGNTHLRRLLVESAWSYRYKPALQGELKKRQQGKSPEIQAISWKAQHRLHRKYTKMLSKGKPSGKAVVAVARELSGFIWSIARELEEKRINR

SEQ ID NO: 514333 - protein, 351 aa, unidentified
MAIVGGFDIHRRQVTFDYLDTVTGEVRRGRIAPACRQVLRDWLGRFAGHDAVTFAVEGCTGWRFVVEELQRAGITALLAEPAETAHRRSPKKRAKTGRADARHLRELVAGQKVPCSWIPPQQALELRVLLQLYRDLEEERTAWEQRIHATLFHQGVPSLAGLLSDPRARALLEAGQDTGLSPAGAQAVAVAVGRLDDLQAHTAAVRRQIATFARRQPGCRALQRELYGVGTLVAAVIWAFLGDTRRFASSAHAVRHTGLDVTVSSSDNKRLTPGRLSHQGPPILRWALFEAGHHASRAASPGHACYTGVAARIDANRAALSVARKLARRSHHILRRLGDQAWTPVPMPTGR

SEQ ID NO: 514334 - protein, 335 aa, unidentified
MKEITTVGVDLAKSVFTVHGVDAAGRTVLRKTVRREKLMELMVALPPCLIGMEACGGAHDWARKFEAHGHRVGIMMARFVAPYRKSSKNDGNDAEAICEAVARPNMRFVPVKSAEQQAILSLHRVRQGFIEQRTATINRIRGLLAEFGMVLPQRAEQVRRAAVVVAEELPILVREAIADLRAHLSYLDQRIAQYERQLIELARQREAAVRVQRLPGVGPLTASAITASISDGHEFANGRQFAAWLGLVPRQYSTGGKARMGRITKRGDAYLRTLLMLGARAVLQSAAHKTDRLSRWAMALRARRGYHRAIIAVAAKNARIIWALLANNREFTPPV

SEQ ID NO: 514335 - protein, 315 aa, unidentified
MTSTQVFVGVDISKAQLDLALRPEGQFSVPNNEAGFAQVLEHLNAVHPTLVVLEATGGLELPLTGVLAAAGVPVVVVNPRQVRDFAKATGRLAKTDALDAQMLAHFAEVMRPEPRPLPDEQTQALAAILARRRQLVEMLTAEKNRLGTAGKPVRKSLRTHIAWLERELSHTDRGLAQTIRESPVWREKEALVRSTPGVGPVVTTTRLATLPELGTLTGKQIAALVGVATLNRDSGTWRGKRTVWGGRAQIRAVLYMAALVAARCNPVIRACYQRLRAAGKAKKVVLTACMRKLLIVLNAMLKHRTPWRAELVQCA

SEQ ID NO: 514336 - protein, 412 aa, unidentified
MDTIVERCAGIDIGKASLKATVRVQGGRGRKTRREVRTFGTTTPELLQLRDWLVDERISLVGMESTGVFWKPIFYLLEDVIECWLLNARHLKKVPGRKSDVSDSEWIAELVAHGLVRPSFVPPRPIRRLRDLTRYRRALTQERTREIQRLQDLLEDAGIKLDCVVSDITGLSSRHMLSALIEGERDPKVLAGFAQGRMRPKIPDLQRALVGYFTDHHARLCRKMLGHIDSLTATITELTGEIDTAITLFHQARRRLSSIPGVSARVAEVIIAETGGDMNRFATPQRLVSWAGMCPGNNESAGKHFSGRTRKGNRWLRGALGEAAAAAGRSKNTYLSARYRRLSARRGKKRAMVAVGHDILMAAWFILVREVDYQDLGADYFDVHVMDPRRKATRLAQQLQALGYRVTLERAA

SEQ ID NO: 514337 - protein, 289 aa, unidentified
MHREFAQVAVWEDGVVRQVGQIALTDEALRIFADSLGPEDEIALEATCNTQAIVRLLEPHVARVVVSNPQKTRAIAEAKVKTDKVDAEVLAQLLAADYLPSVWVADPATQALRRQVARRAHVVRQRTRLKNQVQAILHRNLIPRCPAADLFGIKGRCWLANQPLPPDEALTVEALLRQLDFHGQELRIIDAELGRVALGSPEVKRLMTIPGVDATVALSIVAAVGDFRRFRRPRAAGVLSRAQPAGQAVRRAAGQPRADHQARPRPCPRNACRSRVGGDQNTRSAARVP

SEQ ID NO: 514338 - protein, 338 aa, unidentified
MKLYGAIDLHSTNNVTVLIDEQDEIVYQKRLPNDLPLILQQLSPYASSIQGIVVESTYNWYWLVDGLMGKEHVVHLANTAAIQQYEGLKYTDDHSDARWLAHMLRLGVLPVGYIYPKEERAVRDLLRKRGQLVRQKTANLLSIQNLITRNTGSSLSANRIKRLGAEEVEGILTDADVALAAKANLSVMRSLEAEIATLERVVKERVKLRPAFRYLLTVSGIGPILALTIMLETGDIRRFSTVGNFASYCRCVGSEKISNGKRKGSGNTKNGNKYLAWAFVEAANFAVRYEPQIRSFYQRKKAKAHRVVALKAVAHKLARACYHILRDEVPFDVARAFA

SEQ ID NO: 514339 - protein, 364 aa, unidentified
MQQGKDIVLVVDYHAENIEFRWYDESIGKDHTGNFPTKQADILRLLEQATAEVEPGGQVVWIMESTTGWARVKDLLGDRVRFVLVNVVQMPLPPKARRRKSDKIDTARILREYLNGQLPTSFQPSDHWRQARRIVDARQDLVERQTAIRNWISSLLHHETWEDRQNLWSGAGLARLRSMKRPAGDRLLVDLRLEQLEHLAQQQQQVEAQMQVLYDAWREAQWLDAVRGIGMVTAVSLLAHIGPIERFASPEDLISYAGLAPGVQDSDGTIRHGHLGGGGTDGHLRYLLIEASIWLRQIPRYRPTYERILAKRGKKIARIVVARLFVRSLYKMLREKVCFHPGSAQSAGKPNGRRSKEVTTTTTP

SEQ ID NO: 514340 - protein, 384 aa, unidentified
MSQDNARAAGTPQGELGAIFASIELSKKTWLLTTMSPGAGDKMSRHIISGGDIGTLFAQLTTLKRKAYDRTGRRYPFVIIQEAGLDGFWVHRALTAEGYESHVVDAASIATSRRKRRVKTDRLDGESLIRALLAFKRGEPRVCSMLRVPNPDEEDRRRIVRERKVLMEERIRHSNRIKGLLFSQGITGYDPLRRDRREQLEMLRTGDGRPLPPNMKRQVLREFARMELLIDQIKEVEAERDDMLIEERQSVREVALLSKVVGIGPEFAAVLWGEGLFRHFDNRRQVAAYAGLAPTPWQSGSIDREQGIGKSGNPRLRSTLLEMAWLWLRHQPSSTLSRWFNERVAQNGGRFKKVMITALARKLVVALWKYASAGVLIEGAVIRP

SEQ ID NO: 514341 - protein, 340 aa, unidentified
MKIIGCDFHPSFQQIAMVDTETGEQTERRIAREEAGEFYRGLSGPVRVGMEASGNTLWLERLLAELGHELWLGDAGRIRAMEVRKQKTDRRDAELLLRLMIQDRFPRLWVPSQKQRDLRQLLVHRHKLVGMRRQVKNQLQHLALNQGVQQKHKLWTRAGRKLLEELPLEGWTARRREESLQLLDDLEGRIMPLDQAVKQAAEKDRVAGLLQTHPGVGAITALAYAVTLGKIERFRHSRQVVSYLGLNPSEHSSGGRQRLGSISKQGNTMVRSLLVEAGQSAARLDTELKRAYQRLKHRKHSAVAKVMVARKLAVRLYWMWKREQPYAATRMQGSPSHPVA

SEQ ID NO: 514342 - protein, 448 aa, unidentified
MFIMHYKRLLTFIDGVSSYLSVGLDVGADFTWMSIALPNGSFIGKPFKIVHSDPRSRDLAVAKIKEAQETYSLKSRCFLESTGIYHIPLLCFLRDKGFDCSVINPIITKNSTNINIRKLHNDKFDSKKAALVGLNVSLKTSIIPDDSVVDLRNLVRDYYYFKDLQSAVALKLTAELKVSFPAYAKVFSKVTTQSSLKLLSSYPLAEDMLTAPKDDIVKIIRSTARFGEAYALRKYDTIIAAAQDAAVFGRALPSNAVRIRLYIDTYQEYQKHLDALLKALHETVDRLQDTLIYDQICLLQSLRGIGFLSAIVLIAEMGDFKLFSSPKKLYAYFGLDPAVKQSGKLNGDKVHMSKRGSSLARRVLHMVALNNVKIDKGSGTPVNPVVYDYYTRKCSGKKKTVAMGAVMHKICNIIFAMLRDNKPFEVITPEEHCRRFAAEHPDKIRKAA

SEQ ID NO: 514343 - protein, 315 aa, unidentified
MLYDGIKGRIKTRNIQNNRHSVENILRWLRLQHCGPEDVHVVMEATGVYHERLATELHDAGFYVSLANPHRSREFARGMGIMTKTDKVDAYMLACYAFLKNPHRWEPPAPEIRYLGALLRRRDVLLGDALREENRLEKYLSTDTPADIISSCMHMAQLLREEVSNIERQIKAHIKASPALRRDYTLLTSIKSVGPQLGMHMLVVLRSHDFSSAEQAAAFLGVVPIEKRSGTSVRSRPRMSKIGPPQLRAKLYMSALCGKIYNKRMRNIYDEMCLRGKPKMVAIGALMRKLVHWCYGVLKTGIVFNDEGLKQVLST

SEQ ID NO: 514344 - protein, 351 aa, unidentified
MLIIGCDFHTRYQQIAMAEDSTGELLVERRLDHESGEAQVFYRSLPKPVRVGIEATGPIHWFERLLAELGHDLWIGDAARIRASEVRKQKTDERDAALILDLLLAKRFPRIWVPTPAERDLRQLLWHRHKLVSLRTMLGNQLHFLAMSQGLCRKKKLFTKRGRRELVALPLGPWARRRREELLKLLDQLEPPIAELDRAVLEEAKRREDAVLLMSHPGIGPVTALAFVLAIGPVARFPRSKKIASYLGLNPSEESSGGRRRLGAISKQGNTMVRWLLIETVHHAVSQDPELRQDYQRLKFRRGHAVAKVAIARKLAVRMYWMLRSGADYAQLVRKQGSPGGTLMNANSSLA

SEQ ID NO: 514345 - protein, 317 aa, unidentified
MDELRSVSICVGIDVSKDRLDVHLRPSDEAFSVARDGKGLETLVERLRALDVALIALEATGGFETTVAAALAGAGLPLAVVNPRQIRDFARALGKLAKTDAIDAKVIAIFAEKISPQARPIASLQAQRLGDLVARRRQIVEMIGMEQNRRRRAGEKRLIKQIDRHIAFLEKELAGVDSDIDAGVRASPVWRETEELLTSVPGVGPVTARTLIAELPELGQLDRRKLAALVGVAPFNRDSGTWRGHRMISGGRTSVRTVLYMASLAAIRFNPVIRANYQRLVARGRPKKVAIIACLRQLLKILNAIVRDATPWAVQSA

SEQ ID NO: 514346 - protein, 333 aa, unidentified
MKTLTLGIDVSKATLDAALWLGDRSKWHTKAKVDNQPAGVHTLIDWLRTKTALAPSACRVVLEATGVYHEVAAQVFHDAGCEVVIANPKRVRDYAKGRGLLTKTDAVDARVLARYGAEGDELVPWLPPAPEVRTLRALVARLDAVSQDLQREENRWEKAQTIDTPGPVRDSLQRSLSALRAERDRLLRAIDDHYDQHPPLKQARDQLKTIPGVGDACARRLLCLLKRHRFESARQAAACAGLIPIEYQSGTSVCKRPRLSKQGDRRLRATLYMAAIVAARHNPPLRTVYLDLIGRGKTKMSALGALMRRLVHIAFGILKHQTPFNPALVSKIA

SEQ ID NO: 514347 - protein, 383 aa, unidentified
MRKIQETLQAQSTTTQDIMYIAFELSNSTWRLAFSDSNKKRHVTIKARDLKQLEIEIIKAKRRFGLKDNVQIKSCYEAGRDGFWLHRYLLSKGIDNLVVDSSSIEVNRRKRRVKSDRLDAGNLLRLLMRYHGNERQVWKVVTAPTVKEEDARHLHREIETLLRERTRYRNRIKALLVQHGLDVKNPSRNNFLKVLNALRTWDGQVLPESMKARVVREHERLRMIEDHIKLLKKEREQRVKSKETASFQQVAQLRELCGIGVNSSWVFVMEFFGWRKFRNRREVAALAGLTPTPYDSGGSQREQGISKAGNKRIRTMAVEIAWCWLRFQPHSKFSRWFNERFASGGSRMRRIGIVALARKLLISLWRYLEHGVIPEGAIIKSAS

SEQ ID NO: 514348 - protein, 315 aa, unidentified
MAEQVVVGIDVSKAKLDVAILPSGEQFTVSNARPGVGQLVQRLTQLGPIRVVLEATGKLEHLAASELAAAGLPVAVVNPGQVRHYAKARGKRAKTDKIDARLIAEFARDLQPEIHPLPDAQTQALAALCQRRNQLLEMQQMENNRLERAPRASQKSIKAVVRFLKRQVEQVEKEIDESIKKSPIWQAKRKLLETVPSIAQVSSSTLLARLPELGQFSRQKICALVGVAPYEDDSGEWHGRRHIAGGRARVRQVLYMAALSAVQYNPVLRDYYQRLLARGVGKKAALIAVVRKMLTILNAMVRDNTPWRPPCPTPA

SEQ ID NO: 514349 - protein, 340 aa, unidentified
MWNIKFIGIDISKQTLDIYDENSSKHNKIKNTEKEIKKYFKSVSQTTLIVYEPTWVYGKKVEKVLNDLNKSHYQIHANDAHLLGKTLVWKNKTDKLDCKMLVQIAKVMYSNCKEQGGKNKFIKPNSNELNKIQTLLTSIRFMKSEIKKFKQQLEYCNMTPYSTKQQEKMFHKLIKELETNIRSLEQKIVDIYDSAGLLEKYQNIQSIPWIWRVTAMELVNFFLFLVNKWFERWHKKQVVAYAGIHPVAIESGSSLNSSKLSKGWKREIKSALFMVGMQRQKQYKYEKYTDTTLWKFTKRMIEKFRNEKNKRGKSVSCAVWKKLLVTAWALFRDDTQYNFA

SEQ ID NO: 514350 - protein, 339 aa, unidentified
MKYTPVGVDIAKHVIQIHFINEHTGEVVNKQLRRQDFLTFFGNREPCLIGMEACGGSQHWARELTKLGHKVRLLQARFVKAFVMGNKNDVMDARAIWMAVQQPGKEIAVKTEEQQSVLVLHRTRMQLVKFRTAQINALHGTLLEFGETIHKGRAAMEREFPEALERMKERLPPYLIMVLENQYNRLNELDSLIEDIEKQLTSVARQNETCKRLLDIPGVGPLIATAAVATMGEASAFKSGREFAAYVGLVPKQTGSGGKVRLLGISKRGDTYLRTLFIHGARAVALVAKEPGPWITELKKRRPASVAIVAMANKLARTVWAITAHDRKYDRNHVSIRPY

SEQ ID NO: 514351 - protein, 387 aa, unidentified
MIYYVGIDISKYKHDFCIISNTGEVIVENSSFENNKKGFQYFLDQLKSYNKSKCQIAFEATGHYSLNLELFLIDQGYSFMKTNPLVIHQFLKARSLRRTKTDKADSLTIANYIMSVPYKPNSNLLYNIYTLKSLCRSREQLIKEKSKFEVLLTNELDKSFPEIKPFFNNIISNTLLYILEKYKNTSHISLMKDYESLRKLSHGKFTYAKFALLKQLAKDSIGHYDDNSDLLISTYVSTINHFNEKIDPIDKQISTIIKELNPKMLSIPGLGEISAATILSEYGDIKNFSSSGKMLAFAGLEPSIIQSGTLENNGKMVKHGSGHLRYSIMNIAMSILRYSPTFYDYYLKKRSEGKCHRVALSHVCKKLIRVIYTLEKNNIDYNPSLLK

SEQ ID NO: 514352 - protein, 370 aa, unidentified
MSEPTTLFVGLDVHKDSIAVAHAEAHRADPPHFVGTIRTRQADVDKLVRRLHSKASTLVFAYEAGPCGYVLHRYLTGRGLDCWVVAPSLIPKRPGDKVKTDRRDAVELARLLRSGDLTRVYVPGVEDEALRDVSRARDATLVTLKAAKLRLKSFLLRLGLHYTGRADWNEAHRRYLAKVVCPTAAQQIVFQESVRAVDEQVERLRRVEQELLELAPTWRLYPYVEAVQALRGVQWIVATTVVAELGDLTRFDNPRQLGAFVGLIPSEYSSGESRRQGGITKAGNGRARRALIEAAWAYRYNPKISVQIQKRLESLPKPIQDIGWKAQLRLCKRFRRLRARGKHANIVVTAVARELLAFMWAIAREVPKTS

SEQ ID NO: 514353 - protein, 334 aa, unidentified
MQGKMTSVRANDAVYVGIDVCKAWLDVYVHPTGQVFRFANSKEGIRRLRKELDGTKVALVVTEATGKLHRLAHRMLSQAGYAVAAVNPSRPRKFAEAAGQLAKTDRIDARLLALFGEALSPAATPVPAKTVAELQELVLARQAVGANVYRERQALPQADETALKNRHGAAESAVLKRLLNRQLAACERTAADLEAAIAALIEADPALKSRYDILLSIKGVGPTVAATLIACLPELGLLPAAKAAALAGVAPFNDDSGDSRGLRRIQGGRAHVRTALYMAAISAARCNTDLKAFYERLRARGKEAKLALTAVMRKLIVLASALISENRTWTEKHA

SEQ ID NO: 514354 - protein, 365 aa, unidentified
MSNVRCVGLDVHEQSITIAIAEPGDAPPVVLRRIENDVNELLKTLRGLRHSGNTVKVAYEAGSLGFALFRRIQKDGFACHVIAPSRVPKDGRKKTDAEDALRIARFLRSGDLTSVYVPSAELEAVRTLVRAREDAIESQQRARQQLRHFLLRAERRSPHKTSWTQAHLTWIRAEKFDHPALTTVRDDYVREVEEAAARVARLTKDVEALIPQTSLMPMVTALQALKGVQLITAATIAAEIGNFSRFAKAKHLMSYLGLVPSEHSSGERIAQGSITKAGNAHVRRVLCEAAWNCRTAGAGKTIRTRRALADETVQQIAEKAQERLHHRYRHLAMRRKEANKINVAMSRELAGFIWAIARHVEGTKS

SEQ ID NO: 514355 - protein, 377 aa, unidentified
MTTTDAAAEARETVYVAIELSKKTWVLGIAHPDRARPSIHRVCGGNIAELVSRLRVAARNNRRILVCYEAGYDGFWLARVLAKMGIECRVLDPASIQVNRRARRVKTDRIDVLALLRALIATDRGERHVCAIVRVPSVEEEDARRSHRERQRLVRERTGHINRIKGLLFAQGIRDIKPKLRRTRIDFAALETAEGHPLPDRLRRELEREYARLSLIAAQLREVEKERDTADAQDPVVEQKRQLLVALHGVGATSAAILAREVFARSFASRRQLGSYLGLTPSAYDSGSTTRCQGISKAGNSGARRILIEVAWLWQKYQPASPLSHWYIQRTAGQSSRIRRIMLIALARKLAISLWRYVETGLVPEGVAIAKAKLRPA

SEQ ID NO: 514356 - protein, 315 aa, unidentified
MICGVDVSSQFLDVRVGRDGVSAHFDNDAEGIVQLAEFCQLHQVHLVVMEATGGYEQLVFGLLWARGIEVAIVNARSVRKFAQAMNILEKTDQIDSGVIAWYAETKKVVAMRPASVEQQRLKALVTRLRQLTEMRAMQRNQRLLVTETEVLGYFHQLMVFLNQQIKTLEKTIAGLIGSDPIWQKLDQTFRSIKGVADRTVARLMAELPEIGTLSNKKISKLAGLAPLADDSGKSKGKRKIYGGRHGVRDILYVVATCVSRYNADFSAFQARLTQAGKPKKVIRIALAHKLLVRLNAKARDVRQLHQPAAAAISAP

SEQ ID NO: 514357 - protein, 339 aa, unidentified
MSKIIRIGIDIAKHIFYIHGCDMNGKTCLRKKLQRKDLMTFFAQQPPCLVAMESCSGSHFWGRQLRSLGHDVRLITPQFVVPYRKSQKNDYNDAEAICDAAGRDNMRFVAVKSEEQQAALMVHRIREQCVAERTSLSNQIRGHLHEFGFVVPQGTTKIREQVPCIIAQDDFPALARLLLQDLLDAMDILEKRIKTLEQQIQQLNKNSDVANRLMSIKGVGPITASAMVATVGDPRLFKNSRQFAAWLGLVPKQFSSGGKTKLGGITKRGDSYLRKLLIQGARAVMYKASTSTDARSQWIHQLRSRKPDNVVATALAAKLARTIWAMMINGDSYHEFAVS

SEQ ID NO: 514358 - protein, 351 aa, unidentified
MKILAIDLGKFKSVFLDYVTGGGDQEFGKVETSPQAIHDLLAARVPDRLVIESGPSAGWVHDLAQTLGIAVQVANTNDERWRWRQVKRKTDRNDALKLARLSEMDCLPTVHVPCARVRQWRALIAYRHGLVDRRTGIKNNIRSIFERQGLRLPGGAKAWTGAGMADWGREAREVSVPAEQGWRYELHSELQLLAGLEKQIDEVEGKLKELSDADERVKQLRSAPFVGPRLSETVVAIIDDPHRFKNARQVGGYAGLTPRRWQSGTMDRQGHISHQGNKLLRELLVEIAWLGVRGGTWMKQVYENVRRGSDQRKKIAIVAVARRLLIRLWAMLRDGTVWKDPSPDVLGTIAV

SEQ ID NO: 514359 - protein, 361 aa, unidentified
MRKIQEYIMQGKEIYVGLDDSKKSWSVCVRSGQMVVHETSMPAEYENLRNYFRNKFPECKIRVMYEAGFRGFELHDKLLSDGWACVVTPPHALTQEKCNRQKNDRNDGRRLARNNESGDYRVCHVPDRHRREDRQVSRLYGQIQKDINRVCNRIRKTMDFHGLDRFFPCGSWDRRRYKVAEDILKTLKLSDSLGFTFNSLFTELVQLRVLQKDVLKQLRKLAHSEAYEQTVKLLQSVPGIGVLTAIRLALEWGDVRRFTTKEAFAAFLGLIPSDYSTGEQEHKGHITRQGNPQVRSWLIESAWIAIRHDPVLLEKYRRVVSHCGSGKKAIVAVARKLALRLRAMLLTMQPYQIGLTECPAV

SEQ ID NO: 514360 - protein, 331 aa, unidentified
MFPVGIDVSKNTLDLCMLYDGIKGRIKTRNIQNNRHSVENILRWLRLQHCSPEDVHVVMEATGVYHERLATELHDAGFRVSLANPHRSREFARGMGIMTKTDKVDAYMLACYAFLKKPHRWEPPAPEIRYLGALLRRRDVLLGDALREENRLEKYLSTDTPADIISSCRRMAQLLREEISNIERQIKAHIKASPALRRDYTLLTSIKSVGPQLGMHMLVVLRSHNFVSAEQAAAFLGVVPIEKRSGTSVRRRPRMSKIGPPQLRAKLYMSALCGKIYNKRMRNIYDEMCLRGKPKMVAIGALMRKLVHWCYGVLKTGTVFNDEDLKPVLST

SEQ ID NO: 514361 - protein, 426 aa, unidentified
MRVLYDRVAAIDVHKDMVKVAIRVPGAKRGTRKTDVLEFRTFYGVLQAMARELRGRGVTHVVMEASGVYTDPVYYALRELDFAEVMVINPAHAKALKGHKTDARDAIRLLDLYECGLLSGSYIPDPDLREVRDLARYRMKTVQARTSEIQRLQKTLETAGIKLSSVVSDVTGGSATAMIEALISGERRGAVMADLAQTRLRAAGKMADLSMALTGRFTDHHALMCRLHRDRITIFDDAVQDLDAKIAPLVARYAREAELLKTLPGFGDVIVAGWLGAIGPAPHQHFATASRLASWATLCPGNYMSAKKSKGGRTGDGGAYIKPLLIQAAWAAVRVPGRLQARFGRLVRKFGGPRNKGAQKRAITAIAHTLLKIAYSVLKTGKPYADLGADFYTRRESPDARQDYLMRQLQKLNPGCVITITPAEAA

SEQ ID NO: 514362 - protein, 312 aa, unidentified
METKKTQIEFEQIVERGCGIDVHKNIIVATIRGIGIKEETKTFSGFTASIEELRDWLKNNKITHVAMESTGVYWKPIFNILESDFEIILVNARHIKNVPGQKTDKKDSKWIAKLLLSGLLKGSFIPKKPIRELRDLTRYKRKIIEQIASEKNRIQKILEDANIKLSSVISDMDGATATKIINAMTSGVEDIDELLKFRHGKIQSSKEDLAAALKGNLTTHHKFMLQTIKMSITEKEAIIKVLDEQIYLHLKENELVLDAELLTSIPGVGKEGAAYILAEIGNDMGQFPDENHLSSWAGISPGNNESAGKKKK

SEQ ID NO: 514363 - protein, 322 aa, unidentified
MAKHTTICAGIDTGKRKLDVAIEGHREQLQVENTPEGHEVLMAWLRQHRVKRVGIEASGGYEQPVVAELRRKRFVVVVFQPAQVRAYAKFHLQRAKNDKIDAALIAACTTAVRKIHAAPDPRLLPFAEQLTMIDQINEDTARLKNRIESCRNARINKLWQEDIARLEMREKAELKTLVASIRKHPDLAKRLELINSVDGIGLPTAVAILVRLPEIGRITREQAVALAGLAPYDDDSGEQVGVRHIEGGRKRLRRALYTASLAASFRWNRQLIQLYQRLTAAGKEHKRALVACARKMLIFANTVVARGTPWCDEPPVGSLSVS

SEQ ID NO: 514364 - protein, 458 aa, unidentified
MKIRLGIDIACRSPHHAACADETGKMLWSGHRFRTTPTDLAALWARLPADALEVMVVMEPTRNAWVPLAAWFRRQGAVVVMVPSEQSADLRDYFSKHTKTDRLDAQLLARLPVLHPEGLHPVEALGPGDPLKRAVKIRAGLVHRRSTAMHRLDSLLEILGPGWVEALGSDMTQTAFRFLATYANPHQVKRLGRARLTRWFQHHTRKAWGSGRADLVVAAAEETLALWGHDGLDFEALAADIACEATLALELSEQIALLDRRIHDLYCEADPDGIVRSAPGVGNILAAQILGRLGDAHRFTSLAAARSYTGLVPKRNASGLTDHAGGPTKQGDACLRAALFMAADHARKTDPQLAARYQRLIRDGRHHNSAICTLATVLLTRIVACLRNGTPYQLRDTDGRPITKVEGRAIIAEHHQISPEIRAARRVLASTRPHPRRDERTTKGVAERSTVTPVPTPA

SEQ ID NO: 514365 - protein, 717 aa, unidentified
MSIDEFSLRYSDLVTGSYDCVDRIVLNAFFPLGYNPGGFRVWWRRWHDDSDAELDNTHLMRLAGRFARRVKAWGAANGVPVIFCTAGERKHRIAEAYLATHEVGIGVFLVLVAKAPAPVWKVVRSSKTDTIVNIERRREYVNHYSFHIIDPEWGHVTIKMSGHPPFGAQIILNGHEFVARQAGAAGIAFTKAGNCFTAVADPAGLARIADALSQDAAVGRLGQVCQRWIYTACLCFGLDRDEQHRSGFGYGFAVYQLEYSRNLIFADGTTMQRVFDTVVDRTRSRLDVPKVRTIFGSAQRPRRTRKRSSLIEAAIETPSYDLTVFKLHFGRLTGKAYTKDDMCWGTPSVQTLVAMASVMFQELEEVPMTMVGGLDVHRQQITFDYVDDDGLVHWGQIRPATRQTLRGWLAEHFRDGDADFALEGCTGWRYVSEELAAAGLGVHLGDPAETAALRGRKKRAKTDRADARLLRTLLVEGRFPESWIPPAHVVEVRTLGRLYCTLMDERRAWQQRIHAQVFHQGCPPIRALLTRAGREALAGAELSAAGRQYVDTALRRIDELSAEIDPLRTQLISFARRQPGCRALQRHYGVGWLCAVIIWAEIGDARRFSSSDQLVRFAGLDVTVYSSDAKRAPGHLSRQGSPELRWAAFEAAKSAARRGSPDHGYYHKLAAKHDGHNGKNPTLAVERKILRRCYHTLRELGDAALALPDIRPQEVAA

SEQ ID NO: 514366 - protein, 343 aa, unidentified
MTYFAGLDVSLEETSVCVLDGNGAVVREAKVITDPGAIASWLRERGYSASKLGLEAGALSTWLFHELTTQGWDVVCLETRQVHQVLKAHRDKTDRGDAVGIAQLLRSGWYRSVHIKSFEAHASRALLKARVELVRIRQDLENTIRGLLKPFGIRLPRGDRRTLAVRVRTSCAARPVLAAATEALLQAREPVMAEIDKLETLLISIARRDETCRRLMTVPGVGPIVALAFLSSVDDGRRFPKAREVGAYFGLTPRRHQSGEIDFQGRISKRGDRMVRTLLYVTTTVLLTIVKRFSSLKSWGLRLAKRIGFKRACVALARKLAVVLTCIIKDGTEFWWSNRGVTA

SEQ ID NO: 514367 - protein, 340 aa, unidentified
MEITTIGLDLAKNVFQVHGVNERGRSVLRKQLKRDQVAPFFANLPPCLIGIEACASAHHWARKLQSFGHTVRLMAPQFVKPYVKSNKNDAADAEAICEAVSRPSMRFVPVKNIEQQSVLSLHRVRQGFVKARTAQANQIRGLLGEYGLVVPQGIGYIAERVPALIEDAENELPGTFRLLIQRLLEHLKILQKQVDEIELQIKAWHRASEASQRLEKVPGIGPLTATVLVASVGDAKNFDNGRQFAAWLGVVPRQHSSGGKPTLLGMSKRGDAYLRTMLIHGARSVIYRATQRADADSWLVKLTTRRNKNIAAVAMANKTARTVWALLAHGREFKQGYAAA

SEQ ID NO: 514368 - protein, 354 aa, unidentified
MQQFVGLDWATRRARWCAVTPAGAVIDEGWTPADEDGLASLVARLGPEALACMEMMSGAAWVRERLQAGGWIVQIADARKAKAVGSLAAKTDKLDARVLAELARRDLVPQVHVPTFADRELKERLGRRMHMVRLRTSAMNRAHGILSQFGVKLAFDRLRQPDREELLIKRSVPEVWRRSIAEAVGIVCELDMRLIPIEAELRPLARADPRVGLLVTVPGIGDLLGLTIASEIGDISRFASARKLVGYSGLTPRVYQSGEKSRTGKLSKTGSTMLRWAAIEAAQQAWRPNNPWHQLYLDVKERCGGKGNPAKAAVARKVLIASWHVLALQQPFNPSRPRGAATPVPANSSCVLAA

SEQ ID NO: 514369 - protein, 430 aa, unidentified
MGFIVPTDMHPERDDHPMPYEWFVGIDWGSQQHQVCVLDGERRRVGERGIDHDGASLARLADWLWTVSTGQPQRVAVAIEVPRGAIVEGLLERGFHVFALNPKQLDRFRDRHSVAGAKDDRRDAFVLADAVRTDQPSFRRLQLDAPQLLRLRELSRAEETLLEDFRRSANRFRDQLHRFYPQMLELCSAADEPWLWDLIDLAPTPAHVALLSEEQVQRVLKAHRIRRVKAKEVLTCLQALALPVAPGAAEAAQAHCQFLLPCLRVLAEQLQACSQQVSALLRTLAAEPGDGEGPSDVALVLSLPGVGRKITAWLFAEAAQPIAERDYQMLRTHSGIAPVTKQSGKRRLVVIRRGCNPRLRHALYHMARVAMQCDAHFNSVYAALRAKGQRHGQALRNIGGRLLRILMAMLRHRTCYDASRLRREPVVQMG

SEQ ID NO: 514370 - protein, 397 aa, unidentified
MYIVGIDIAKRKHEAAVIDGEGAVIIKPFSFTNNCSGYNRLLAMLAKAKLPLDEVSFAMEATGHYWLALFTRLQKEGFRVQVINPVQTNSIRSFYIRQAKTDPRDALLIAEVIRFGHFSESTLHPENIYELRELCRGRHAIVSMQADVKRKVVALLDQVFPEYETAFTNMFGDTSMAILQTCPTPKELSEMPLEELCHLIEVSSRKRFRMAKAQELQALARGSFGFAMAGDVFSTMIRLYAKHLDFLKQQVREMDRKIAEIMDTLDTPITTITGIGPTLGAYILSEIGNISRFSSAAKLAAYAGIDPTMRQSGEYNGVRNRMSKRGSPYLRHAIWLAASSAVLHDPALKLYFQKKRDEGKPYMASVGHACRKMVSIIYAVMRDNKAYTPCIPNEISA

SEQ ID NO: 514371 - protein, 416 aa, unidentified
MEILHQRCAGFDVSKNDVKVCVRVQQPHGEAEYSTTTWGATTRQILALRDFLVAEQVSTVFLESTGNYWKPFYYLLEDRLDVVLVNAQHSKHVPGRKSDVSDAAWLADLGAHGLLRSSFVPPKPIRELRDLTRARVQISRDQHRQLERIDAVLQGAGIKLSSVVSDLTGKSAWTIMRAMVAGMTSPDDLADLAIGKLRPKIGQLVEALESGRFGDHQRFLLQIQMDGYQRLQADLDRLDDRIEGLMSPFQARVEQLRSIPGISTGVAQVIIAETGGDLSVFPSPDHLASWAGVAPGKHQSAKKERNVAAPPGDKHLQRALGIAVMGILRGRKDNYLKARYRRVARRRGPARAMVALQRNLVVIIWHMFHDGSHYHDLGAEYYTQRRRAHALTSALRTLHELGINVTIDPTQAAAVA

SEQ ID NO: 514372 - protein, 347 aa, unidentified
MILLMELSIKWRFIVGIDISKDHVDCYLLDRKTSRGWDLKITNSYDGFDKLGHWLVEHNAAKSQSILVSEHTGRYGEHLLRWTTDNDWPHAVVKTTALDKVTPEHHRKDDPYDAAELADYGVRFSDRLRPTEAPAPAVGQIKRLQAERRKMVDRRAALKSKLTEADTHDADMCQLTAMWAQQIELLSEHIEQLEQAMDQLIGQDESLKARHQTMRTAPGYGPVIGRFWLSLFAGQKKLDPRKISSRFGFAPHAYRSGSSVKSPDRSTGFGNSEMRKLLHLAARSVANHRPHYREYYEQKLAEGKHELLAINNIINKLIRLYCTMWNNKAEYDPNYIQKNKHKWKKSA

SEQ ID NO: 514373 - protein, 360 aa, unidentified
MTGTMTFVGLDVHARSTHACALDPLGGELRRRAFGPGVDAVVEWLHGLPQPVRACYEAGPTGFGLYRAAEAAGIAVQVVAPGKTPRPARDRVKNDRKDAELLCRLLLAGQLTPIAVPSAEVEAARDLGRAREQVRADLCRARHRVSKLLLRHGRVYPERSSWTVAHRRWLARQRFPHAATGLAYLDALAHVDGLVARRGALDEQLSRLALDGEWAATVARLRCFRGLDTLSALVLCLEIGDFHRFHRAAQLPAWLGLTPSRQQSGDSDVSGPITKTGSRHARRILVEAAWHCGRPPHIGVTLAHRHHGQPAHILHIAWRCQHRLHRLHRSLRLRHKPPNLITIALARELACFTWAAATAP

SEQ ID NO: 514374 - protein, 422 aa, unidentified
MLVETNDNEEIIPRIAALDIGKAELVACVRLPSETKTGKRLQEVSTYSTMTRALPAMSDRFRCLGVTRVVMEATSDYWKPVFYLLEAAGFEVWLVNARDVKHLPGRPKSDTIDAVWLCKVAERQMIRPSFVPPPAIRRLRDLTRYRVDLVGAATAEKNRVEKLLEDAHIKLSVVASDIFGVSGRAMLKALINGERNPKTLAQLARTRMRTKIGALEEAFTGHFTDHHAYLLGKMVARVEAIEADIADLDRAIEEVVAPFADAATRLDEIPGVGLIAAHTIIAEIGLDMSRFPTAGHLCSWAKLTPIIKESAGKKRGRNSTGHGNRYLARVLGEAAVGASKTPTFLGERYRRIARRRGKKKAVVAVGRSILTIVWHLLSNPDARFHDLGADFYDTRIKPDRKKRTHIRQLEALGYRVILEPAA

SEQ ID NO: 514375 - protein, 338 aa, unidentified
MKLYCGIDLHSNNSVIVILDETDKVIYQKKLNNDLELILQQLSTFIDDIVAIAIESTFNWYWLVDGLQAAGYEVKLVNTTAVQTYSGLKFTDDKHDARWLAHLLRLGILPTGYIYPKEERAVRDLLRKRSQLVQQSTTNILSAQNILTRNTAQSLSGYRIKKIEDEQLEALLDDTNITLALKSNITVIRCLQTAIKEIEACVLKQTRLRKEFLQLLSVSGIGQILGLTIMLESGDMNRFAKVGNYASYCRCVKSERLSNGKKKGENNRKNGNRYLAWAFIEAANFAVRYNDKIKSFYQKKKSKTNGVIAIKAVAHKLARACYHIIKDQVPFDVNKAFA

SEQ ID NO: 514376 - protein, 356 aa, unidentified
MNKRKIVVKSKKENTYPHNIEEYDHYLALDWSMKNMSVARLTKKMITPKVIDVPSNMRDLKDYLKTLKGKKILTIEETTTSQWLFLELYEQIDKILVCDPHRNQLLSEGPKTDKIDAGRLCLLLRNGMMKEVYHTTSSLHHLRLLVSRYEDVIKSGVILINQKSAIYPAENKSHKKDKIVSQNKTQKFVLSGLEEEINAYETRKEIFKKEFEKIRSKNKTLKDLSTIPGIGLVSSIMILSSVIDAKRFKSPNHYLSYCGLVKHDKLSRGRSYGKRTPRYSRRLKSVYRSATVRCLQYDNPVKEYYEYLIREKYISNKKARNLVARYVAKISLAVIREGKKYKGYQPKGNNLKDKAA

SEQ ID NO: 514377 - protein, 339 aa, unidentified
MKLYAGNDLHSNNNFWGIIDETGKRIFYKKLPNSPEKILSTLEPFKPDLAAIAVESTYNWYWIVDLLMDNGYTVHLANPAAMKKYSGLKYSDDKHDAFWLAEMTRLGILPQGYIYPKEERPTRDLCRKRLQLVNMRTAIILSLKSMIARNTGERITAQKIKVLSQEGITDMVSGYEDLMLRAAMDKVAIDSFSGQIKFVESSLTQKIKSNTKYINLMTMPGIGPILSLTILLETGPIERFEKVGNYASYCRKVESKWTSNNKNKGRGNKRNGNRYLAWAFSEAAEHARMFNQQAKRFFEKKMSKTNRMIAHGALAHKMSRAAYFIMRDNVPFEPKKMFS

SEQ ID NO: 514378 - protein, 418 aa, unidentified
MKLFVGLDVSSEKLDCCFLSDDDQLSILFEASLANDMNGATEIKEKILELNQEWNFSQIVIGMESTSMYSFHPAMFFNEDEDLSQLPTVVTIENPFRIKQFSRMFDEDKTDKNDAMRIADFLRIQRFTTSPIKEEKYLALQRLTRTRYQLIGQLVEAKQHFLENLSYKCNTLTREIKAENATSSIFGATILTLLTDDFSLDDLASMPLEEFSLLLQTLGRGNFKDPEKLANSIKKAIRNSYRLKQMTQESIDIILGILVFQIRGIEKSIKELDKAIERLVEVIPEYQCLTSIPGIGKVYAAGLLAEIGQIERFDDQTKLAKYAGLSWKVKQSGNYQSEHTPLTKQGNRYFRYYLVEAANSVRRHLPDYAEFYKKKYQETPKHQHKRAIVLTARKFVRLVDTLLRNHQLYTPPRSVIDK

SEQ ID NO: 514379 - protein, 400 aa, unidentified
MLLFFEVITMIFVGIDVAKDTHYAAVSDDSGAVLVKPFAFQNNAEGFCLLLKKLSEFDRSKLLIGLESTGIYSENLICFLYESGFRLAVINPIQTATLRKTAIRKTKTDKVDTMLIIKSLMVNSYRLYSQRDADSLKLRTLCRFRQNLKKSKARLKIQLVGYVNLVFPEFGKFFKSGIHIAASYALLKKYSSPKEIAALRTSTLCTLLSKASHGRFGKDTAEALKSLALSSVGVKNPYISIQIAQTIAQIELLEQQIKDLNSAIEEAMESINSVLMTVPGIGAVNAACILGEIGDIKRFSKPCKLLAYAGLDPTVRQSGQFTAKSTRMSKRGSALLRFALINSAWQLTLNDTTFKAYYDLKRSQGLNHYGALGHVAHKLTRVIFKLLTSDTPFNPAKLVA

SEQ ID NO: 514380 - protein, 418 aa, unidentified
MKLFVGLDVSSQHLDACFMTDDESLTVLQEARFENSLIGASQIKKVILDNARELNFTKVVIGMEATSLYSFHPAMFFKEDEELNTLNLEVSIEQPNKIKKYRDIFSEEKNDQIDAFYIADYFRTRRFATSITKKEQYVALQHLTRFRLQIVEQLVEAKQHFIENIYYKCNRLPIELKADNTNASVLSATIVHLMTEDDSLDQLATMPLEDFANLIQKMGRGRFKNPEGTAKAIAKAIRSSYRLGKVQQDSVDLVLGVIAREIRSLEKLIKELDKGIQDLVVTMPEYQCLTSIPGVGAVYAGGILAEIGQIERFEDQTKIAKYAGLTWPRNQPGNKESENTPLAKRGNRYLRYYLVEATNLVRLRDAEYGEFYRKKYMETAKHQHKRAIVLTARKFVRLVDILLRNHQLYMPQRRAIEK

SEQ ID NO: 514381 - protein, 400 aa, unidentified
MKGFLHMKLIGIDIGKNKHFFCIMDQQTGEIISQPVSFSNDKEGFDFLIQKIKSYSKDSVLIGMEDTGHYHFTLLKYLLNLQYTVALINPKTTDFNRKMQGGITKNDKLDTINICDVLDTPERKKQYRITKVNSFDLYEQKQLTRHHHNLKEEENVYKNRLQKCIDIVFPEFNKLFNSKYGTVYMNILKMFGSAENIANTDIRTIRKCFEIEGRGNRISLTPERLKECARSSIGISSSAEVIQIKHLIAQIELIEEQLTEIDKKIEEFSIQNNSPILSIPGISHFSGTSILAELGDISNYSKPSQIIKFAGVAPLHYESSQFNEQYTAITKKGSKYLRKTLYQIILPIIRHNPVFNKYYQLKISQGKGHRCAQGHCVRKLLRIIYHLLKTNQQFDPQLLR

SEQ ID NO: 514382 - protein, 340 aa, unidentified
MTDHNLVSIDLAKTVFQVCRFADDNKILSNKKISRKKLKQEIAQLSPTTIAMEACYSSHYWGRTFEQYGHTVKLVPAQHVKPFVRGNKNDANDAVAIGEASLRPNMKFVRIKTVEQQDIQSLHKIRDRFVSHRTRISNQTRGLLSEYGLIATPGFKALKTLIQEALESDSLTALFKEEIASIYEELLDLDERLKRVNNKLKVLVEHYPLCRLLMTIPGIGVINATALYAAIGDGKQFETARDFAVWMGLTPQQYASGTKSFTGRITKRGNRYLRKQLVHGARALMNRTKGKKDRLSVWTNEIKERRGVNKACVALAHKLARIIWAVLSKGEEFKAHKIVV

SEQ ID NO: 514383 - protein, 366 aa, unidentified
MKKNSTVANSGKQIFTGKKLTVGLDLGDRWSFYCVMDETGQVILERKLSTTPEAMKQTFGKIPRSLMALETGTHSPWVSRLLTQLGHEVIVAHAQKVQWITKSSRKDDRHDVRTLARLARVDPELLGPVRHRSVQAQLHLTVIRARAELVSARTALVNAARGLVKSYGQRLPKCGTYQVSRELATALSAELRDVLEPLLQAIESLNERIKEYDERMEKLAQDVYPEVSLLKQVKGVGTQIALTYVLTIEDPYRFAKSREVGCFLGLRPGRRNSGESEPQKGISKEGDRYLRTMMVQGAHYILGPFGEDSDLRRWGLKLAERGGKNAKKRAVVAVARKLAVLLHRLWVGGEVYEPLRNSQKAMRAVA

SEQ ID NO: 514384 - protein, 387 aa, unidentified
MPKTSDRSEVPAAVHTRIAAIFVSLELSRKVWLVTSLSPGAGEKMSKHSVPAGDVAALLLRFAELRRKAQARTGDCFSIVTIQEAGLDGFWLHRLLESEGVESHVVDPASIAAPRRRRNAKTDRLDGEALLRALLAFKRGEPRACAMDVPPTPEEEDRRRLSRERKTLIAERVEHVNRIKGLLFSQGVSDFEPIERDRRKRLEELRTGDGRPIPIHLKSAIARELDRVELLIDQIKTVEAEREKLLAEQRPDASPSPGAMLLAFKGIGSEVASVLWSEALYRHFDNRRQVASYAGLAPTPWQSGSVSHEQGVSKAGNPRLRSTLIELAWLWLQNQPQSGLSLWFKRRIGDGRGKKTTIVALARKLLVALWKYVAFGVVIDGAVMKNA

SEQ ID NO: 514385 - protein, 323 aa, unidentified
MSAFVGIDIAKNSFDIATPLDNGKFRTKAKLPNDSKGYQVLQAWLETHSEPGAWVVMEATSVYHQGVADFLHGLGYRVCVVNPASIHQYGKDDLRRVKTDKADAKLIASYAQAKQAKLREWVPEPAPRRRLRALVRRLDDLQEILQMESNRLDVAEDKVKESIESVISHVRTQIAETKKAIKDSIDDDPDLRQKRDLIVSIDGLGDTTAALILAELGDPLDYKGPRSIVAFAGLDPLGGSSGNWTGPTHISKTGSKRLRTGLYMPGMVGLKHNAVLMALKTRMKASGKAPKEIICAAMRKLLHLVYGVLKSGKPFDPLIALAR

SEQ ID NO: 514386 - protein, 384 aa, unidentified
MNKHSILFIGLDTHKEFNEVAYIEEHRGAKPVHLGRVSSSKVAVQKLVRQFESKYPGATLHFVYEAGPCGYWIYRLVTSLGHCCYVVAPSLIPKKPGEKIKTDKRDALKLAKLLKSEDLTPIYVPEPEDEAVRDLSRAREVAMKDLKDAKYQLKALLLRNNINYRGTANWSQKHLRWLTELVLPHPAQHIVLQEFLHTINERISRLERLDNELTHHVHQWRYYPVVKAIQAMRGVRLLVATGVVAELGDLSRFDHPRKLMSYLGLVPSEHSSGGKRHIGAITKCGNGRARRLLVEGAHTYRYAANISTDMQKRQEGLPKDIIDIAWKAQLRLCKRYKKMIAKGKHYNLVVTAIAREMIAYIWAIAKEVVLTPVNTKLRLARVPA

SEQ ID NO: 514387 - protein, 343 aa, unidentified
MQTITTIGLDIAKSVFQVHGVDAAGQVVIRRQLKRRYVLAFFQKLPPCLIGIEACASSHYWSRELQALGHTVRLMPPAYVKPYVKRQKNDATDAEAICEAVARANMRFVPTKTPEQQSCLMLHRTRHLFIRQQTAVINSIRAHLAEFGIVAPVGRKGVTELLHIVADPSDKRVPEVARACLAALGNQLLSLKEQIVEFDRMIMVWHRSNETSKRLHYIPGVGPMLATALVASVADPRTFRSGRNFSAWIGLVPRQHSSGGKDRLGSISKQGDRYLRSLFVAGALAVIRYAKIHGTKHRPWLTALLARRPTKVAAIALANKLARMAWAMMARGERYRQPVALAA

SEQ ID NO: 514388 - protein, 410 aa, unidentified
MIYVGIDWADDHHDVAITDDSAKTLSQFQISHDSSGFAALHGQLAKFRQSPDQILIALETSRGLLVHELLRSGYSVYAVNPKAVNRYKDRYVLSKAKSDALDALALAHLLRTDRHRFKALRPFPEDYRLLDRLCQDLRKLVEEKSRISNQITSVLKEFYPIALELFSLDSNIGIAFLRAFPDPQALSTCKKRTLGAFFRKHSYSRPQKLEELWKLIQRPGLHPDPVVLKAGRFRLLALLDQLIPLREHVALYEKEVKAILDKLPEAKSISSLPGVGDRLAPELTAALGPKDSDSQSRFECAEGIMKLSGCVPVTRESGKWKTVSFRYACVKNLRRTFRDWAFASLEQSVWARAYYDFYKAMNMPHSTILRNLGKKWARILFALWSQGTIYDETLYIQSLKNHNVRWAMAL

SEQ ID NO: 514389 - protein, 334 aa, unidentified
MSEITTVGIDLAKSVFSLHGVDGAGRVVLRRTVRRDQLVEVVAGLAPCVIGMEACSGAHEWGRRFQGFGHAVRLMAPKFVIPYRKSGKNDGNDAEAICEAVSRPSMRFVPVKSLEQQALLAMHRVRQGFIVERTAIINRLRGLMSEFGVVLPLRSITVRRHAAEAAEALPALARRAIGDLLEQLRVLDERIDGYDREIEAQARLSEAAKRLMQIRGIGPTTALAIMATVGNAREFRNGRQFAAWIGLVPGQYSTGGKTRLGHISKRGDAYLRNLLVQGARSVLNTAGAHQDRMSRWALELKPRRGYYRTLVAIANKNARIAWALLARDEDLRVT

SEQ ID NO: 514390 - protein, 338 aa, unidentified
MKLYGGIDLHSNNNVVALTDETDRIVYRKRLPNDVATVLDVLAPYQDAITGLVVESTYNWYWLVDALMEAGYQVHLANTAAIVQYSGLKYSDDDTDAAWLGKLLRLGLRSQGYIYPKAERAVRDLLRRRLRLVQQHTGNILAVQNLFSRNRGRSISANEVRRLTPESVAELVIDPNLALAIQSTVLAMRGQQAAIELLEREAWRQTKDTQAWRALQTVSGIGRILGLTIVLETGPIERFAAVGNYASYCRCVGSTHVSNGKQKGKGNTKNGNKYLAWAYVEAANFAVRYNPQIKRYYQRKRAKTKGVVAIKAVAHKLARACYHILRDGSAFDVDRAFA

SEQ ID NO: 514391 - protein, 412 aa, unidentified
MKQIRDKVGGLDVHRDTVVACWRVQQPDRSVDTAKQSFATTAKGLGDLATWLSEAGVTTLVMEATGVYWKPVYYALEGLFSELWLCNAQHVKNVPGRKTDLSDAEWLADVASHGMVRPSFVPPAEIRELRELTRYRKTQVDVRAKEIQRMEKVLQDAGIKLTSVASSVWSQSSRSMIEAMIDGERDPKVLAQMAKSRMRAKIPQLEEAFSGHFGTHHALVCRQIIDHIDFLDHSIAALTAELTARLVPFEPAVTILCSITGVSSTTAEVMIAEMGVDMSRFPTAGHLCAWAGVAPASHESAGKRRPVGSRHGSTWLQRALIEAARAAARTKGSYFSAQYSRIARRRGPNKASVAVAHSILAVAWHLLTNGALYEDPGAQYFERRHNPDIEAKRLQRKIEALGYEVTLTEKAA

SEQ ID NO: 514392 - protein, 340 aa, unidentified
MDVRTLGIDLAKNLFQVHGVDGQGRTVLERQLRRRHLQPFVAQLRPCLVAMEACGSAHYWAREIAKRGHEVRLMSPRLVRPYVKSNKNDARDAEAICEAVGRPSMRFVAVKSQAQQDLLALHRVRSLLIRERTALMNQMRGLLAEYGIVVAQGAIPLRRALAQILEDRDNGVSELLRELLAEMSERLRWLEERLKRYDQRIAECARTDERAGRLMAVAGVGPLVATALIAAVGDARQFHSGRDLSAWLGLVPRQHSSGGRSVLLGISKRGDRYLRTLLIHGARAALRFAARKRDPRSRWIEAVRERRGANIAAVALANRNARVLWALLARNEDYRVPAAA

SEQ ID NO: 514393 - protein, 347 aa, unidentified
MEKVIRIGVDTSKSVFQLHGVNEGEQVVLRRKLRRGHVLDFFARLAPTKVGIEACGGAHYWARELRALGHEVVLLPPQYVKPYVKRGKNDKIDAEAICEAMSRPTMRFVPVKTEAEQAALMLAGMREQMVRRRTQVSNAIRGYASEFGLVAAKGLSKLEALLARIAADPRVPEMAKDIFTAYGQEYAELDRRIAKLEARLMAWHRQNEASRRLAQIPGVGPITAAMLVMKAPDPATFRSARHFAAWLGLTPKDHSTAGKTRLGVITRAGDEDLRRLLVCGAMSVVQQVQRGRGKPAAWLLELVKRKKPKLAAVALANKTARIAWKLMLSGQSYDPRRANATSMAKAA

SEQ ID NO: 514394 - protein, 435 aa, unidentified
MNPNAAGIDIADSEMQVCVPADRDGDNNRRFGSFTRDLNEISGWLKACGIETVAMEATGVYWIPLFFKLQKDGFDVQLCNAREVKNISEKKTDESDAEWLLVLHSYGMLKPSFQPENAARQIRNLARHRGGLLKSASKEVQHMQKAMEQMNIKLTNVISDITGVSGLRIITAILKGERDAQTLSALADSRCKRSREEIALSLEGTWDADHLFELKQSYELYQIYQGMVEECDKEIENLLQGFVSRIDEDNVGLLRTKKRINKKNAVAFDVESYANAIWGVNAMAITGMSSGSLLQLIGELGADFTDKFDSPAKFCKWCNLVPNNKISGGKLISSRLPKRKNPVGQIFRLCANTVAKSNSPMGFYFRRIKSRAGHMSAIVATAHKMAEIFFIMVRDRVAYDEGRVGLDEETLLKRKIERTQRQLEALNAKLYATAS

SEQ ID NO: 514395 - protein, 408 aa, unidentified
MQKRENLLYVGIDLHKETHTAVMVNCWNEKLEVVVIENKPSEIKKLAEKVNRKSRILGLEPIYGLENAYGYGRSLAVWLIENGYIVKDINPALAYDQRKSAPMYRKNDEHDAYCVATVLINQLHTLPDAKPKDNEWTLAQLVNRRDLLVKDGIRFKNGLHEQISMAYPSYSKFFSEIDGKCAMYFWKTYPSPVHLQEKTAEELTMEFKEIFRITKKDKAELILDCVKNDGNTFREYQESRDFITTSLVRDLKHQKEELAGLDKEIEKILLSFDYKLTSMPGIGTSIASKLIAEIGDIRRFPSADKLARFAGVAPVKFSSAGKGKEQSSRQGNRQLHGLFYFLAVTMVSRPKNGKPNHPVFYDYYMRKIGEGKTKSQALVCIMRRLVNIVYGMMKNKTEYQEPLPEKEQ

SEQ ID NO: 514396 - protein, 432 aa, unidentified
MPKHLEHINPHAAGIDVGSRSHFVAVPPGSCEHPVREFTGFTDDLHRMADWLLECGVTTVAMESTGVYWIPVFEILESRGLEVRLVNARHVKNVPGRKSDVLDCQWLQQLHSYGLLEGAFRPSEEVCTLRGYVRQRGNLVRYAAAHIQHMQKALSQMNLHLSTVIKDISGVSGMRIIRAIVGGERDPVSLARLRDGRCKSSESTIARSLHGNWRCEHLFSLKQALELYEVYQAQIAACDREILEQLARFEGSSGSGGAPPVDLNEALLRISGADLTAIDGIDTLNALKIIAEVGTDMSRWKSAKHFASWLGLCPGTKISGGKRLSTKTKRIVNRAAVALRISAVSLKRSKSALGAYLRRQWARLGGAKAVTATAHKLARLVYSMLKHGSAYVDLGQSYYEERYRDRVVKNLKRKANTLGYQLVRNADQPASI

SEQ ID NO: 514397 - protein, 409 aa, unidentified
MRYYLGVDWADQTHAVWVVDERGLKIAGRAVRHTVDGLTEWARELNEWRAQGIDLWAAIERPDGRVVDFLLDQGVVVYPVNPKALDRARDRFRQSSAKSDPFDARVLADFLRTDHAHLRTLQPSSEAAQELKLLTEDCQRHIRQQTRLVNQLTATLKAYYPRALEVAELTSALAREFLPAYPTPAALTALTERQWQRWARAHGLSAARAGDLWAILRQPHLPVPAHVVRAKARLMRTLMEQLLPVVAAVAQYRTAIDDFFASMPAAQWARTLPIGKHGITAPTLWARLGDAPERWESFRHLQAHAGAVPVTKRSGKQQVVHFRFACDKALRHVVDQVAFLSLLSSAWARAYYDQQRARGHSHRQALRALGAKWLKIIFVMWQRQVPYDEQYHLATMTRQQLRQPQKQVA

SEQ ID NO: 514398 - protein, 362 aa, unidentified
MRIIGCDLHARQQTLAMLDTTTGEVVEVTLQHEGDNVREFYSSLPGPVRVGIEATGSMQWFLNLLEELGIECLVGHPAQIRAAEPRKQKHDRRDADLILKLLVENRFPAIWLPSKELQDLRSLLRHRHQWVRMRTRIQNALQSIALANGLRRGTALWSHDGQSRIASLPLAPHTAYRRSELQALYEKFEAEIEKLNQRVEEQACKRLGARLLMTHPGVGPITALATEVFLGDPARFADSKALASYVGMIPREYSSGGRQRLGGLSKQGNPLLRFLWGEAGAHAARKDPELQRFYRRKLVQKGLGKASVAVARKLGIRLWIMLRDQIEYHEFCRRGQKQQKSSDACAGMPETRYGAKSHRPVD

SEQ ID NO: 514399 - protein, 344 aa, unidentified
MKYYAGLDVSMEESSVCVIDESGAVVAEAKVASEPVAIAGFLAPWSGSLAKVGQEAGGLSPWLHAGLMGLDLPALCIETRRMKAYAKASPVKTDRRDAKLIALALRAGLYRSVHVKSVEAHKLRLALTARQAVLRQARQLQGKVRGDLKVFGIKLGRVGSGGFAGRVKVCLAEHGDLWALVVPLLELRAALLAQVRVYDGLLRRLARSGELCRRLMTAPGVGVQTALAFRCGIDRPERFRRSGSVPAALGLTPKIDQSGERERCGAITKAGDKLLRSLLFEAANALLTRTRSWCALKRWGVALAKRRGMNRARVAVARKLAIILHRMWCDGSEFRWSGHQTKAA

SEQ ID NO: 514400 - protein, 400 aa, unidentified
MLSIGIDVSKGKSTVCGMKPGGEIVYAPFEVQHTREGMSELVSLLRSSGEEVRAVLESTGSYHCPVVAALLENGIFVSVVNSLRMKRFCSQSIRKVKTDRIDAMQIALYGLAYWQELQPTKLPEDTYRELQLLARQYYQMTSMLIKAKVDFNAICDQVLPGMQELMNDHAGRHKLSDFVLRYRHTTHILEMGETRFRKDYCKWAEKKGYRNCERMAVLIFATAQNGIPVLPNAPSTQIVITEAIRVLHTVEASRDAILTQMQALAKTLPEYSLVREMPCIGDTLAPRLIAEIGDVRRFHSKRALIAYAGIDAPPYQSGKFCANNRHISKRGNRYLRKTGYEVMQSYVMHKPANDPIFTFIEKKRGEGKSGKLAMVAGLNKFLRVYYGKVTELYRSLPAIE

SEQ ID NO: 514401 - protein, 343 aa, unidentified
MELKRVGVDLAKHVFQVHGVDRREKPVWQKRLSRDRWLQVISTTVEPDCEIGMEACAGAHHWARRLQAAGFRVKLIAPQFVKPYVKSNKNDARDAEAICEAMSRPSMRFVSIKTVAQQDIQATHRVRSELISQRTSKGNQIRGLVAEYGLVAPQQLASLRAAVPDWLEDAQNGLTVRFRRLLNGLWEDLKALDRRVAELDQEIKSIAESDPDAKRLQQLRGVGPMIATALVAAVGHADQFANGRQMAASFGLTPKQHSSGDKVRLLGITKRGDAHLRTLLIHGARSVIRAAKSKDDRLSQWVTGLAERRHPNVAAVALANKTVRIAWAMLRHGTDYQPNRMVA

SEQ ID NO: 514402 - protein, 333 aa, unidentified
MSVTVSAGIDISAPKVDVVIRSGSESCSAKVFKQTPAGHKALIKYLLKAAPERVILEATGNYYIDLAIALSEADLPVSVINPKSYRHFAALKLKGSKNDPIDADLLAEFGRCMIPRLWTPPSAEHQQLRSMGRHINRLVGSRAKAKNRLHALQATQTSPALLVKDEKLEIRQLDKRIERLREAAVQLLNEIPLLQATFKRFCAATGFAEVSSLAIIAELCMLPDSLKSGQVSRHAGLDVRVHQSGSSVDKPGWISKAGNGYLRASLFYPAMSAICHDPNAKAFYESLIARGKKKKQAIVAVMRKYLTGLWACYQSGEAFDTSLLFDTKRFQKA

SEQ ID NO: 514403 - protein, 397 aa, unidentified
MVVACLIVPGSGAQPTKEIRTFSTMTDTLTQLVEWLVAADCTHVAMEPTGVYGKPLHNLLENVLEVVVVNAQHIKAVPGRKTDVRDCEWIADLLRHGLLRASFISDRAQRELRDLTRYRTALVQERAAEVNRVQKVLEDANIKLAAVATDIMGVSGRAMLAALVQGTTEAATLAQMARGSLRAKIPQLERALCGRVGAHHCFLIAQQLAHIDALDALIERVSTEIGDRVRPFAAEIELLDAIPGVSRRTADVLVAEVGVDMSRFPSAGHLASWAGMCPGNHESAGKRKSGKTRKGSPWLRSALVEAAHGAGRTKNTYLGAQFRRLLSRRGKKRAAVALGHSILTIAYHVLTTREPYTDLGVDYFDKRTREAAGRRLVRRLNALGYEVHLEPRDAPAA

SEQ ID NO: 514404 - protein, 409 aa, unidentified
MLVVGDDWAEDHHDVELMDSRGRVLARARLPEGAAGMARLHAMIGEHLGEDAEAAEVRIGIETDRGLWVMALAAAGYAVFGINPLQVARYRERHGVSGAKSDAGDAHTLADMVRTDAHQLRPVAADSPAAQAVKVVARAHKTLIWERTRQVQRLRHQLRDYFPAALAAFPELDAPDALELLAKAPDPVSAARLTTAQVSAALKRARRRDITAKTAAIRAALRGEQLAQPPVVTAACAAVVRALTAVITALNTQIKVMEGQVEAHFLPHPDAEIIMSQPGLGPILGARVLGEFGDDPHRYASSKARKNYAATSPITRASGKRKTVMARYVHNDRLRDALDGQAFAALTASPGARAYYDRQRARGLGHRPALRQLANRLVGILHGCLKTRTRYDEATAWPQHASTENKTAA

SEQ ID NO: 514405 - protein, 366 aa, unidentified
MKKITTRTICGSSRLQDRQLTIGLDVGDRSSFYCVIDGKGKVILEAKVATRLEALRETFGRMPRSRIALETGTHSPWISRLLSELGHEAIVAHARDVRLIGESRRKDDKIDAQVLARLARIDPQLLSPIQHRSAEAQADLSVIRARYALVRARTGLICAARGLTKSFGERIRGRNPKVFRPEMGETLSPQLRVALTPLLHALETITERIREYDDQIEKLAEEKYPEVALLKQVKGIGTLIALTYILTLEDPRRFRKSRDAACYVGLQPGRRNSGQSEPQLHITREGDSYLRMVLVQGAQHILGPFGEDSDLRRWGLKLAERGGKNAKKRAIVAVARKLAVLLHHLWISCEAYEPLHNTRKRRPAAA

SEQ ID NO: 514406 - protein, 414 aa, unidentified
MSYKIAGIDVHKKVLMVVVIDATTPEGKPERRRFATMASDLRRLSTWLREQGVQEAVMESTAQYWRSVWLELEPCMLLHLAQAFSNRAPRGRKHDFKDAERLVRRLIADELILSFVPDGEQRTWRNMTRMKTQLTRDRVRLQNQMECLLEEMRIKLSIVVSDLLGGSGLRMLRALADGETDPKKLAALGDDRLKCSEEQLVDALTGRPEPMHRAMLGLQLERLQLIDRQIAQLNRMIAQAMKPHQDAVIRLAEVPGLGVDSAQQVISEVGPQASTFASAAELTSWVGTCPGKEESAEENHSSRSAKGNKYLRRVLNQAAHAAVRKNGSHFQAVFRRLLPRLGYQSAIWAIAHRLCRVIWKILHEGVRFIEQGSESDPKIRKQRARILARALRKLGYDVAITPRNPATTEMGIQM

SEQ ID NO: 514407 - protein, 321 aa, unidentified
MSAPSLVTVGIDVAKDHVDVSVLGAHLDTQRFDNDAEGHSALAVALQPLDVALVVMEATGGYEAEMACALQSAGLPVAVVNPRQARDFARSMGRLAKTDRIDARMLAELASVLVRREDLSRLLRPVPDERQQWLAALLTRRRQLLTMLLSERQRLQITPVGLHPSLLAIIAAVQAQLDDIDAQMVGHVREHFSELDRLLQSTHGIGPVSSACLIAELPELGKLSRRQIAALVGVAPIACDSGSRNGRRRVQGGRFEIRRVLYMATLTATRHNPAIKTFYQRLKAAGKLPKVALVACMRKLLTILNAMVRSNTPWDDSLHKA

SEQ ID NO: 514408 - protein, 346 aa, unidentified
MDQIIRIGMDTSKHVFQLHGVNAAEEPVLRKKLRRQDMVAFFTNLPPTAVAIEACGGSHHWARLLQALGHQVKMIAPQLVKPYVKRGKNDAADAEALCEAMSRPSMRFVRVKTAEQQAALMLVGLRDRLIRQRTQLTNAIRGYATEFGLVAAKGLVKIEPLLERIREDDTLPALARELFEIHAREYTQLQAQLEEIDDKLMVWHRANECSRRLAKIPGVGPIGATMLVMKTPAPEAFRSARHFAAWLGLTPKDHSTAGRVRLGVITRAGDEALRSVLVVGATAVIRHAQRSQTRASPWLIALLKRRPPKLAAVALANKIARIAWKLMVSGEHYAARIGPVGSGGAA

SEQ ID NO: 514409 - protein, 336 aa, unidentified
MRNSLGKIVMECVIETKASTLLQFLDGLRGDLRVVFEEGTWATWLYDLLKSHVTEVLVCNTRKNAVRKGSKSDRIDARKLAEQLYMNNVKSVYHGERGLRMMKELARSYLTITKDLVRVMNRLKALYRSWGIPCAGNEVYASRYRAEWLAKISEAGVRRRAEHYYQQLDALWPLRQEARRDLLVESRKHKIWKLLRRIPAIGPIRAAILIAVMQTPHRFRTKRHLWTYSGLGLETYDSAEYRAVQGQLERSRKRATVRGLNKDYNHDLKDIFKGAAMRASTASGPLRDFYENLLAKGRKPTMARLTLARKIAAITLIVWKKEVSFDANYLKPQQAA

SEQ ID NO: 514410 - protein, 370 aa, unidentified
MKKSILYVAIDVDDIAFHGAGYDKENDQYYEFKCKPTVGGLLNRIERLEDKGFEIQLCYEATYIGYGLHRNLEANDIHCDIIAPSSIPEKRSKRVKTDRIDSRKLAEYYSKGLLTVINIPDKTDEEVRQLIRSRSFVVDQRRRLKQHILSSCRFNGIDYRLQTNTKSHHWTQKHLQWLNSQISKQPEITRKMFERLLSQLTVLDEEVKNFDNLIDEFSSMERYQKRSQALACIKGIDTLSAMTLLTEIGDIKRFPHPKNLVSYMGMDIVEYSSGGKEKKFGITKMGNLKIRTTLVEACQSITLGTSVGKLLRSRRKGVPIEYVKIAERCQNRLWKKKHRMSLSNKVSNKIKVACAREMAGFVWEMLVTVG

SEQ ID NO: 514411 - protein, 343 aa, unidentified
MDYYAGIDVSLKESSVCIVDAKGKIVREVKVASEPEALVRYFDELELPVCRIGLEAGPLSHWLHAGLVAVGRDVALLETRHVKAALSAMTVKTDRKDARGIAQLLRMGWYRPVHAKSMASQDTRAVLVGRKLLQGKLLDVELSIRGILRGYGLKVGEVSRGRFEARIQELTAGHATLETVIGAMLAARATLWREFTRLHREMLKIARADKICHRLMSTPGVGALVALTYRSAIDDPTRFGKSSTVGAYFGLTPKKYQSGETDRDGGVSKVGDAMVRTALFEAAHIMLTRATRFSSLKRWALEVAKRRGMKRAKVALARKLGVVLHRMWMDATDFRWGAIAMAA

SEQ ID NO: 514412 - protein, 346 aa, unidentified
MTHSTTVGVDLAKNVIQISVVSGRGKELLNRSLTRRKFAEFLCKQKPSLVAFEACATSHYWARAAQRHGHVARIIPAKFVAPLRQGHKTDSNDALAVAEAVHRPNMKEAPMKTIEQQGLQAIHRSRQLLIQECTALSNHLRGLLMEFGVVIPQGFASLLRTLPEVLEDGENELPDLCRPSLHRMYTRLLELREHIEAMTSEVEVLVKQHPICSRLTALEGIGPIGALLLYATLGSGNAFNGSREFAAYLGLAPRQYSSGGKTNIVGLSKKIGNSRLRSILILGARAYTYRLKEPKSSKDRWLKDLIDRNGHSRAAIALANKNVRTAWAMVTQGTEYQRRGQLKVAA

SEQ ID NO: 514413 - protein, 324 aa, unidentified
MTDAVLGIDVSKNTFDTNLGAGTKARSKSFANSPAGWHHLIAWLGEHKIGQVHACLEATGRHGLGIALALHEAGHVVSIVNPAQIRDFARTKLGRNKTDQVDAVHIREYAELFKPRPWTPPSPAMRRLCELQTIRAGTVAGLTEWKNRRRSGIMDDLALSLAKTTIQHFTSQLEAVDQAIAETIDNDVELSAKRDLLVSVNGVGEALAGIVLAELPGPDILGSSAAVTAYAGLNPQQHQSGISVKRPVRISKIGNAVLRTALYMPALSAMRYNPAVAALVDRLKAQGRLKGKQIVIAAMRKLLVLCFGVLKTGKEFDPAMAMGK

SEQ ID NO: 514414 - protein, 350 aa, unidentified
MNVVKMTYEGKKVYIGMDVHKETYAVTAICNGEVVKRDRMRADPEGLVRYLKRHFAGAEIETVYEAGFCGFGLHRALVVAEIPNLVVNAASIAVAANDKVKTDRRDSKKMAEQLSRGMLKGIYIPTEKEELARVLTRTREQVVAQRARVATQIKSKLCYFGKMAFDDKRAISESYLKEIEEKAWPEELLYGLGLLIAQWRFLTAQRQEIASKLEAQGHQDEAVEKVYRSVPGIGSVSSRVLSNELGDLSKRFVNERALFCFTGLTPSEHSSGDKVHKGHISRQGAARIRKYLIEIAWRAIAQDAALTASFERIARTRGKKRAIVAIARKLIGRIRACFVQQGLYQIGVMA

SEQ ID NO: 514415 - protein, 351 aa, unidentified
MKTSATAVPTTIGLDIAKNFFQVHAVDAAGQVVLRRKLSRADVLHFFKGLPKALVGIEACGTGHYWAREIAALGHEVKLLPPTYVKPYVKRGKTDAADAEAICEAVTRPNMHFVPIKTPEQQAAMMMHRSRELLVGQRTALVNALRGHLAELGIVAAKGVRRVADLLAELVGADGARIPPLARASLNCLAAQLEAVETQIDKLEALILEWHKGNEASRRLAKIPGVGPITASAVVATIGDASNFTSARHLSAAWGLTPKQNSSGGKARQGGISKAGNAYLRRLLFIGAIAVIRSKKAQEAGSWLGRLLERRPAKVAAIAVANKTARVIWAMLRSGEAYQAPKATAATLAAA

SEQ ID NO: 514416 - protein, 344 aa, unidentified
MEQIYYTGLDIHKKIIAFCIKQADGTIVAEGKIDASRAALKQWAASTPGPWIGAMEATIFTGWVYDFLKSYARQLQVGNPLMMKAITAAKKKNDKLDARTIADLVRCNLLPRCHMASEEMRDLRRVLRYRNLLVRQAVRMKNRMATLLMETGQEYNKKKLHGAKYFRGLLEKIQDVPESFKEILQMSRGALELFESCQKRLLKGLVHNEGLQERVQRLMSIQGVGEVTALSWALEIGEVQRFTSIRKAISYCGLCSAQVESGGKITRMPLSKQRNKHLQCVLIEAAKLAPGHNPELAQVYNQERQRGNNHNQATITVARKLVAFLLAVDKSGKAFVKKAEKQAA

SEQ ID NO: 514417 - protein, 353 aa, unidentified
MNNRKYIGMDVHQASISIAVSDAAGKVLMECILETKAATVLEFIQGLRGSLWVTFEEGTSAAWLYDLLKPHVTKVVVCDPRKNALLKAGNKNDRVDARKLGELLRAELLTPVYHGESGVRTLRELSRGYLAVSKDLTRVMNRLKAIYRSWAIPCAGQQVYSPRHRAAWLEKLRETGVRRRAEQTYQQLDFLMEIRKETRKELLAESRKHPARKLLEQIPRLGPIRVALLIALLQTPHRFRTKRQLWNYCGLGLRTRSSGEYRYTGGQLQHARKPPALRGLNVNHNHDLKHLFKSAATQAGNDPLGEFYQNLLASGMEPPMARLTLARKIAAIALKIWKKGERFDPAKLKQQAA

SEQ ID NO: 514418 - protein, 342 aa, unidentified
MQITTIGLDIAKNVFQVHGIDATEKVVVRKQLRRGQVMKFFAALPPCLVGMEACATAHYWARELTKLGHEVRLMPAKDVKAYVKRNKNDAADAEAICEAVRRPTMRFVRAKSAEQQGRLMQHRTRDLLLRQQTQVINALRAHLAELGIVAAQGREGLKQLLAIIADQADARLPLDARACLIVLAAQLQALHTLIKSIEKRLLVQHRANEASKRLESIPGIGIIGASAIAATVTDPKAFQSGRDFAAWIGLVPRQDSTGGKQKLGPISKQGDRYLRRILVVGAHAVMRWAKQNPGKYPWLTQLLARRPFKVVAIALANKMARVAWALLASGAKYRAPRLAAAT

SEQ ID NO: 514419 - protein, 341 aa, unidentified
MKECIGLDVSMKETAVSIRRDGERVWRGKCVSDPAVIAQLVRKRAPAVDRIVFETGPLSVWFYHALRAEGLPAICIDARHAKSALDMAPNKTDANDADGLAHLAEIGFFREVRVKGFDSMLARTLIAARNRLVRITVDVSNHIRGFMKTFGLLIPSGKGSTFEAHVRRLLSDQPMLSEILLPMLDAWCATRLQAARLARQIAAEARQNDGCRILMSIPGVGAITATSFVTAIESPDNFRKSRSVGAWVGLTTRRYQSGEIDYKGHISRRGDHHLRGLLYEAASVILTRSSAESDLRTWGLKLRDRIGFKRAAVALARKLAVTMHAMLRDGTLFERGMNPTT

SEQ ID NO: 514420 - protein, 422 aa, unidentified
MKYVGIDIAKKFHIACVLDESNSYLKKNYRIESELTDFDMFYQVLELIDKDKSQFLIGMEATGLLFENLYIFLKNLGYNVVLLNPYQTTKFREMDTMKYVKNDNIDSQMIAALLKSGRYSEGYVSEDIYQAIKSLYRHKATLMQEMKSAKRQVSTTLAVVFPEFEQIIRDPFSVSGMALLNKYPTAKHYKGASGDRILKVFRNIKGNNFNLDKANELLDLAMTTVYQGNAKDERAYVILSNLRRISFLKEEIAQCESQMFTLLNESVEAVSTSISKDEEVYIAGLVDNLRSIDGVADKTIFAVLSECGDIARFRSGQAFIGFLGLYPTLHQSGNSTKYGRLAKRGAKLAKLAIYQAAIACVRHNAELKKVYLDKKSSGRAPKECIVVVARKLAMIIYSIYKNNTPYNPARVFNTRASLSHLV

SEQ ID NO: 514421 - protein, 405 aa, unidentified
MFYVGVDIAKEKHYVCILDTLGELACKPFWIYSDILGLRDLLKRLAELSLDMDDFLIGIESTGAFSENFYSYITDADYKVVLLNSYQTAKYRDFSTLKKIKNDSIDAYVIAQLLASGKYKASYISNEDYHNLKVLNRLKKSLDDKIKTIKREISTVVATVNPEIEKVFSNIFTKTAIAIIKAYPTAMDISKTSPEKLTKLFRHIKGNNFSDEKAKYLIELAKSSIYTGRALESRALMIKTNIKILELYIQEKDEVEKQIEDLINNQLDDDSSNIDNVKSIPGVAEKTIAAILGECGDLRRFESAKAFIGFLGLYPTLYQSGKSSSTGTLAKRGIPIAKHALYMAAVSAVRHNTELHKLFRDKVSAGKSKKEALIIIAKKLASTIYSLFKYNKPYNPSRVLIQHKR

SEQ ID NO: 514422 - protein, 412 aa, unidentified
MMSEIITAVGIDVSNGKSVVAARRPGGEIILSPTQVNHTAEDLARLVERLREIGGDIRIVMEHTGMYWRPIAHALKEAGFFVSVVNAILIHNFSDNSLRRVKTDRADALKIANYCLTFWAELRNFSDEDETRQMLKMQCRLYERTQKTSVELRNGLISLLDQTFPGINKVLPSPYCSKRGHYKWVDFVKTFWHKDCVKKHSLNAFSNSYQRWCKKEGYRFREAEVEKIYSAAQNAVATFPANESTKILIVQAVDCLNAVYESKAVLRNEMRRLASLLPEYEVVMAMQGAGDITGPKLMAEIGDVRRFTSKRALVAFAGVDAPPFQSGNFEAKSRHVSKRGSPHLRRTLFQIMSVVLQHGSVDNAVYLFMDKKRAEGKHFYVYMVAGAAKFLRIYYARVKEYLAASETCKRAA

SEQ ID NO: 514423 - protein, 275 aa, unidentified
MAKARSLVGLDVHATKIVAVVLDAETGQLQTFAMSGENTKAAAFCAGLPGPVRVAYEAGPTGYGLARELAKRRVECLVAAPSKIPRASGDRVKTDRRDAEHLVRLLLAGKLHAVRVPDDEEEALRDLVRARDAVRMDLMRCRHRLSKLLLRHGIRFEDGHAWTERHRAWLATITLPWPAAQATMLDARGAIDALCHRRDGLEREILAMLPSSPWVVQVSRLRCLRGVDTLTAVGLCAEIGDFERFAKAEQLMSYVGLVPCEATGVAWVRRRLVGS

SEQ ID NO: 514424 - protein, 374 aa, unidentified
MSKNTRYLGLDVHAETITAAIAEGRQKIRSVGQFPNRPEAIRKFIEKLGGANGLKVCYEAGPTGYALYWQLTKMGVECEVVAPSLIPKKPGERIKTDRRDAEKLAQCYQAGTLTAVWVPDGAHEALRDLVRARGAAKDDESRAKHRLIKYLLHYALRHPDNCRSWTHPWWRWLQALKLEHEAQRETLQAHIAEVLHQGERVCRFDKAIERAIESVSPEKKAVINALQALRGVAQLTAVTIMTEVGTFQRFRKPTELMGYTGLVPSEYSSGGKESKGRITRTGNAHLRHVLGETACHCRHKPWLSNRLKQVLPNLSPGVSEIAWKAQERLHRKFTKMTYQSKQPGKVLTAVARELVGFIWAIGSKVEQEALAKAA

SEQ ID NO: 514425 - protein, 403 aa, unidentified
MSRDGSVAAEGRRGATTDGRVPMAIYCTYFGIDSHLRTTTICALTPEDGEPGTRTFRGNDYGEMAEWMAGFPQPSHGVYESGCTGFVPARMLTRGDTLVEPVASSKLPSSADSRSRKNDRRDAERLARLALAGEVSPVWVPPEQVEGLRELAQAMDDLACVREAARQRVNAILCRHGISWDERTPTGRLKKRWGQHFWNWLRSIDLGDAGSQAAYLAALSAAESAEVAYDELRARAEGIARASDLGPPVDALMCVKGVGFSSALAFAAEVGDFSRFASGRKVTSYFGLAPSESSSAESRRLGRISRNGCALVRKLLIEGAWVLARGNPACRKRGGTSVPLAIREHARACSGRLLGRRRELVSRGLMPCKANTATAAEMARMLLYIGRDAQEAAALAAEVALVA

SEQ ID NO: 514426 - protein, 318 aa, unidentified
MNNSNRTPVILGIDVSKGWIDAHMLPSGETWRIANDAKELKSWVQQLPEGITIAILEATGGLETQPAIALAQAKIPTAIVNPKQVRSFAQAMGQRAKSDPIDARLIAQFGERIQPKAKTLPDEDQADLKELLARRQQLVADKVAEQNRLGSMRSKQAQKSIKAHIQWLIKQIERIDQQLDDSIQNSPLWLAKQQLLTSVPGVGPNTARTMLALMPELGQMNRRQIASLAGLAPFTRESGKWKGKRFIGRGRKDARSALYMAALTATRCNPVIASFYTSLTSQGKPHKVAITACMRKMLTAMNAMIRDQKPWNKNYEIA

SEQ ID NO: 514427 - protein, 339 aa, unidentified
MELYSGMDLHSSNTVIGIVDEKRKHLMDRKLPNDPELIRSFLKPYKPVLKGIVMESTYNWYWLADLLQEEGYRVHLSHPVANEQYKGLKHSDDKHEAFWLAELLSLGILKEGYIYPRQIRSLRDVLRKRAHLVRVRSALLVSLGHMVQRNCGMKVKTGDMKRLTQDLVSPLLNRDEALLLAGKTSKEVIDCLTRQIDKIERWALNRLRQEGVFLGLVTLPGVGDILGMTILLETGPVSRFRAVGNYASYCRKVSSQWTSNDKVKGRGNIKNGNKYLAWAFSEAAEYARRTNEACRRFYDRKLRQTNTKVAHNALAHKLARAAYYIMKDHVSYEEEKMFS

SEQ ID NO: 514428 - protein, 351 aa, unidentified
MIIIGVDYHPSVQQIAYVDTETGETCERRLNHSDGEAEHFYRALERRQVSVRVGIEATGHARWFERLLAELKFELWIGNAAEIKAARVRKQKTDRQDALLLLKLLVEDRFPRLWVPSPENRDLRQLIWHRHRLVQMRTRAMNQIQATAMNEGVRRKKALWSKSGRQQLESLLLAPWATRRRQDLLELVDRLNGTIAELTTAIEQEAHKRPEVLRLMTHPGVGPITALAFVLVIGSPDRFACGKQIGSYLGLIPCEDSSANRQRLGHITKQGSSLVRFLLAESAQAAVRWDSNWRRRYAHLSMRRDRRIAKVAMARRLAISLYWMWRKGYDYQQSLKFGSHAGEPGYRHGVK

SEQ ID NO: 514429 - protein, 452 aa, unidentified
MARKPKQASKSNNAVLPVMRPDAAGIDIGATEIFVAVPADRAEENVRSFPTFTQDLYALADWLQQCGIRTVAMESTGVYWIPLFQILEERQFEVCLVNARHVKNVPGRRTDVSDCQWLQFLHSVGLLKASYRPEQEVCAVRSLLRHRESLVQMAATHVHHMQKALDQMNLQVHHVISDIVGRTGWAIVDAILDGERDPLTLAKLRNERIQASEEVIAKSLVGDYRPEHLFTLRQSLAAYRSYQKMIDECDQEIRQRLRDFQPPHPPAETQEDEKRTNKARSPGSVLRSELKRVFGIDLTRIPGIRTGIAQTLFGEIGPDFTPFRSASAFASWMGLCPDNDISGGKVLWTGTRKVSCRAATALRMAAQSLHHSKSGLGDFYRRMRAKLGAPKAITAAAHKLARIIFHLISTRQEFDEAKFAADQLRFHKSQETKLRAKAKSLGYQPVPIEPAA

SEQ ID NO: 514430 - protein, 338 aa, unidentified
MTIATLGIDIAKTAFQLHGVNRNGRVLLRQRVMRDQLLHVVGQIAPCTIAIEACTGAFYWQRKFEALGHRVKIISPQYVKPFVRRQKNDGNDAEAICTAARQPHMQFVPKKTIEQQDIQALHRARQRMVNHRTAVVSQIRGLLLDRGFAFPKSITRARRMIPEILGDIENELTGLAREAIGELHDLFMDLDRRIASFDKKIERVFRSSKACQRIARIKGVGPKTATAVVAAIGDGSEFKNGRHLSAWIGLVPRQHSSGDRTVLLGITKRGSQHLRTLLVHGARSVVRTAGRRTDPFNTWVNQLRERRGFNRATVAVANKNARIIWAVLRSGDVYHGAH

SEQ ID NO: 514431 - protein, 375 aa, unidentified
MGHHSEAFVGIDTSKLRNAVAIAEAGRRGELRYLGEVDTRETATRKLVAGLAAKYRKLTFCYEAGPTGYGLQRLIESLGHTCIVAAPSLIPKKAGERVKTNRRDAEGLARLLRAGELTAVWVPDERHEAMRELTRARDASRQDLTRKRQQVSSMLLRLGRHYPGIRTWGARHRAWLANQKFVHPEQRLAIEELLLAERQAGERIARLEQAIRSAVADWSLAPVVPALQAMRGIDLVSAVTILAEIGDLSRFASPRQLMAYLGLVPSERSTGESVKRGSITKAGNGRARRVLGEVAGAYRHPPRVGYEKQAQVAAAPVRAREIAWKAQVRLCKRFRTLSRKGKKSTVVATAIARELAAFIWAIAREVPDATTARTA

SEQ ID NO: 514432 - protein, 419 aa, unidentified
MNWSEFTHFAGFDWADDHHDMVVLDRQGAIIDQWTFEHTVEGWTECRRKLAAYGGKLAVALETSRGLAIDELLRAELTLYPVQPVAASRLRDRKAPSGAKNDRLDAWALAEGLRLDGHAWKPLAPEDPITLELRLLCRDEVALIQQRTLLVNQLLAALKEYYPTAVEAFEDWTTASAWDFIIEFPTPERLAKAGRRRWEKFLHTHKLWRPQTSQRRLDAFAKALEWKPATAVVAAKSRLATSLVSLLHRLQTELDHYRTRIEELFVSHPDHHLFGSLPGAGSTLAPRLLGELGQNRERFDSPQSLQCFAGTAPVSFQSGQIHRVRIRRQCNRFLRHALHLFARCSLLKSAWAEAYYQSLRARGKSHACALRCLAQRWLEIIWRMWQDGRPYDAEVHLANLKKHGSITLAAILNPAPSRP

SEQ ID NO: 514433 - protein, 387 aa, unidentified
MSPTIAARRPAAVDYERTLILSIEVSNQSWVLAAQVPGLPHTKAKRTVDPEAEALMAAIAGYRSRAAAMGRSIERVIAVYEAGWSGFWLARWLTRHKVEVYVIQPSSVPVDRRMRRAKSDGIDAELLLRTLLAWLRGEPRVCSMVPVPDEADEDARRCIRERTELISERVGLTNRIGAVLATLGVTDYNPLLRNRHHRLAELRTGLGEPLPPNAHAKIVRLLARLELVLAQIAELERERDAVVETETPDHASKMIQQLISLRGIGVQSATVLVREAFVRRFANGKALGSYAGLTSSPYSSGGIDREQGIGKGGNRRLRTVMVELAWLWTRYQPAAAQVCWFRERVGSTGRRVRKIMVVALARKLLIALWRFVIDGVVPEGAVLKPAA

SEQ ID NO: 514434 - protein, 336 aa, unidentified
MYYIGLDISKTTISVYIPKIDKDIEIENSIKAIRSLYSKLKKVYKKDIEGVVFVYEPTANYSSILKRFCSEKNIKVFLINPKQSSNFAKAIAQRGKSDKADARMLSHAGIIAKDDEIVVPMINHLVEEIKELMAYYKIKVKHRVGLSNHLESLSAKQNNSTLVNKVQKELDKLKKDEKEIIEEIYQLIKKDTTLHDKYKAIISIDGIGKIVAIALIHLFVKYPNANQREIVSLIGLDPIKRESGTSIRGKTRISKAGGKIYRGGLFMAAMVAIRYNENMKQFYNRLKENHKHTTVAQVAVMRKLVIIAHSLFKSGELYDENKYLQETSSEKLEKVA

SEQ ID NO: 514435 - protein, 423 aa, unidentified
MRGCVYAQNCFPICCGIDVHKKFVVATVGTTNKSGVTDYQTRQFSTFTQSLLQLLDWLKAHSCVHVCMESTGKYWHPVFNILEDYCDVVVANPKYVKGIRGKKTDKKDSIWLCDLHKHGLVPSSFIPPLPIRQIRDLMRYRFKLINVKSSEKNRIQNSLTVSNIMISSVVSDTFGVSSMRIINHILDNPDDMDFEVSSMLHGRMQDKAETITKSINGNLTKPQADKMRVCLHHLENIEKHITDIERVVLGLAQPYLPQIEIILSLPSIKDVFTAIAIIGEIGSDMAVFNSSKHLCSWAGVTPQNNESAGKKKSVRISRAGVYIKPLLVQCANAAIKSKKCPYFKNRYDQIKKRRGHKKAIIAIAHTLLKCIYHMLDKGETFNFELYKIDSKPKQTYASQITEEMAIRYLQTLGYQIPDMPNTT

SEQ ID NO: 514436 - protein, 345 aa, unidentified
MLYVGVDFHKRYSFITEMGEDGTINGQLRLSNDRESLTQYVNKLPSESKLAIEATCNWYYFYDLVEEHDIDVSLAHPLKTKAIASARIMNDKISSTTLADLLRTNYLPTAYIPDREVRDTREILRSRAFLVAMRTRLKNRVHAILSKNGLESPYTDIFGKKSLGWLRELHLRPCYRQPLDSYIRLAESFGNEIELVTQTIESLAMENPQARLLDTHPGISYYSGLLIATEMGTIDRFPTHGQLCSYAGLAPSVHPSGGKTRLGSITKQGSKWLRWILIECSSHAAKGSARYKSLYTRVAYKHGKATARVAVARSMLRAMYYMLKYNRPFQERPVLERSPVSAIGT

SEQ ID NO: 514437 - protein, 428 aa, unidentified
MNEVDRNRLEEFRQLRKEIRQSEEHLIVGIDIAKDRHHAFFGTATGKTLLRRLVFSNDGEGFGKLLDQTEALRVRHGLKKVVYGMEPTGNYHKPLGEYLIHMGRMVVLVSGVTAKHNRESLDGRWDKHDDKDSANVADLISQGKCLYYEYPPAQLRGLRGLLSLKRRLKRQEQSYRVRIRNHLIAQYFPELDSHYGQSEAQGLAIVRWCFPASHITEIDVDPFIERVTSRRVRVEKRRRLEALWEKAGESIGCDEVPGLDHEAKVMVEGLRQIREMIQETKDRIEELCKRYPEYPFLLTIPGFGPDVSAKVLGAIGDPGRFENGKQVLKQAGLDLSANRSGKNSDQAIPQISKQGKADLRYALYQAAFIASTKNRGFMRYYTSKLRGREKEKGIDGKRLVKLSAKMLLIAWTLMKKKEAFNPAYLNAE

SEQ ID NO: 514438 - protein, 350 aa, unidentified
MMIIGCDLHTRYQQIATLDTDTGDLVERRLEHESGEARAFYSALQGRVRVGIEATGHTHWFEAMLAELGHELWMGDAAKIRASVVRKQKTDARDAEHLLDLLRQDRFPQIWRPSPAERDLRQLVWHRQKLVWMRGAVKNQLHALAMGEGVCRKKKLFTAKGRKELEGLALGPWASYRRQELLRMFDELAAATAKLDLAVEQAAKDQPLAMRLMTHPGVGPVTSLAFVLIIGPVERFERSKQVVSYLGLNPQEHSSGGKQRLGAISKQGNPMMRSLLVEAGHTAARFDPALKRMYQRLKFRRGASVAKVAVARKLAVRMYWMLRSTADYAQLVRMQGSPWATLVENSSSLG

SEQ ID NO: 514439 - protein, 366 aa, unidentified
MEQFIGCDAHKKYSVFVAVNERGEASPAIRVGHDREQYRQFLERLPAGSQIALEAGGHYYWMVDEMEAAGHQPRLVHPLEAKKRMGKTGKKTDKVDANGLGILLRNGTLPEVWIPPSGLRDQRESLRLRMFLVQQRTRLKNRIQGALARYNIQIAGVSDLFGGEGRLRLGQRLGELPELPLHSREAIEQELATLDFLETQIESAEQRLEMIMKVSAETDLLKTLPCVGKILSMVLMLEIGSVDRFPTAAHLASYAGLVPRVHSSGGRTRLGQICGDVNQYLKWAFIEAGNLVVIHQKHLAGQHVVRLYQRVKRKKNHQKAVVAVARHLAEAAYWILKKQEVYRDPQPKPKAPAQAQAAHALSSTHG

SEQ ID NO: 514440 - protein, 350 aa, unidentified
MTISHYIGFDVHKKSVSYCVKTADGRIVEEGKLRATHEALRQWASQRQEPWHGAMEATLFSGWIYDTLQPFAAELQMGHPARMKAIFAFKKKNDKLDARKIADLVRVNLLPACYVGPAEMRELRRMLRYRNLVVGQAVQMKNRMSGMLMEVGAEYSKQRLHGKEYFSELLDQLEEVPESVKDLLRLSRGALDLFESVQRQLLGRLQKEPLLRQRVALLRSIRGVGEVTALSWALEICDPQRFASIGDAVSYCGLTSALVESADKQQRGPISKQRNAHLQTVLIEAAKLAPRWNPQLAALHERALQHGHRNRATLEVARKLVAYLLAVDKSGQPFEVRTAPATETEAQQVA

SEQ ID NO: 514441 - protein, 358 aa, unidentified
MNYIGCDCHISTLDCAVVNERGQETKKQRVNTGVRELMEFVKSVPKPRRIIIEEGTLASWLLEVCTDYGEELIITDPKINRWIGRAGQKNDEIDASKLAQLARGGYIKEIHHPIGHRRRFRELVMLYHDTVKSQTRIKNKLKAKFRQNGIKCSGETVYSVKYREKWKKKLPQEKVVEVMVVGLWQQLDQVHEVQEELLSHIRKQSRQYSEIKRFKHIPGIGTVHAATISAIVETPHRFANKKKLWMYAGLGLAEKASGEKVYSRNLTRSYNRLLKSALKQAAEAAISARDNQFRRQYLRLTLEKGIPSHRAKLTVARSILATAYGTWKSGENYDPHIDKRRAESDTMQVRAYHLVRNG

SEQ ID NO: 514442 - protein, 430 aa, unidentified
MVRYVGLDVHKREVEVCILDRKGNQVLSRRIACTRESLTAFAQESLNRQDRVALEASTNTWAVVAVLRPYVREMVVSNPMKTKAIAEAKTKTDKVDAKVLAQLLRCDFLPGVWQPDEKTQELRRLTTHRASLITERARIKNRIRSLLAYRLIEPPRNFIWSKKGLAWLQGLDLPEHEAIILRTDLDLLQHVEKQLVTMDRQLAQMAYQEDRVRLLMTLPGLDYTVAQGLLAALGDISRFADGDHAAAYLGLAPSTHQSGDHCYHGSITKSGRSHARWLLTQAAQRLDRHPGPLGVFLRRLCRKKNRNVAVVATARKLVTVAVLMLKNNEPYRYAMPELVKTKLGRVRFRATGVRQIPPKKDSQGRANNARGPGLGEVYQREGLPPVKTIEELPPGEQQMLRSRRVITFAREIQRGAPKKSVPMKNKQGAK

SEQ ID NO: 514443 - protein, 375 aa, unidentified
MKNKVRFLGLDVHAETITVAIAEPDGEVRSLGTIANRVESIRKLVKKLGSVEQLKACYEAGPTGYILYWQMAELGVACEVIAPTLVPMKAGDRVKTDRRDAERLARSYRSGDLTAVWVPDEGSEALRDLVRAREAAKQDQLRARHRLAKFLLRMGQRPAAGMKAWTAPYMAWVRQVHFTQGAREATLLDYLHEVDHMGERVRRLEQAITEAVKLASPQVREVVKGLQALRGIAEISAVTIVAELGNIARFETPRQLMGYSGAVPMEDSSGQRTRRGSITKTGNAHLRRIIVEAAWSYRYRPAIGPRLRKRQEGVSEEIKEIAWKAQVRLSKRYARLAAAGKDQRKIITAVGRELLGFIWAIGIKAEAASELQMAA

SEQ ID NO: 514444 - protein, 347 aa, unidentified
MSHTKKGDRIMQVERIGLDIAKSSFQVHGVDAHGKVVVRKQLSRSKVLLYFAQLPPCLIGLEACGGAHYWARELQKLGHEVRLMAVAMIQPYRTGQKNDQNDAEAICEAVSRPRTRFVPVKSEAQQAVLTVHRARELLVTERTALANQIRGLLMEYGVVIAQGIQRLRRELPGVRAATETLPELVRDVVEELRERRQELDRRITDYDHRIEQLAKQNEATRRLMQVEGVGPITATAIVATIGNGHAFQHGRQFAAWVGLVPKQHSTGGKTVLGRITKHGNVYLRTLLIHGARAVLQFSAKRSDQKSRWVEQVRQRRGNNIAAVALAAKHARILWALLAHGQEYQLAA

SEQ ID NO: 514445 - protein, 418 aa, unidentified
MIEDVQWFVGIDWATQSHRVGLLDIEGRHVSERDFAHGGAGMTELRDWLLEKTKAAPGQIAVAIETPHGPVVETLLDHAFQVFAINPKQLDRFRDRFTVAGAKDDSRDARVLGSALRTDRHAFRRLVVDDPLVIELREWSRMAEELQQERVRLANRIRQQLWRYYPQAAELTDDVADDWFLALWQQVPTPATAAAASEEAITRILKDHRIRRLDAATVLQTLRKTPLFVAPGTTEAACAHIRAVAARLRLVNQQIKEAHRALDGLCAKLEAPTESPSGQNREQHDVTILRSWPGIGRIVLATLLTEATEPLRARDYHALRALAGTAPVTRRSGKQCFVIRRLACNKRLQNAVHHWSRVAIQHDTAARRRYDALRRRGHGHARALRTVGDRLLYALCTTLNRQTPYNPNCQTAQVTAGL

SEQ ID NO: 514446 - protein, 343 aa, unidentified
MSAYVALDVSLQSTSVHVVDEQGRCLWRGKCPTDVAALANTIRQHAPEVELVGLETGQLSTWLCHGLAGIGLPVVCMNARQAKAALSCRINKTDANDAEGLAQLLRTGFFRPVRVKSQGTMLVRTLLSARRQLVRTELDLANQIRGLLKTFGLFLPRGGGRLFEAAVRERLAGHNPLAMTIMPLLQIWRAIRTQVLGLDRLAYAVAKRDPNCRRLMTAPGVGTITALAYVAAVERPEEFQNGRAVSAWVGLTPTRYQSGQIDIAGRISRQGDTHLRTYLYEAANTVLTRSRADTAIKRWGLALKARVGHKRAVVAVARKLAVVLHVMWAKAQPFRTDAITATA

SEQ ID NO: 514447 - protein, 326 aa, unidentified
MEHELHYIGIDTAKEKLDVDVLRPDGRHRTKKFANTTKGHDELVSWLKGHKIDHAHICIEATVTYMEPVAECLYDAGYIVSVINPALGKAFAQSEGLRNKTDTVDARMLAEFCRQKRPAAWEAPHPLERALRALVVRHHALTDMHTQELNRTETAREVQRPSIDAHLLWLEAELKRLEKQIKDLTDDDPDMKHRRKLLESIPGIGEKTSAVLLAYIGLKDRFAHARQFAAFAGLTPRRYESGSSVRGASRMSKAGHVSLRRALYMPAMVATSKTEWGRAFRDRLAANGKKGKVILGAMMRKLAQVAYGVLKSGVPFDASRHNPVAA

SEQ ID NO: 514448 - protein, 373 aa, unidentified
MEQFSKYVGLDLHMDTIAVSIADAGRSKARYYGTIKNTQAAVSSLLKKINPAGEVLELCYEAGPCGYGLYHQLKACGHECQVVAPSLIPKRASDKIKTDRRDSQRLAELLRAGELTPVWIPDAEQEAIRDLVRTRDDFKTSQRQVRQQLLGFLLRHSQRWTGGKKNWTKGFWHWLDALEMPSRHQQFALKEYIDAVRNYGAQLQEIEKQMLVAKQGWKLEPIVDGLMAMRGINLVTSMGIVAELGDLSRFRKPRQLMAYLGLVPSEHSSGESRHQGGITKTGNAHVRRLLIESAWSYRFSARKSPSIEIRAQRTSAEVQGIAWKAQKRLNARYKALSERGLSSCKVVTAVARELTGFIWAVVQQARDEQLATT

SEQ ID NO: 514449 - protein, 426 aa, unidentified
MWDAQRRVLKIKSLKHGIIQDKRGNVMRAVFGIDVSKTSSEVAILVNGEKVHGYTILNDAFGFNRLLGDLKTVHNPEIIFEATGVYSRRLQAFLEEYGYAYTRLNPLEAKKQLDSLRVRKTDKIDAEKLAKSQLVHNRKPTYVQEEVYQHLRDLSRFYQNMTEDLVRAKNRLHKVLQVTFPELENLLSTPTGEQYWNLVMAFPCKEFVLSLSQSDLYEIIRQSTSKRISEKRIAYLTDKLIKLAKQSFCAVKKTSPMLEEVRYYAQELLRLSERRQVVLNDMVALAQPLPEYDILRSIPGIAETTATSIIGELGDIRRFQSTNQINAFIGIDLRHYESGNFLAKEHITKRGNPYARKILFKCIHNIASASHTNPCHIADFYEKRKRQSTIASTKPHTIASIHRLIRTMYYLITHNKLYDYSLTQNR

SEQ ID NO: 514450 - protein, 349 aa, unidentified
MTTQRLSYVGQSVYVGVDVHKDTYAVTCVCNKQIVKTATAKADPAGLTASLSQWFPGARLYTAYEAGFSAFVLHRALTKAGIMNIVVNPASIAVAANDKVKTDRRDSKKLAIDLSDGRLQGIYVPTEDEELARLLPRTRAQIVEHRATIARQIKAKLHQFGLIAPASRRLISNRYLREIDAWPLPPDLRVSLTFLAEQWRFATRQLIEMRRLLREQAKAHPAIEQVYRSVPGIGEVVARTLATELGDMTRFANERALFSYTGLTPSEYSSGPSVRRGHISRQGSSRVRHLLIETAWRALPRDAVLKEIFDRIAATRGKKRAIVAIARRLTGRIRACFRQGTTYAVGTYA

SEQ ID NO: 514451 - protein, 345 aa, unidentified
MELHTIGIDLGKTVFHLVGLNLRGEVVVRKKFSRKQLIHFTANLHVELIGMEACGGAHFLGRALREQGHEVRLMPAQYVKPYVKTNKNDFIDAEAIAEAVARPTMRFVPIKTDDQLDLQSLHRVRERWVMRRTAIVNQIRGLLLERGITLRKGRRHVNAALPGILEDADSKLSGALRMLLAQLKLELDQMAMRIEEADAVLNQTAHENEACQRLVTIPGIGPVTATALIAAIGNGAAFRKGREFAAWIGIVPREHSTGGKQKLLGISKRGNSYLRRLFIQGARAVLQQRAKQAPGLSAWLTQLVGRTHRNVAAVALANKLARIAWAVLAKEEWYQPQALTSLEAA

SEQ ID NO: 514452 - protein, 416 aa, unidentified
MLYLAIDQHRKQLTVNLRNEAGDVIVKRQVSTEWARVREFMEELRNQSAPEGGFVAIVEVCGFNDWFLKLLAEYGCKDIVLIQPEKRTKNKTDRRDANALGELLWTNRRRLLAGKKVQNVRRIVPPSPRDAEDRQLTALRQQVGRLRTRAINRVQHLLLKHNLQQECPTKGLQTQAAKKWLAKLPLGRIDRLELDQTLAQWQLLDQQLKELEAEIVPRQAESQTAAIIATIPGAGAYGSLALASRIGSIKRFPRDRSLANYFGLTPGCRNSGDATRRLGSITKEGSGIARFILAQMVLHVLRRDARMKEWFGGIKRRRGAKIARVAAMRRLATIIWHMLTQQQPYQPGRKRGKGGDQKNGGQEGNCQNSGSQKRGGQKGGGPPSGGDAFMEAWQGRSGGGKQKGCPVLGTEATARP

SEQ ID NO: 514453 - protein, 439 aa, unidentified
MQVVYSRCCGLDVHKDQVTACVLVLGEDGKREVRTREFRTYRKELQKLKMWLYASKVMQVAMESTGVYWKPVWHMLEGHFPLLLANPYHMRNIPGRKTDQKDAEWIADLLAHGLLKASFVPAKPIRELRDLTRYRVKLKGEFNRVHNRIAKVLEDAGIKLGSVATDILGVTGRKIIRALIAGEQRPEWLADKAVSRLRNKREELRLVLHGEVHEHHRYLLQELMEDLERIESKILRIEAEIAKRTQPFQKQLARLDTIPGVDWITAWTILAELGEDMSVFPDAHHAASWAGLVPGSFESAGKRKSSRTRHGNCWLRRALCQSAWAVSRKKNCYLTACFYRRAARSGVKKAILATAHQILIIAFHILRDGTEYFERGGDHYDQLNPDKAKRRLTARLERLGWEVTLKPKPAPRPEVEPHRKKGRPCKCAERGIDCKHRRF

SEQ ID NO: 514454 - protein, 318 aa, unidentified
MSDSVFVGIDVSSQTLEVASSDQAKTWQVSNDAAGLEALVSQVSTMAPALTVLEATGGYEFEAACALQAAGLAVAVVNPRTARDFARAMGALAKTDALDARMLAAFARVLHQHPERERFVKPLADAELQRLQALVLRRRQLVQMITSERQRMRISHAAARPSIERVIEFLKTELGDSDADVAVHVQRHHAELAAALASVPGIGAASVAVLLAELPELGKLNRRRVAALVGVAPLNRDSGQMRGQRTIWGGRADVRRTLYMATLTAVRHNPILKAYYEHLLAAGKRKKVALVASMRKLLTMLNAIAKHGTTWDPTLHNA

SEQ ID NO: 514455 - protein, 411 aa, unidentified
MERIVERPGALDVHKESVTACVRVWEGRELEEHMAEFRTTVQGLLALRDWLEALGVKHVAMEATGVYWRPVWAILEDRFALMLVNARHVKAVPGRKTDIKDAQWLCQLLEAGLLKASFVPPKPIRTLRNLTRYRKTQINDRSRETGRLHKILEDTGIKLDCVASDILGASGRAMLDAIVSGTTDPAVLADLAKGKMRKKIPALREALEGRFDTEHALIVSQILAHIDFLDEAIDRLSAEIEERIRPFARQRELLMTIPGVKQRAAEVLIAEIGVDMSVFPTPKHLASWAKVCPGNDESAGKRRSGKTGKGNKWLRATLTEAANAATRTKGSYLAAQYQRLRGRRGHSKAVTAVGHSILTATWHMLQNGELYNDLGGDYFIRQNPDRITKRLVRQLEALGHSVTLEPREVAA

SEQ ID NO: 514456 - protein, 429 aa, unidentified
MADPNERCEPDFAAFIGIDWADQRHAWALQTTIKGAIEHGDLDHTPEAVDAWATELGRRFGGRPVAIALEQSRGALLFMLTKYAHFVLYPIHPATLANYRLGFRPSGAKSDPSDAGLLLDLLVRHREKLRRLNPDTVETRTLQFLVEGRRKLVNDKTRYSNRLTACLKMYFPQVLDWFAEVSSKIAGDFLERWPTLPKLQKARLDTLRTFFIEHHSGRPESIQRRLEEIRRGVPATHDQAVIDSCVAAVTALVPLLRELRRAIQSYDEQIETTARQHADFVIFDSLPGAGAALVPRLIAALGTQRDRYSSASELQCYSGIAPVLASSGKQSWVHWRWACPKFVRQTFHEWAAHSIGSSAWASAYYTQQRAKGKSRNTAVRALAFKWIRILFRCWKDHTPYQEELYGQALARRAARTNGAVNASGKPARA

SEQ ID NO: 514457 - protein, 362 aa, unidentified
MIVIGTDTHKHTHTAAAANSATGELRGGATAPARTGGFARLLDWARGIDDERIWAIEDCRHVSGSLERYLVAHGERVVRVAPKLMGQSRRPERTRGKSDSIDAAAIARAALEQGPETLPGAHLDQDALQIKLWLDHREDLVRARSDDQQRLRWHLHDLWPDYEIPAGALDRIVWLDRVARRLARAEQSARVVIARELVVEIRRRTRRASELQRQIAGLVGDYAPQLLELPGCAGLTAAKIVAETAGATRFASDAKLARLAGVAPIPASSGRTSRHRLDRGGNRQLNCALHRIAVTQGRVHPPARAFLDRKQAEGKGRMEALRCLKRHLARAVWNALRDSESLDPDTRKLRATSTPAVAAGLT

SEQ ID NO: 514458 - protein, 338 aa, unidentified
MVSVGIDLHRRRSDLVGVDGLGSVVWKRRIPSSPADFLRVFGELEPGSFEVAFEATYGWGWLADLLQDVGIPAHMSHPLATRAIASARVKNDTIDATTLAQLLRTHLLPEAWIAPPEAREARRLVRSRAALVRIRSRLRCQIHAVLADHGITPEMSDLFGVAGRRLLAELELPPLSRHRIDGCLRLIDALTVEVESVDREMRVVFGQHSALPRLMRIPGIGFVGAATVIAEVWDVSRFRRADQLCSWAGLTPTERSSAEHTRRGHISKQGSRWLRWILVEAATNHTGRDPELRQFEARIARRRGLKIARLALARRLLCLCFYALRDPAGCAAYPLAAA

SEQ ID NO: 514459 - protein, 335 aa, unidentified
MKGTALTILDKRAVTGRVDTHADVHVAAALDRIGGLVGVEEFPTTASGYRRLLEWLSSFGPVVLVGIEGTGSYGAGLARHLATAGVPVVEVDRADRQDRRRAGKSDPLDAVSAARAALSGRARGASKGRDGTVEAVRALMVAKRSARYERTQSVNQARALVVTGPDDVRARFARHSTSDLVADLAGLRPRPGEVVAHATRVAQHELGRRAQFLEAQIDRLDELIVPLVASHAPGLMALYGVGPDTAATLLVAAGDHPERLRSEAAWAHLCGAAPIPAGSGKTSGRFRLNPGGDRQANHAPVAGRAHPHGLSSRNQGLRRTPPERRALQVGHNPLS

SEQ ID NO: 514460 - protein, 322 aa, unidentified
MAMLSFGGIDVSKDRLDVVVLPEEECSSVPNDAAGWAELVERLRGFSITVIGIEPSGGYERGAMRALLAAGMPVRQVNPFKLRQFARASGVLAKNDPLDARMIASFVTIMPTRPAQRQTPAAERLAEMLAIRRQLSTEKVAAENASRLLEDAMLQRLSRRRIVRLAADIDLLDKRMVEIVATDDALVHRYRLLTSMPGVGAVLACTLIALLPELGRMGRKQVAALVGVAPYAFESGTLKGRRCIWGGRAHIRQVLYMAAMSASNWNPVLKAFHDRLTAAGKLPKVVIVAVMRKMITMLNAMVRDDVVWADRLSGRHVLPTAR

SEQ ID NO: 514461 - protein, 427 aa, unidentified
MGAMSESEVQELQFAALVGIDWADQKHAWCLQAADTTQRENGEVQHTPEAIEAWVGQLCRRFDNRPIAVAVEQVKGALVFMLSKYGSLHLFPVPPTMSAKMREALYPSGSKDDPRDADLLLELLLQHRDKLRRLSPDSEATRRVQNLVDERRNLVDEKTAQINRLTHPLKIYFPQMLEWFEQLDTELVCALLERWPTLEELQKVPPERLRTFFHKQRCRYPELIERRLVGIRQAIPAIRDRAVIEAKSAVVKVSAQVIRSLVRGIADLDSKIEEAAAAHPDFFIFESLPGAGAVLAPRLLAAFGSQRARYASAEEVQTYSGIAPVMKRSGKKKWVHFRWACPKFVRQSFHEWAGHSIAHSQWARSYYQQQRERGKGHHAAVRGLAFKWIRIVFRCWKDRAAYDESRYLMTLAKRNSPLTAVPGGTML

SEQ ID NO: 514462 - protein, 344 aa, unidentified
MAIVGGLDIHRRQITHDYLDTGSGETRRGQLSPATRLELRAWLARFAGQQANFALEATTGWRFVAEELERAGSAAHLAEPADTRALRGPKRRAKTDRTDAHHLRELLLRGALPESWMPPAHIADARTQVRLRRALVGERTGWYQRIHAILFHHGLPERSQLLTADGRAWLARAELPAVARQAVELALRLIDHLEVELDLLDGELARIARAQPGCKALMGRYGIGWLTAVAIWAEFGDVRRFANSRQAVRFCGLDITITESDGKRARGHLARQGSPVLRWALHEAAMCAARPSSPDHPYYLQVKQRLGGKRAALSVARKLAREAYHTLRELGDQALVPAKLPTAA

SEQ ID NO: 514463 - protein, 362 aa, unidentified
MKKTIRERESEWKEKPDRTVGVDLGDRFSHYCVLNGDGEVMEEGRMRTSEEAFRRHWEAEPRQRIVMETGTHSPWISRLLRGFGHQVIVANARKVRAISENESKNDRQDAEMLARLGYCNPRLLKPIQHRSAERQRDLNLIRARDTLVRARTMLINSMRGLVKSAGGRLPPASSESFAARVSAAVPAELGTATQPLLRQIAGLTAEIRNLDQVIEKLTERYPEIRILRTVPGVGPVIAAAYVLTLDGVDAVEHSRSVGAFLGLRPKQSQSGDSDPEHNISKTGNIYLRRLLVQAAQYILGRYGPDSALRRWGLKLAQGGKRTKKRAVVAVARKLAVLLHHLWRTGQNYRPFPEAAVAAGSAA

SEQ ID NO: 514464 - protein, 344 aa, unidentified
MIYIGMDVHQSSTTFCRFDPSAEKGRQYRTLTRRTTAEAIEEVLRSYDGPCQVAYEVGTQAQWIAKIVRPLATEVHVANPSRIPWLFRDGRKNDRLDARKLATLLYLKQLPTVHLPAADISAWRALINHRRTLIRRRTMIKNQIHAIRRAFGYRCPHRSCWTRVGMTWLRSLTFDNARTLMVGALLDELAFVGEKLAGVERQLDKIAVTQANVTLLRTIPGIGPRTAEAIVAFTDVVTRFPDRKRFASYFGMTPTEDSSGLVQRFGHISKRGPSVVRWLLVESAHQVIARCPALRSFFDRIHRGKKERYKKAIVATGRKVLTICYGMMRDQTAFDMDKLRRPAA

SEQ ID NO: 514465 - protein, 411 aa, unidentified
MEVLHLRCAGLDVHKKTVVASVRLAEENKVTTEVKTFATTTAGLLALSDWLSANDCTHLAMEATGVYWKPVWHVLSDGEFELILANAAHVKNVPGRKTDVSDAAWLAELLAHGLIRASFVPDGQTQELRDLLRTRKQLVRERSRHIQRIHKVLEDANLKIDAELTDMLGKSGRAILDALVAGETDPVRLAALAHRNVKSPQAKLAEALRGRVTPHHRFLLKLHLQQIDGLDDSLGALDREIEANLAPFRIAVDIVSTHPGVSKLGAQAIVSEIGTDMSRFATASHLVSWAHLCPRNDESAGKRRSSRLRQGGRWLKTTLVQCAHAAKNKRGSYYEAQYLRLRSRRGPQKAICAVAASILTALYHMLKNGTLYQDLGADHFGRRSKATDTRRLVTRLEHMGYAVQITPLAAA

SEQ ID NO: 514466 - protein, 320 aa, unidentified
MMAQNDLVVAGIDVAKDKVDVCVRSLSLKRTFASTAEGRRELTSWLRRHKVGKAVMEASGGYERDWAKALRAAKIEVRIVDPKRVRSFAQSAGRLAKNDTIDAEMIAWFAETFDEARGQAYDAAREQLHQMVNARQALKDMQAKLENQGEHALPATVQRIHARIIKTIAVELVKIEAAISAMVQATPRFAEFAEIIESVPGIGRTTSAALIAAMPELGQANNKIVAALLGVAPYDDDSGRRRGERHIKGGRRRTRNVFYMACLGAATQHNPVLKAFYNRLVAKGKEKKVALIACMRKLISILNIMIERRQKWDANRYAVS

SEQ ID NO: 514467 - protein, 385 aa, unidentified
MRSEATREGESIVGGQVLYMALELSERTWKVLFASPAGRRRERSVAARDVAALVGEIAAAKRRLGLSAQARVVSCYEAGRDGFWLDRALRAHGIDNLVVDSSSIEVARRARRAKTDRVDLVKLMGLLLRWVGGERKVWSVVRVPSAQAEDIRQLSRSIERLKGEHGRHVTRIKALLATQGLKLARIGGPDWGKRVGELRCWDGSALGTWLQRDLVLEGERLAVVAEQLAALKAERDRLVREGRQPAAVKARELARLGAIASESSFVFATELFGWRTFSNRRQLAGSVGLTGTPYSSGESAREQGISKAGNKRMRTMLVEIAWCWLRYQPGSALSRWWQERFANTGGRARRIAIVALARKLLVALWRYLEHGIVPQGARLKMRAAA

SEQ ID NO: 514468 - protein, 295 aa, unidentified
MKITDEINVGIDTGKHQLDIYIRPLGEYFAVDNTQQGIKQAIKRIKKHSPTRIIIEATGRLEYPFACAAAKAKLPIVIANSYHVHNFAVATGKLAKTDKLDAKMIAHYGQAMQPKLTELKADNIKQISDLLIRCGQLVEMRTMEKNRLSILPVELHRSMNKVNKTLENEIKRIEQQLDGLIEKTPQWQQIMTILLSVKGVGKIVAYTLLSELPELGQLNRKEIAALIGVAPMNRESGAYCGKRRIRGGRAKIRTVLFMAMMSAIQSNPKFKGIYTRDHSRCRNLLALLAVEDHTI

SEQ ID NO: 514469 - protein, 419 aa, unidentified
MNEPNRMELAACVGLDWADQRHAICLQAADSTQTESRQLEQKPDALHDWIAQLRVRFPSRHVGIAIEQSRGAVIHALMMYDFLVVYPINPKALARYREAFRGSGPKDDPLDAELLLDLLRLHRSRLRAWLPDTVETRRLQLLSEYRRKLIDQRIRHTNRMTSLLKMYFPQALDWAGELGTIQSCDFLEKWPSLSHLQRVRPAQLRKFYQSHHGRSLARIEERLSQIRTARALTDDPAIVDALSLAVQAESAQLLPIIGWIARFDQDIAQQFAAHPEHELFESFPGAGSVFAPRLLIAFGTDRSRWDSAVDLQCYSGIAPVTKKSGKSCLVHRRLACSNFIRQTFHEFAALSIRYSTWARAYYDQMRGRGLHHPAAARALAFKWIRVMFRCWSDQKPYDEQIHLKSLRAKQSPLVKEDSE

SEQ ID NO: 514470 - protein, 323 aa, unidentified
MTGVICGVDVSCSTLEVRIGRQGATGSFPNTAAGIAALASFCRAHEVELVAMEATGGYEKQPFTVLAEQGLPVTILNPRAVRRFAEGMGLLEKTDTIDAGLIAWFAEVKKSQPRPVPSAGQQQLRALVTRLRQLTQIRTAQRNQRRLVSDPVVEASFDQLLAVVNGQIKQLETAIAALISQDPLWRELDPVFRSIKGVADRTIARIVADMPEIGTLSNKAISKLAGVAPMARDSGKHQGKRITRGGRAAVREILFIVASVAGRYEPDLVAFQQRLNAAGKPPKVIRIALAHKLLVRLNAKARQVRKQMEAARSPSPVLAFATN

SEQ ID NO: 514471 - protein, 433 aa, unidentified
MSKFFNSPTVGIDVSADFSFVAILAPNGDVFKKPFRIKHDISGFTHLLKEIKKVEEEFNMKTAIFMESTGVYHLSLFHFLNKNFDNTFVINPLVTKCNKNVDIRKVKNDKKDALSIAQIGKFQNIKLSQSVSMDIFPLKSLVREYYKLTDNCSTYKKKLSTDLRVIFPGYKNVFSNVTSNSSLAILNDYPTPEAVLNAPKDIIIDILIKKSKRGLTWAENVYSNLINYANEAIIIGLPLYGFSVKITSTIKIIKTLEDEIKNLLKQIEYLINSPNFSEQIRKNIELINSIPGIGRLTAITIIAEIGDIDGFVKPKHLVAFFGIDSSVNESGKFKGNQNKISKRGTRIGRRALYAAALACIRTNRNGVPINKVLLDYYQVNLNGKKPKVALVAIMHKIINYIFAVLRNQTPFELRDPRIHKQMYLENNSIDYVA

SEQ ID NO: 514472 - protein, 421 aa, unidentified
MKPQVSEAFAAFVGLDWADAKHDVCLQAAGTAPREFLSLEHSPEAINTWVQTLRTRFHGQPVAVCLELNKGPIVSALRHYDFLVLFPVNPLTVAKYREAFTPSRAKDDPTDAELQVDILLKHRDKLTPLRPQSPTMRALAQLVEHRRRLVGDKVRLTNRLTSALKNYFPQVLHWFPDKDTAIFCDFLSRWPTLKAAQLARRSTLEGFFRAHHVRCVDVIDTRLQASKSARALTTDDGVITPNVLLVQALVAQLRVTLQAIADFDTAIAQRAQDHPDFPLFDALPGAGAVFAPRLLVAFGEQRERFSSAEELQKYAGIAPVTERSGKKAWVHWRLQCPTFLRQTFVEWAAESTRPSFWAQVYSQQQRDKGQAHQAAVRALAFKWSRILYRCWQDRTPYDESVYLQALKCRPAPLLHTLAKEA

SEQ ID NO: 514473 - protein, 319 aa, unidentified
MAQNDPVVVGIDVSKDKVDVYIRALALRQTWPSSAQGHRKLVAWLHKHQVNKAVMEASGGYERDWGKVLRASGIEVRIVDPKRVRSFAQSAGRLAKNDAIDAEMIAWFAETFSEAPSQTHDAAHEELVALVKARIALVDLKMRLEAQGQHAASKPVQKAQARILKSLVGEIAKLETIIAATIKATPRLAERAEIIESVPGLAETTSANLVAGMPELGQVSDKIAAALIGLAPYDDDSGNRRGERHIKGGRRWVRNAIYMPCVGAATLNNPVLKAYYDRLIAKGKKPKVALVACMRKLIVILNTMIARRQKWDPSRYALN

SEQ ID NO: 514474 - protein, 395 aa, unidentified
MNKPTANKHTMNKELLFLGLDVHAKSLTLALAEGGGGEARLYGTMPNDLHAVEKVFAKLKKAHPGVELRVCYEAGPTGFVLARRCAQLRIDCQVVAPSLIPSRAGDRVKTDRRDARKLARLHRAGELSAVHVPEASDEAMRDLCRARTDAVQDLRRGRAQLKAFLLRHGYRYTGKSAWSEAHQRYLRELVLPHPAQRVVLEDAIRAIGAAGERIARLEEAMAALLESWPMKPVVQAVMGLRGFARVGAMVLVSELGGAWRFDHPRQLMAYLGLVPTENTSCDKRRQGRITKTGNGHARWILIEAAQHYRLSPKVSKELSARQQGLSAEVKACSWKAQTRLHQRMMQLLARGKERNKVTVAVARELCGFLWHIFRLMEPRMRPGRTAAALKKEETR

SEQ ID NO: 514475 - protein, 320 aa, unidentified
MSASAQPPLFVGIDVSKDTLDVVLRPTGEYFQVPNTPEGHQQLCVRLKVLPVVCIVLEATGGYERACVAALLDVELPVAVINPKRARDLAKGLGILAKTDKIDGGTLAFCAEYCDLPRAKKTPEIQAQLEALVVRRRQLVALRAMELPRLEQTAHPQTRKDLQQTITFLTKHINTIEKKITALIDSDDHWAGLAQRLRSVPGVGATTAAVLLAELPELGQLNRQEIAALAGVAPFNRDSGKHKGKRVISGGRAALRHALYMAALTATRSNDKIRAFYDRLIAAGKPFKVALVACIRKLLTILNQMAKNRTQWNEHVASTV

SEQ ID NO: 514476 - protein, 312 aa, unidentified
MEKLSYGGIDVSRDRLDVVVLPEGWFFSVSNDTAGWTELVARLRPLAVCAIGLEPSGGYERGIIRALLAAGLSVRRINPNKLRQFARARGVLAKNDRLDARLIAEYVAIMPTRVVQRDGAVERLAEVVTMRRQLCDEHVAVENQAAHLQDAMLRRLSKRRLVRLEADIRLLDKRLAEMVATNAAFAQLYELLTSMPGVGPVLAFTLIALLPELGKMSRKQIAALVGLAPYDFDSGKLRGHRSIYGGRMPIRNVLYMAALSASRYNPALKTFSNRLAHANKKSKVIIVAVMRKMITILNAMLRDNAAWQPRSA

SEQ ID NO: 514477 - protein, 296 aa, unidentified
MLPASHRFSETNAEDGIASLVARLKALNPKIVLLEATGGYEVSVAYALSEAGLPVVVMNPKALRHFAKAIGRLAKTDKLDAQVLALYAQTIQPEVRPLKDREQLDLVNLMTRRHQLQGMIVMEENRRRTSAPRVRGNIDQSLAHLRQLLKDLDREIHDFIRRTPLWHHKAAILQEVIGIGPVVSSELIGHLPELGVISHKKVTALVGLAPMNRDSGQYRGKRMIQGGRPAVRRALYMAALVASRHNPVIRDFYQRLRLAGKPAKVALTACMRKLLVILNAMLKNRTHWNQQLPIAA

SEQ ID NO: 514478 - protein, 343 aa, unidentified
MQTITTIGLDIAKSVFQVHGIDAEGTVILRRQLKRRYVLVFFQKLPPCLVGIEACASSHYWSRELKALGHAVRLMPPAYVKPYVKRQKNDATDAEAICEAVRRPTMRFVETKTPEQQSCLMLHRTRHLFIRQQTAVVNAIRAHLAEFGIVAPVGRRGVEELLNVVADASDERLPEVARACLAALGDQLRVLKAQVLKFDRMITAWHRSNEMSKRLDELPGVGPALATALVASVADPKAFRSGRNFSAWIGLVPKQSSSGGKQRLGSISKQGDRYLRSLFTAGALAVIRYAKIHGTGHRPWLTALLARRSTKVAAVALANKIARMAWAMMARGEPYREPVALAA

SEQ ID NO: 514479 - protein, 375 aa, unidentified
MKKNSTVAESSRQSRKGRKICRGSITIGMDLGDKTSRYCALGQDGEVLFERATATTKKGMGQVFGALSRCRIALEVGTHSPWVSRLLKSFGHEVIVANARQVKLISQSTRKDDKLDARTLARLARIDPELLRPIRHRSEQAQLHLTQIRVRAGLVEARTGLINTARGLAKALGERLEKCDADSLECKSLEALPGPVRQALAPLLVQVAALTEQIRGCNEQIEQIARTQYPETELLQQVSGVGTLIALTFVLTLEDAARFRKSRDVGCYVGLRPKSRDSGESQPQLGISKEGDVYVRKLLVQGAHCILSKRSPDTDLKRWGLKLCARGGKNGKKRALVAVARKLGILLHRLWVTGAVYEPLRNSKAAERAAQKKAA

SEQ ID NO: 514480 - protein, 409 aa, unidentified
MLKVVYPNCCGIDVHKTFIVAVIAITDKQGITSYHRKRFSTFTNGLLQLQDWLEYYSCFDVCMESTGKYWIPVFNILEESCNICLAHPKYVKAIRGKKTDKKDAQWIADLFKHDLVASSFIPPLKIRQLRDLFRYRMKLTQLQVSEKSRYQNCLTWSNLQIASVVSDIFGKSAQKIIQSILDNPEEKPNIEQLVHKRMKDKVQDLEIAIDGDLTPEQAEKIRVIKAHYDALAICKEDLDLMIRELGREYQEQVKLIQTVPGFKDELSALRIISEIGADMTVFDTSGKLCSWAGLVPANNESAGKKYSTRISKGGRYLKPFLVQIANAVVKSEKHLEFRNKYLKLKKRRGHRKAIIAICRRLLVAIYQVLLKQENYNPTLQGLTEIRNQNKTMSVQDAIRYAQQHGFNVA

SEQ ID NO: 514481 - protein, 416 aa, unidentified
MISFPKRERAQHAAACVGVDAGKFSHTLVIRPKHQPDSKPFTFPTTRAGFDTAVAFIRQQAAGAAAETILVGIEFAGNYGFTFAHYLAQLGFPIVSVLPAHTKRWKDVAHNQPLKTDAKDAGTITDLLAQGHFVTFPFLSPAYADLRYLVTARERLSLLRRGAIMQLRTLIQVVFPEFEALFPFVTKKTPLTLLAIFPTPQDLLDATRTKVLRVLKSASRGHLGAETYEKLVEAARATLGLPGAQARLRQEILLTLERIALFERQIKALEAELVEALQAVPETPYLLSIPKVAPVTAAVFLGSIGDPRAYEAGEQILRVAGLSLVERSSGVLRGSKRISKRGRPLLRQAAYMFAVRSITKGSLFRAEYEALCQRNGGAKMKAVVAVMRSGLRLLYSIARDRRLFTVEPPARRRAAA

SEQ ID NO: 514482 - protein, 349 aa, unidentified
MNRTTYGLDIAKNVMQLHWVDGESGEIGRKKLVRAKLVDYFARLQPVRVVMEACGSAHHWARVLVALGHQVELLPAREVRPFVRNNKDDAADARAIWLAAQQTDIRRVPTKSVEQQAVLALHRTRQHCVSVRTATINALRGLLYEFGVVLPGGKHAGLKALGAHRAEIDAKVPEMMRRLIDGQLATLGDVERRIEQLEAELGVLQKQMDKANTLRLVPGIGLLGATALAATLGDGRGWRSGREFSASLGLVPAHAGSGGKVRIGSLSKHGDPYLRTLLIHGARSVITHAKVKPEWLERLLARRPLNVAVAALANKMARTAWALVAHGRVYQREWKSTPPKGCAAQAAAA

SEQ ID NO: 514483 - protein, 410 aa, unidentified
MMGAKSQADESSGPAERSLPRQQAEDMSAPETIAALQDPLTRGANGMDPALPARVTVSRPLLRGRTVMQIVRIGLDLAKYVFEIHGVDPQGKTVVRKTLRRHAVSTFFANLPPCLVGMEASNGAHFWANALSDLGHDVRLISPQFVTPYVKSNKNDRNDAEAICEAVGRLSMRFVPVKSAEQLAVQAVHRIRSRLVADRVRLVNQIRGLLGEHGVVVAKDIGNLRRALARIVDDEDRVLNPLARALMAELREELAELDARIGGYDLKIRELYRNSEICQRLGKVEGIGPVTATALVAAVGDRSSFKNGRQFAAWLGLVPKQRSSGGRARLFGISKRGDRYLRTLLIHGARSALGRVRDKQDPRSLWLGRMRQRRHPNIVAVALANKNARIAWSLLTSDSVYDVRLSVRAS

SEQ ID NO: 514484 - protein, 355 aa, unidentified
MNDEKYIGLDVHQATIVVAVMDSTGKLVMESILETEAATILQFFAGLRGTLSVTFEEGTWSAWLYDLLNPHVDKLVVCNPRKNALLKDGNKSDRIDARKLAELLRGNQLKPVYHGENGVRMLRELSRSYLTIVKDLSRVMNRLKAVYRSWAIPCAGRDVYYRRHRAQWLDKIREAGVRRRAERLYEQLDMLQHLRQQARRELLAESRKHAITAKLRQIPYLGPIRSALAVALIQTPHRFRTKRQLWAYSGLALETRISAEYRLVEGQVRRSKKLLSIRGLNKDHNHDLKGLFKGAATMASVRPGPFQDFYQAALAKGIKPTMARLTLARKIAAITLTLWKKGENFDAEKLKSQAA

SEQ ID NO: 514485 - protein, 368 aa, unidentified
MSEYTWIGLDVHADSITAAILEGNREEPEVIKLSSDLMKVRRLFRRLSEKAPVRACYEASGAGFVIQRVLTNYGFHCEVIAPSLIPRKPGDRRKTDRLDAVMLAKLYRSGHLTSVHVPTEDVEALRRLLRLRYTYQSYCKATKHRISGMLRAHGFVFTESKSTWTIKHRQWLAKLRLELKGPIQSALAIELEHLEHLETQREALDAELECFARSSTCRQRVEALCCLRGVRTLTALTLLCEIDDVRRFRTPRAVMAYFGLVPSERSSGERERKGPITKAGNTHARRLLVEAAWNNRHRNSADLILRRRRQGQPPAVVAIAMKAQHRLYKKFWRLDQRKHRQVAITAVARELCGFIWAILNAVSQHTTT

SEQ ID NO: 514486 - protein, 314 aa, unidentified
MKTNITTAGIDTSKSKLDIAVYGRTERWQVPNTLPGWRLLVSNLAKTGVTRVGIEATGGYERGVVEHLRAAGFMVLVLQPMQVKAFGRVHLRHAKNDALDAILIAACAAAMGPPRIAPDPRLADLAGYLTFLEQIEEDIARFKTRLEHIDEPRLRSLVGSDIRRLKARRKAQIRTIAKLLRGHDDLASRLDLVLSIPGIGERTALALIIRMPELGQVSREEAAALAGLAPFDNDSGLRKGQRHIAGGRGRLRKSLFAAALPAAFRWNKALIALYARLIANGKAHNAALIACARKLLVYANTVVQRGTPWVENAT

SEQ ID NO: 514487 - protein, 391 aa, unidentified
MIYVGIDVAKDKHDCFITNADGEVLFKAFTISNNLDGFSELYQKIESVMDDVTKIKVGLEATGHYSYNLLGYLIDKGLPAYVINPLHTNLYRKSLSLRQTKTDKVDARTIASMLMSDVNLKSYSDTSYHNEELKSLTRYRFDKVKERAKLKTSISRLVCILFPELEKLVPQLHMASVYAMRSEFPGAKQVANAHLTRLTNLLSESSKGHYGKETAITFRDAARASIGSNMPAKSLELKHTIKLIQELDSEIDEIENEIKIIMDKINSPILSIPGISYRMGAMIIAEIDDFSRFDSPDKILAYAGFSPSTYQSGQLDGAYAHMEKRGSRYLRYALYNATKYVCHWDPTFAAYLAKKRAEGKHYNVAISHAAKKLVRVIYHLEKTKQQYIKAA

SEQ ID NO: 514488 - protein, 317 aa, unidentified
MAQDDAFVGIDVAKHELVVHLYPDSECWRVTNSAKGLRDLAVRLGRVARNRVLRIGFEASGGYERNLAILLENKGFEAYLLDPARVRSFAKAEGKRAKTDPLDAAVIARALATLHPGLKPWRHDPAAQRLAERIRLRDQLMAQMIQSQNLLETAADAVAQRMTRAHVASLKAKIQRLDKIIAELICENPVLCQRAKLLRSAPGVGPVVAATMLAHMPELGSITGKQAAALAGIAPFDRQSGTSKKPGRCQGGRPAVRRALYLAALSIMRTKKTYLAALGLRLKTQGRPFKVAIIATARKLLVALNAMLKDGQSFVSA

SEQ ID NO: 514489 - protein, 342 aa, unidentified
MQISTIGVDIGKNSFHFVGFDARGGIVIRRQCSRTQLIRALANLPPCLVGMEACCGAHHLGRILVAQGHDVRLIPPQYVKPFVKSHKNDLLDAEAIGEAVQRPTMRFVPLKTMGQLDLQAIHRLRTRLVGRRTAVINQMRGFLLERGVTCPIGREALVKRFPEVLDNPALGLSVRFCRLLQQLRDEWRLLDDDIEDVDQEILSLARNDEACDRLMQVPGIGPLTATALVAAVGNGAAFAKGRDLAAWLGLVPRQHSTGGKTVLRGISKRGNAYLRCLFIHGARAVCHHHRQRPHRLGRWLANLEARAHPNVVAVALANKLVRTAWAVLQRNSHYDGRLLANA

SEQ ID NO: 514490 - protein, 426 aa, unidentified
MWDARRRVLKIKSLKHGIIQDKRGNIMRTVFGIDVSKASSEVAILVNGEKIHGYTMLNDAIGFNRLLNDLKTVHNPEIIFETTGVYSRRLRAFLEEYGYAYTQLNPLEAKKQLDSLRVRKTDKIDAEKLAHSQFILNRKPTYAQEEVYQHLRDLSRFYQNLTEDIVRAKNRLHKVLQVTFPELENLLSTPTGEQYWNLVMAFPCKEFVLNLSQNELCKIIRQSTSKRISEKRIAYLTDKLIKLAKQSFCAVKKISPMLEEVRYYAQELLRLSEHRQVVLDDMVALAQPLPEYDILRSIPGIAEITATSIIGELGDIRRFQSTNQINAFIGIDLRHYESGNFLAKEHITKRGNPYARKILFKCIHNIASASHTNPCHIADFYEKRKRQLTIASTKPHAIASIHRLIRTMYYLITHNKLYDYSLTQNR

SEQ ID NO: 514491 - protein, 348 aa, unidentified
MTIVDAARPVTGGVDAHLDLNVAAALDPVGGLLEVAEFPATSGGHRRLLGWLAGFGPVTRVGVEGTGSYGAGLARYLRAAGVEVVEVDRPNRQARRRAGKSDPLDAIEAARAALSGRASGVAKTRDGNAEAIRVLVVAKRSARATKIKTLNQIRHLSYTAPDQLRERLKGVSRQQLAARAASLRPSQREGADPVMAATKTALRILGRRVLALDEEKARIDALVSRLVTQTAPELLTLHGVGIGTAATLLVTAGDNPGRLRSEAAWAHLCGTAPIPASSGKVTRWRLNRGGDRQANCALWGIVITRLRNDPRTQAYMARRLAEGRSKPEVIRILKRYVAREVYHHLPRP

SEQ ID NO: 514492 - protein, 506 aa, unidentified
MKVQASKPTFTIDYNPIGQYGSNICRQDIGRKRPYRSLLRQRYWAWSFTSKLITMAKVAKRKQTSKGLRLEVVNPNAAGIDISPKEMQVCVPSDRDGECNRTFGVYTEDLHYIAEWLKACCIDTVAMESTGIYWLPVFRILKESGFDVILVNASDVKNFSGRKTDASDAEWLMMLHSYGLLKPCFQPENIARTMRNLVRHRDNLIRSASREVLHLQKAMEQMNLKLDNVFSDILGKSGQSVIKAILNGERDPKVLSDLADPRCRTSKEEIEKSLQATWDEEHLFEMRQSDSLYQFYQQLIAECDAKINEIAMQYSATVDAPKTELLRSGKYNAKKNRIGFDVEKVAFELWGVNVMRIPGMSRGALLRLVGELGAGFTTKFVDVKHFVSWANLVPNNKISGGALLSSKVPKKKNPVGIIFRQAANTLKAAKNPLGNYFRHMRAKGGHLQAMVATGKKLALIFYCMVQRKVEYNEKVYCNHRKQELQNKVAYLHKRLQRMESELANCG

SEQ ID NO: 514493 - protein, 406 aa, unidentified
MELIALYKRVIGLDIHQAQITACAIIEEADGTQRIEQKQFGAFKRDRRELAEWARTLCPEQVVMESTGIYWKSPYAALESAGIRALVVNARHVKNVPGRKTDIGDAQWLATLARAGLLRGSFIPSARLRELRLIARQRQKLVGQLASEKNRLHKVLTDGGIRLGVVVSDVHGQSARAMVKALIAGRPAHEILDLASKRLKASREELFDALEGELTSSHRFVLDELMRHIEEIEAHIARFDARLLEGLSPEHNTLVLLQTLPGVNLIGAAMLLVEIGNDMDAFGSADRLASWVGICPGNNESAGKRKSGRVRKGNLYVRRLLCEFAHAASRTTSVFKSKFQALIVRRGHKRSIIALAHKMVRTIFFMIKRNEHYRDSTTDYEALSIQRNAPRWIKALTKFGFIPATA

SEQ ID NO: 514494 - protein, 422 aa, unidentified
MSSEYRLFVGIDWATEAHQVCVIGPDTEIVEERVIEHTGSAIAQLLDWLARLARGEPERAAVAIEIPRGAVVESLIERGFPVFAINPKQLDRFRDRHTVAGAKDDRRDAFVLADSLRTDEHCFHRARIDAPDVIQLRELSRMDEDLREEANRLANRLREQLLKYQPQALRLCPSADEPWFWSLLELAPTPGHSAKLRTSRVQRLLREHRIRRLSPEAVLAELKAPPLRVAPGTVEAAGAHVALLLPRLRLVHAQRADCAKRIDSLLSEVGASGDQDAERREHRDVEILLSLPGVGRNVAATMLAEASQPLEERDYHALRALGGVAPITRQSGKRRVVIMRHACNQRLRNAFYHWARCASIWDEPSRQVYRAQRARGHSHGRALRTVSDRLLRILVAMLKTNSPYDVSRATRAPAGSRSEAVA

SEQ ID NO: 514495 - protein, 318 aa, unidentified
MYTTHCVGIDVSKAKFDYAFLSDQQVRYQGICANDPRDITEWIQKLETHGVRKDTPCVLESTGIYHVPVSLLLRDAGYTVHCINPILTRKYQQSSIRGAKTDAIDARRLAEIGIIESGLPIFTATRAQLYQRRLMSTLATLEREYQSLKRSFGALQESADALGVTESIPGKALVTEMGRTMRSLESEIIARAPTHARILAETPGVSLRAAAILLATLEGKTFAHRDQLTAFVGLDIRVRQSGTYRGRGKLSKRGDGYLRKVLHQIAWGLKRYDPYYQALYARLRAEKRHYTECLVIIARKFLRRLHATYFRCPQTAFA

SEQ ID NO: 514496 - protein, 420 aa, unidentified
MTVFCGIDWAERHHDVAVVDDTGTLLAKARISDDAAGYSKLLNLLTEHGDSPETPIPVAIETSRGLLVAVLRTGDRKVFAINPLAASRYRERHGVSRKKSDPGDALVLANILRTDMHAHRPLPADSELAQAITVLARAQQDAVWSRQQVANQIRSLLREYYPAALHAFQGKEGGLTRADARVILALAPTPSKAAKLTLAQLRAALKRSGRTRSFDTEIARLREIFRSEYARHRPAVEDAFGQQLLALLKQLDAACQAADDLTTAAEAAFKEHADSEILLSFPGLGPLLGARLLAEVGDDRTRFADARALKSYAGSAPITRASGKKHFVARRFVKNNRLMHAGFLWAFLSLTASPGANAHYRRRREHGDWHNAAQRHLLNRFLGQLHHCLQAWQPFDEQRAFAPLLPAQLEGVTGARKPSH

SEQ ID NO: 514497 - protein, 342 aa, unidentified
MPVVYCGLDAGSSLCQVAVLDESGAVVAERRFATSERNLIDAIDAIPGEKHVHLEASTLAEWIRGVLKTRVTRVVVSHPTENAWIARDPRKSDRRDAFKLADLLRRKAPITEVYYADDASRAAFKHLVLHYEDLTDQETRLKFKIKARLRGHGLFPRGDEAYGAGTRERWLAQVRSEAEREALKQMYRILDETLKQQGEAKSLMRREGKRFPEVSLLDGAPGVGPIGACQFVAYIQNPHRFSSKRKLWRYARLGITSRSSDGKAIGWQRLDRAGCGRLKAMSHAAFLGATRRRDDNVFKRTYRSSLERTHNAIHARLTTQRKILAVLRAMWKGGTAYRDDQG

SEQ ID NO: 514498 - protein, 455 aa, unidentified
MVDEAIFILFAQEKKKSFLATMTLINFVAANQKYYAFNLLSVFIMVFWSVQYLLQHLPVQTQLSDQLLQPLILILQLPQTPQFRHARPGKFFLPVNGMDYLLPLRLAVRNVLTRRITMNIVFLGIDLAKNVFQLCGLNQAGKPVYTKRTGRKELLQTLANIPACLIGIEASTGAFYWQREFEKLGHKVKVISPQYVKPFVRGQKNDGNDAQAIAVALMQPTMQFVPPKSPEQQDIQALHRARQRIVNHRTATVCQIRGLLLDRGIPIGSAVSRARRAIPLILEDAENGLSSRMRRTIAELYDLFNDLGRRIHFFDKEIETVFRQSEACQRIAKVKGIGPETATAVVAAIGKGTEFKNGRHFAAWQGLVPRQHSSGDRQVLMNMTKKGDRHLRTLFIHGARAVVRVATNNNDGHMNQWVNQLKERRGFNKTTVAVANKNARIIWSMLRNETGYQVV

SEQ ID NO: 514499 - protein, 358 aa, unidentified
MTTTTTSMTHSALQRRVIVGVDTHKEIHVAVAIDELGALIGTGSFTADRAGYTALISWATSLGAEVTFGVEGTGSYGAGLASAIRRSGIGVLEVLRTDRRDRRLRGKSDALDAENAARSVLAGSVHAVPKSADGIVEMIRVTKVAKDNAVKARTSAMLSLKQLLVNADDELRQSFKGLPKMTLIRRAAALRPGPIDNVTAATKQAIRAIAVRWLALDEEIKGHDLLLTRLTTSIAPDMVAGFGIGPDVAAELLIVLGDNPARIHSEAAFARLCGTNPIPASSGKTTRYRLNRGGHRQANSALYRTVVVRMQYHEPTKAYVERRTEEGKTKPEIIRCLKRLLAREIWARTRDFRAQSGT

SEQ ID NO: 514500 - protein, 401 aa, unidentified
MKRLSGGIDIGCESHHIIILDEEDNFLYNQKVAHKLNEFAESINLFKQIEKKEGGKISFALEGKNGYSNPLDRILLDQGFTLYNVDNFKLKRFREAFAGEWRDDERDSLMLSKMLKLKEYINSQREKVFIKIEKPSPLTESLKLLSRHQQTLIDEKVRLVNRLGKKLLEVCPQILRLGKLKNKKIITILAKYPDFSKYKRITLKSLLKIKGIGKKGAFFLLKRLNNIEYMPGLTDIYKTIILSYAQHILELQKEIEDIDKKLDEIGEKSKEVKHLKTIPGVATKLASRLIGEIGDINRFPSEKQLAIYCGIACVDNNSGKVTKAKAVYKANKICKQTLITMAGCSIRSIHQCKAYYLKKRTEGKSHNHTLRCLARQLIKVIYRMLTEDREYIVRKELKKVA

SEQ ID NO: 514501 - protein, 422 aa, unidentified
MKSSTARKLRQVPAGYLLVGVDPHKKKRGAAAMTQDAVVHTKFKFTNSREGYEAALERVRADMVKTGCRGVIFAIETGGHYWRNFAYYLEDKGVPFRLISQFTLKRRRDGKDLSRRKNDFRDAEMAADLLRVGDFTETRLPQGVYAELRSAYSSYFRLVKERTRITNLLKGLLDGLFPEFTQVFKDPCAQTALAVLSLCPVPGAIARMTEDELMCAFKAAYPQQRLMRKKLLALHAVARTSIGIRSGAASVALEVSSVVERLRLIRQQVGRVTELLGTLVDRTEEGKYLLSIRGVNYMSAAGLLAELGSLRAYRNAKQLVKMAGTNPIESESGGKRASHTPMSKKGRSRLRYCAWTAVIPLLRHNPDFRAWAKRLRERPVQANPLNGKEVVGAVLNRLLRLAYALARKQTFYRLPQPAAISS

SEQ ID NO: 514502 - protein, 396 aa, unidentified
MKYNTQNAKIKSITEKTLIVGIDVGSETHFARAFDWRNYEYSKKPLEFSNTESGFATFKAWMEDIAEKYGKNVVIPGMKPTGHYWFNLGAYLQDNGMKPVHVNPHHVKKSKELDDNNPNKNDRKDPKTIAALVNEGRFSYPYIPTGIYAEIRSPSNLRLQTQEEITRLKNCIARWFSIYFPEIKDVYKKPDSVSGLMVLKVAPLPEDIVKLGVDGINQIWRDAKLRVAGAKRTKTLITAAEHSIGSQEAPDSARIELKNLLNDYEVYCKRGEELMGMIEEKLSGIAYIDKLLEIKGIGMKTVSGFLAEVGDITRFDVPKQLQKLAGYAIVESSSGKHKGESHISYRGRKRLRYVLYEAAISLIARNKEFKEPVLPNQKRESAKENVVSHSGSLQST

SEQ ID NO: 514503 - protein, 285 aa, unidentified
MQEILIVGVDVSKHTLDIYFKPTGTIFQITNDLAGFRKCLRELKKASGIDGSTLVVMEHTGQYSYRFEKFLRSEGISYCKIAALQIKRSLGITRGKNDKIDARRIAEYGWLRRDILAADPKLEENIGELRNLVSLRLKMVRDRSGYISRYKEMLASGTCSMSDYQGKTHQQLISFLSKKIKEAEVRIKELIKANDGLLKTYDLLRSIKGVGLIIAAYMIGCTQNFERFDKARKFNCFAGLAPFKNESGTSIKGRSKVSHLANKQIKSLLNLAASCAIQHDQEVMK

SEQ ID NO: 514504 - protein, 342 aa, unidentified
MDEYDVRQFVGIDLHRQRSVIVRQSESGDQLSAVRIVNDPVALRLELERAGTDPEVVLEATYGWYWAVDVLRDCGAQVHLAHPLGVKGFRYRRVKNDVRDAGDLADLLRMGRLPEAWIAPPQTRELRELVRYRAKLVAIRSGLKAQVHAVLAKAGMLITVSDLFGVGGRQRLAKVPLGAAYAERVRSLLELIDVLDGHEARFAGLIAKRLCNHRGYQALQQVPGIGPVLAAVFVAEIGDVHRFTSPAHLCSWAGLTPKHRESDTVVHRGHITKQGSKLVRWAAVEAIQRYPTTSKIALDRTRIESRRGKNIAKIAAARKLLTLVYYGLRDGHIRALDRPRAA

SEQ ID NO: 514505 - protein, 312 aa, unidentified
MDSKLFVGIDVAKEHLDIALRPGGEHWTIANEENEVGELASKLLELKPVLVIMEATGGFEIPVASVLATAGLPVAVVNPRNVREFAKATGKLAKTDTLDAHVLAHFAAAIHPEARFLSDEQAQQLQALVTRRRQVLEMLVAEKNRIKISHKKVQKRLQEHITWLKQELQDLDKELGQAIRESPIWREKDDLLQSVPGVGPISSSVLLAGLPELGKLDRKKIAALVGVAPLNRDSGGFHGKRSIWGGRAQVRSVLYMAALSAVRFNPVIKQFYQRLISAGKKAKVALTACMRKLLTILNAIIRSGKPWINQYS

SEQ ID NO: 514506 - protein, 327 aa, unidentified
MVAMALDIGSRTHAVAATDSWVCPDGAVANQASALSALFARLAARDAQAWVVMEATGVYHWQAALLAHQAGLRVAVLNPKVTANFARALGRRSKTDRLDAQTLLLYAQRMSLVAWQPPRQAVIELRAISRYLQSVTEQLTAAKNRLHAELSLGEAPRFVLQALELEIEGLQQRIEQGVAEAQTRISADPELSAQYQALDSITGVAAHSAIALLGELAWLPQDMRGRACVAHAGLDVRQHQSGTSVAKPGRLTKHGNGHLRRALYMPALCAIRHDRHAKAFYERLVARGKKKMQALCAVMRKLLTAAWALMKSRSTYDSSLLFAQQEA

SEQ ID NO: 514507 - protein, 355 aa, unidentified
MSKLKYIGLDVHQASISIAVLDESGKLVMQSVVATRASAILEFLEGLPGTLHMTFEEGTYSAWLYDLLVQRVSQVVVCNPRKNALLKAGNKSDRIDALKLAELLRGGMLSPVYHGQNSTRTLQELARSYRTVTVDTTRVMSRLKAIYRSQAISYAGKKLYTQRHRGEWLKQLRQPGLLRRAERLYEELDLLQQLRRQAKQELMVESQKHPVCARLRTIPYLGPIRAAVLAARVQTPHRFRSKRQFWAYCGLGLETRSSADYQQIEGRLKRSRKKVLIRGLNVDHNHDLKNIFKGAAMSASIFSGPLQEFYQERLVAGIQPEMARLTLARKIAAIALTIWKKGESFDPSKLKAQAA

SEQ ID NO: 514508 - protein, 313 aa, unidentified
MAETVVTAGIDVSKEWLDCAVWPGKAELRVERNAVGFDQLAAWLVEHRVSRVGLEASGGYETVVMDALQARGFAVIRFNAKRIRMFAKAKGRLAKNDRADARVIAQATLVLDENTPPERRRDLDPLVEHLAYRRQLRDWLGDCANQLEHLRDASLRRQILVRQAGLNKALAALDAKLAKLVAAHKDWHALEQRLRKVPGVGPVLAQTLIALLPELGQVSRRAIASLVGVAPFDDDSGKRAGERHITGGRDAVREVLYMAAVAARRWNPVIAAFAKRLVGKKPKVIIVACMRKLLTILNAMVRDGQDWNPGAAA

SEQ ID NO: 514509 - protein, 352 aa, unidentified
MNATTVAVDLAKNVFELAVADEQWRVAERHRLTRTQFERWFNNREVKLVVMEACGSAHHWGRVLRARGIEVRLLPPQYVRAYVKRNKTDAADAAALLEAARAADIKPVAVKSVEQQALQALHRTRSGWMASRTGRINMLRGFCREFGLVVPEGAARGLAQVARFLADERSGLPGMLRGSMRLLLEEIRLMEARIQQLELDLVELAQQSPACQVLQSVPGIGLLTSTAMVAAVGDPRSFDSGRRYASFLGLTPREFSSGGHRYLGRISKRGDRYIRMLLTHGARSVLRAATVARRCGRQLDRLRNWALAVQARTNHNKATCALANKLARIAWAVWVKHEKYQTEPAFTAQPGA

SEQ ID NO: 514510 - protein, 346 aa, unidentified
MHYVGLDVHAKRSSLCILDSCGKVVKRLEVKGSWPKLLERVAAEVPRPFAVCFEASCGYGYLHEKLSALAERVAVAHPGQLRLIFRSKRKYDRVDAEKQAKLLYLDQVPQVHVPGVDVRAWRGLIELRRRLVGRRTAVKSQLRALLRGAGACDAPSGKALWSRKGLKWLGAAELCGADALRRDLLLEELGEAEARVGRVTKELDKRADAHPGVALLRTVPGVGPRTAEAFVAYVDDVRRFARTKQVGAYLGLVPCQDSSAGKDRLGHITGDGPATVRMLLCEAAWQAVRRSPSMKSFFERVSHGEPGRKKIALVAAAHKLARSMAAMLRSGEAWREQDPARGQDPA

SEQ ID NO: 514511 - protein, 328 aa, unidentified
MKTASLSNHNYGIGIDVGKEEMVSSCRSSHSGLRGFNQISFPNNSIGFKRFLDHIRKADLPLETPVLLESTGPYHWQIARFLTKQGFDAKVVNPLHTKQALRYSIRKRKTDKIDADHLAMLAYQNYGYGFKDTEELARLKALVRHYWYLKTTKTNNLRHENYLKRYRQIKKYGVSDIINKQIKKLEKEIIESFGKGNDSRYLDSIPGITPIIAATILAELYPLNRFSRVEQIIALSGLDPQVKQSGGKTARYGKLSKRGSVTLRRALFQAAFGTFSRYPFNRYYQSYKDRGLHHTEALNIIARKILKISWSLLRKREIFKVQYIKFNS

SEQ ID NO: 514512 - protein, 347 aa, unidentified
MLYVGLDLSRKRLDWHALLAGGERLGAGACPPDRDGLAHLVRRLAAEEGPVLAAIESMTGARFVHDRLELAGWDVRIADAQRVKGLAPLACKTDRIDAWVLAELARRDLVPEVWLPDPGVRAERERARFRLFLVRKRTALKNRVHAILFQHGLRAPVESLFGTGGRRFLTRCALPEPWRSTVAASVHLIDALEEQIDTIERELRRVGGEHRYLPLLLTCPGVGWVLGSTIAAEIGDIARFPMAAKLVGYTGLCPRVRQSGEVDRRGALSKHGPPYLRWALIEAAHNAIRSHPPYRARAEQTRARLGHKRGSAIAAITVARSLAEAIWWMLTRNQPFAPAGALAPLTA

SEQ ID NO: 514513 - protein, 349 aa, unidentified
MDILYTGIDMGNKNSWVFGFTEDGEIVLDSSRETLDEAGWQKQFEQLSKEYEIWVAYEMGSHYEWMQALLEAYCTKVVVVNAGAFAAISQSVKKTDREDAIKLAEGVRRGDLPDVFVPPPQSRKDRRLVSFVHWHSRREGNAKTRLRSLLSSYRLSCPCSDIGSGKARAWFEREAWPRMDDQGKCLSEMLLEELTLLGKQRAALDKEVENRLAHYGGDAEVLQSVPGFGPLTVLALISMIVDIRRFERAEKLSGYFGTCGRIYQSGQTLRLGSMTKRGNKTVRWLLSQAVHHLHRADPRARKRYLRLKRRKPTGVALGAQVNWLVRIVYYLLKDKTAYRINRRATKRAA

SEQ ID NO: 514514 - protein, 422 aa, unidentified
MSDQEAVAYSVYVGIDWADTKHDVCIQPATSDKRVFDVIRHCPEVIDAWVKDLHQQYGDHIAVALELSKGPIVSALQKYDFIDIYPINPGTLAKYREAFQPSKAKDDPTDAELALDLLLRHPEHFKALKPQSVEMRTLTTMVEQRRCLVNDQIRITNRLRCALKQYYPQVLEWFEHIDTPLFCAFVKRWPTLTQAKRARANTLRRFFHEHHMYREGVIENRRLAINSARPLTLDDAVIVPYRLQTLVLVEQLELMFRAIGQFDDEIEKLATRHPDYALFQSLPGAGPALAPRLLVAFGEQRERFKSAADLQKYSGIAPVTERSGKKHWVHWRLQCPTFMRQTFVEWASQTINKSYWAGAYYRQQRDKGSTYQAAVRSLAFKWIRILYRCWQSGVAYDESRYLKALERRGSPLLKRQNMLKTA

SEQ ID NO: 514515 - protein, 319 aa, unidentified
MTTSALVVGVDVAKDRLDVAVRPSGDAWSEANDEGGIGALVARLQPLGPALIVCEATGGFERAAIAALAAAGLPVVVANPRQVRDFARATGQLAKTDQLDAGILALFAERVRPTPRPLPDAAAQLLDAVLTRRRQLLEMLVAEKNRLGFAPKPLHRGIQAHIRWLERQLDDVTKELAELIEASPVWRAKDDLLQSVPGVGPIVSSTLLGELPELGTLSHKQIAALVGVAPLARDSGTLRGKRMVWGGRASVRTALFMAAMCGRRWNPTLKVFYDRLKAAGKPTKVALIACARKLLTILNAMVRQNTYWRGSSLKLQYSC

SEQ ID NO: 514516 - protein, 340 aa, unidentified
MNHLGIDVGKRKCRAAIKDDKGKILDEFFFGNDANGIENLLSRIQANKTSHTITTTQAVLESTGNMWMRIHDTLEENGIDTVLANPYKTKIIAEAKIKSDKLDARILSDLLRTNLIYESYVPKQEDRDKRSLVRHRITLSRTKTKLVNKVHSILDKYDFKTDLTDIFGVSGIEWLKSLFSIVTPVDRIILDSSLAAIETINQQIDSVSKEILKYACKNDKDVRILLSITGIDIFSAMLISSEIVDVKRFSTPWKLVSYAGLAPSIRESAGKTMTGRITKQGSPWLRWILVQCALTAIKYDTHLRTFYERIRNRKGHAKAIVATAKELLVIIWYMLTRNEP

SEQ ID NO: 514517 - protein, 482 aa, unidentified
MKKKNIFVNQSQELLHLFEEAGNGAKVMCVPIDYAKKDHVVMFCNGHGEILRKPFSIKNSPEGIEYLTKQVTRSCDHRGIDLKHVFFGGEDVGSYAENFVNTLKSGGWIVAGVNAHDAKKQRANIQASTDRLDLMGIASMLLNRRANCSPAQSGIYRNLRTVVRHRKNLVSMSTQEKNRIHTVVDRLFPGFLDEKKSGIPSFSKSSLYLMEDRFSPLQIRRRKRQTLIETLCKYGINKPESAAAKLQEYATGVLNTPVEYITTLQLSLAQQVKHFVCLQDSISQLENEIAVWLAQTQGAFLTTVRGIGIVLAAGVTAEIGNPFEQKPVNNLVSYSGIVPRVTQSGGPEGKIRTGKVAKRSNRILKDYVVQSANHMGLHGPEDLKTDHRRREAGGQHADFGMGRRVIRMSMCLMKTSQVYMPPRLRNAKTKPEERAGYYLMTWPRLREKWNKVGALKIAFEKDRPLGQWRNMVQELYNIKLKL

SEQ ID NO: 514518 - protein, 344 aa, unidentified
MQISTIGLDLAKRVFQVHAVDEAGVVMMRRKLRRAQVLPFFAGLERCLVGLEACGGAHYWARELMALGHDVRLLPPAYVKPYVRRQKNDAADAAAICEAVTRPSMRFVPVKTRQAQGVLALHRTRALLVRQRTMLVNALRAHLSEFGHVAPQGRVGLSALVGLLKQPAEAIGIPAVAASALASLAQQIERLREEIGGLERVIRAEHANDAASRRLATIPGIGPLIASAIVATVSDPSVFRSGREFAAWLGLTPRQNSSGGKECLGPISKKGDRYLRSLLVVGATGLLRRRDALSARHRAWLEKLLNKKPARLVSVALANKIARIAWAILLKGTTYRGGPLEASV

SEQ ID NO: 514519 - protein, 430 aa, unidentified
MAKTKIKAQPVVQTDDDTLYYERCAGIDVHKNVLVVCMRNKRQSETREFGTTTAEIRELVAWLKSKDCSMVAMESTGSYWKPLYNILEQESLPAMVVNAYHIKTVPGRKTDWNDAFWIAKCLSQGLLKPSFVPERAQRELRDMTRLRKSQIEERARYINRLQKFLEGANVKLGSWVSDIEGKSATELLELVIGKPDFTVDDVKSRMHGKMKATPEEIFASLEGYITPTQRQFFSHVMNIIRTLTELIERTDEMIKSILSEEQKAAVEALDEIAGIGVISAEQIVAETGIDMSHFRNQHAFSNWIGVAPGNNESAGKRKCSKTTHGNKTLKTTLVQCAKSAVKNKKTYFSAQYNRLVSHRGKNRATMAVAHSMAIAIFFVLQGYEFKDLGADYYNQFNREKKINSHFKHLSKLGVTIPDDVLRAIIAESPA

SEQ ID NO: 514520 - protein, 412 aa, unidentified
MQARGAESAYLVGINLTTSALETLMEARTVNNLPPAAPHDDAVRCLLAIELSKKSWIVAVNTPLSDKISRYTLEACDWKGLLDLCERIRTRVAKEMKKPVEIISCYEAGYDGFWLHRVLEAHGIRNYVIDPASLQVDRRARRAKTDGVDVERMLRSLLAYLRGEPKVWSVVRVPSVAEEDDRRLHRERDRLINERVQHVNRIKGLLAIHGIYDYQPLRGDRVQRLEQLHAADGQTLPPRLKAEILRELQRLELAIRMIKAIEAERDAIASAKTGHTSAKKIQHLTKIKSIGPEFATALVGEVFYRSFDNRKQLASYVGLTPAHFQSGAMSHDQGISKAGNAKARTVMIELAWLWLRHQPDSPLSVWFRERVGKLKGRIRRITIVAVARKLLIALWRYLENGMVPEGATLKVK

SEQ ID NO: 514521 - protein, 391 aa, unidentified
MAMYFVGIDISKYKHDCCIISAVDQKIVSKLTVKNDKAGFEQLLTVFNSLSNPEDIKIGFESTAHYALNLELFLENAHHSFMEINPLLIKEYKKSTSLRRTKTDSVDCESIARWLMTVEYKPHSKGFYHSYSLKSLTRLRDRLIRQRSFYLVKITNVLDHTFPEFKPFFHERLSKTALYLLENYGSAEKMAKMNSASYEKLRSLSRGKFSPQQFIRLKELAANTVGVNNSIFDVELNSLLTLYKSLIKEIDTLEKEINRLIEEVHPHYMSVPGIGPISAAVIYSEYGDISNFSTPAQMLAFAGIEPGINDSGTESHGGRMVKHGSSQLRYVLINCCLPLIRFDMTFAAYYAKKRGEGKPHRVAVTHVAKKLVRVIYALERQGVDFNALKLR

SEQ ID NO: 514522 - protein, 406 aa, unidentified
MLNAVGIDVSKGRSTVAVLQPGGVIVHKPFDVPHKSRNLHDLVQYLDSLEGDTRVVMESTGRYHEPIRNVLSKAGLFVCTVNPHLIKNYGNNTIRKVKTDSADAKKIARYALDNWAELREYTSMDTTRTQLKTLNSQFSFFMKQKTAAKTNLIALLDTTYPGVNKLFDSPVRADGSEKWVDFAYSFWHVDCVRNAGIKAFTDRYKRFCKHHGYEFQEAKANAIYKDSRELIATLPKEAVYKELIQESIRQLNLLSENVEHIRKTMNELASTLPEYNTVMHMYGVGPTFGPQLMAEIGDISKFQHREALTAYAGVDPGKNDSGQEVHNSSHASKCGPSRLRHTLFQIMTTMLQNGVKEDDAVSSFLFKKKAENKPYLVYMTAGANKFLRVYYGKVKECLRDQEQAEQ

SEQ ID NO: 514523 - protein, 411 aa, unidentified
MVKENFIYVGIDLHKETHTAVMIDCYNQKLGEITFPNRPADFPKLVTKVKKCNTDAKEVVYGLENAYGYGRPLAVWLIDKGYFVKDVNTAISHRQAKHRGAMYRKSDSDDAEAIALATLNMLDKLPDAYPNDAYWSLGQLVHRRDNIMKQRTRLVNQLHEQLCIAYPSYKQFFNDISRPTALYFWEHYPSRKYLKGKSVEDLRAELVPVSHNKCSTKTCEKILDAVASDKVKNNAYQDARDMVTLSIVSDLQHYDSQLTEVDKMLEQMYKMLGCTLTTIPGVNVITAVKILAEIGDIKRFSNANKLAQFAGIAPLHLSSSGKGKDVATKQGNRRLQATIYFLAIQMVQVSSKGTPRNSVVRAYYEKRKAEGKTSQQALICISRRLISIIYGMLKHGTEYRMPVVESAGENR

SEQ ID NO: 514524 - protein, 317 aa, unidentified
MTATAIFVGIDIAKADFVVACCPDGTSWTATNDLEGMTVTVARLRALAPALIVLEATGGDETALVAAVAAASLPVVVANPRQVRDFAKATGQLAKTDRLDAQLLALFAERVHPTPRPLPDAVLQQLDALMTRRRQLLDMVTAERNRLEHAAAPIRREITRHVRWLERRIGATDRDLDDTIQKSPVWRAKENLLRTVPGIGPVVSRTLLADLPELGRLNRKQIAALVGVAPLARDSGTFRGTRRVWGGRAPVRAVLYMGALVAARRNVVIRAFYLRLIAAGKPKKVARVACMRKLLTILNAMTRTHTTWQQVRQVKTA

SEQ ID NO: 514525 - protein, 430 aa, unidentified
MEEVTDEPLYRDRVCGIDIGKAGMAVTIRVPSDRNPARRASETRMFPTTRRGVLELADWLRCWQVPAVVMEATSDYWKPVFFRLEAEGFECVLADARQVKNLPGRPKRDTTDSQWLACCFERGSVFPCFVATPEFRIIRLHTRRRRDLTGERTREKQRAEKLLEDAAIKVSSVLTDLHGVTGRDIMECLIAGERDPKALAECARTRARRKIPQLREALEGAEFFTAHHARLLKSILNRIDAITAEIGELSAVIEELLAPFEEQLQQAESMPGWGRRAAQDVIAETGTDMSRFPTGGHLASWCGRSPLDKQSGARQGQRRHKRGNKFITAVLGETAVAAGKTQTREGARHRKISRKRGKAKACVATGNTQMKVFHALLSRPGARYHDLGPDYYQRQRDHNRRLSRLVGELGELGYEVTLCRKPRPEDASAA

SEQ ID NO: 514526 - protein, 355 aa, unidentified
MDSTKYIGMDVHKETVSIAVMNSAGKLVVESILETKAATILQFIQGLRGNLHVTFEEGTWAAWLYDLLKPHVTKIVVCNPRRNALLKEGNKSDKVDARKLAELLRAGILRPVYHGESGLRTLKELSRSYLTISKDLTRVMNRLKALYRGWGISCEGATVYAPHHRSEWLGKITEAGVRRRAEFFYQQLDALQALRQQVRRDLLAESRNHSARKLLRQIPSIGPIRAALLMALIQTPHRFRTKRQLWAYSGLAIETHDSAQYRYVAGQLQRSKKPQQLRGLNRNHNHDLKAIFKGAATKASSGAGPLHDFYEALLTKGMRPSMARLTLARKIAAITLVVWKKGAHFDAEQLKPQAA

SEQ ID NO: 514527 - protein, 386 aa, unidentified
MKYNTQNAKIKSITEKTLIVGIDVGSETHFARAFDWRNYEYSKKPLEFSNTESGFATFKAWMEDIAEKYGKDVVIPGMEPTSHYWFNLGAYLQDNGMKPVHVNPHHVKKSKELDDNNPNKNDRKDPKTIAALVNEGRFSYPYIPTGIYAEIRSLSNLRLQTQEEITQIKNRIARWFSIYFPEIKDVYKKPDSVSGLMVLKVAPLPQDIVKLGVDGINQIWRDAKLRAAGAKRAKTLITAAEHSIGSQEAPDSARIELKNLLNDYEVYCKREEELMGMIEEKLAGYAIVECSSGKHKGESHISYRGRKRLRYVLYEATISLIARNEEFKEIHRYYRTRKENPLKKIQSVIAVACKALRIFYTILAKGVTYDGVKMLQDIKRPQVTAA

SEQ ID NO: 514528 - protein, 422 aa, unidentified
MFKIVKFNCCGLDVHKTWIYACIGITDSNLRTEYYEDRFSSFPKDLRRLAAWLHEHGCAEVCMESSGKYWIPVFNALEVSCKVTLAHPKYTKPQKGNKTDRKDARWICDLFMCGMIKPSFIPPPAIRHLRELIRYRMKLTNMLTGEKNRAHNCLTVSGLKLDDAFADIFGKSARSITEYILAHPGEHFDVTPFVDKRCKTPIDVIQDAVDGAISPEQAVKLRECMKHIDELIAHKKRIEKEIIELAEPFSSQLALIRTVPGLDKDPMTAITILSEIGNDMSVFPTAKNLVSWAGCCPRNDKSAKHVKSTRIAAAGSYLKPLLVQVANALIKSKKHPEFAERYRRIKSHRGHKKAMIALCKMLLTAIWNILSTGEVYNPAGYILQTPRPQDEKKVLTQKQALELLRLRGFTIVEAAPSQAAPA

SEQ ID NO: 514529 - protein, 378 aa, unidentified
MIVIGADTHKYTHALAVVDAGTGRERGARQVKAEEQGYLAAVRWGRGLDDERVWAIEDCRHVSRGFEQALIAAGERVVRVAPHRMGASRRGEREPGKSDQIDALAIARAVVKDGVERFPAAYLDRAAIEIRLLPDHRKDLVAERTRVQNRLRWHLLELCPELERSLGRGSLAHPRQLARVDRRLRRLPARARVRIAREQVAQLRDLTRRVDALERELLVLITAHRPQLLAETGCGALTAALLIGRTAGAERFPSDASFARQTGTAPIPCSSGQRHRHRLDRGGDRQLNHALHIIAITRARHDPATKAYLARKEAEGKGKKGALRCLKRHLARRFHYLLSLPAETPQRDPSNGAVHNAAPRPGDTRIVAAAPALMPCVR

SEQ ID NO: 514530 - protein, 334 aa, unidentified
MENIALIGIDLGKNSFHIHCQDRRGKAVYRKKFTRPKLIEFLATCPATTIAMEACGGSHFMARKLEELGHSPKLISPQFVRPFVKSNKNDFVDAEAICEAASRPSMRFVQPRTESQQAMRALHRVRESLVQDKVKTTNQMHAFLLEFGISVPRGAAVISRLSTILEDNSLPLYLSQLLLKLQQHYHYLVEQIKDLESQLKRKLDEDEVGQRLLSIPCVGTLTASTISTEIGDGKQYASSRDFAAATGLVPRQYSTGGRTTLLGISKRGNKKIRTLLVQCARVFIQKLEHQSGKLAYWVRDLLCRKSNFVVTCALANKLARIAWALTARQQTYVA

SEQ ID NO: 514531 - protein, 427 aa, unidentified
MPEKPVAGIDVSKDFSDMCIIKPDNKVFQTVHIFHDATSLRRSLAALEAAAREFREKPVIVMESTAHYHRVIAQFLQSAGYEVMVINPMQSGALKNINIRKVKSDKSDAHRLALLYRLKTLHTTNQPNELLSNIRDYCRQRADIMNSHTAYVNRLTSLLDQAFPGYARVFSRVACKSSLGILKTYPSPAAILASDPEQLAETISKYARRGVTTDYVIKKVAALRRVAENAEEINLKREAYSVLIVTVAELLEGLQRHIETLKKRIIELATEDPSVKFEVSLLQTIPGIGLYSAVLLRAEIGDFSLFQKPKQLVASFGMDPSTRQSGKFVGTKTKISKRGSPYARAILDICAQSAVHPVKGKEPANPVLANYYAEKVKTKEPKVVKCIIVRKLVNIIFAVLRDKKPFELRTPEEHIELLKHPNISRAA

SEQ ID NO: 514532 - protein, 341 aa, unidentified
MQISTIGLDIAKNVFQVHGIDATEKVLVRKQLRRGQVIGFFETLSPCLVGMEACATAHHWARELTKLGHEVRLMPAKDVKAYVKRNKNDAADAEAICEAVRRPTMRFVRVKSAEQQGRLMQHRTRDLLLRQRTQVINALRAHLAELGITAAQGREGIKELLATIADDRDERLPIDARASLTVLAGQLQALQTLIGSIEKRIIRQHRASEESKRLKTIPGIGVIGATTIAAIVTDPKAFRSGRDFAAWIGLVPRQDSTGGKQRLGPISKQGDRYLRRILVVGAHSVLRRAKHSPEKYPWLTQLLARRPFKVVAVALANKMARIAWALLAKGGTYRAPHLAAA

SEQ ID NO: 514533 - protein, 356 aa, unidentified
MSNHRRAVAVGSSAAMVFCGVDVSAATLCVVAQREGEWKAEPRQFPNSGAGHRQLMGWLRKSGGAVRVTLEATGVYGLDLALVLDEAEGFAVEVLNPKKASDFARSLGRSKTDKTDAAALAEYSRRMPFVAWRRPERPVLELRALGRHMISLSEEHARLLNRLHAAQASRTAPLCVRQDLKRAMAGIQKRLLRLRREARARICRQHDLERKWLRLIAIPGIGETSAVQILSELAALDERMTVRQWVAHSGLDPAHEISGTSVRKASRISRQGNRYLRKALFMPALTAARFDPHMKAFYQQLLARRKAKLQALTAVARKMLHAIYGIFKTDTPYDGAKLFPTLAASIVPQPQTIPTY

SEQ ID NO: 514534 - protein, 411 aa, unidentified
MELLVARCAGLDVAKDEVVACVRVPDGHGGRNQEVRTFQTFTSGLEALADWLAGEGVTRVVMEATGQYWKPIWYLLEEAGFELLLVNARHVKILPGRKTDVCDAAWLAELLEHGLLRGSFVPPAPIRELRDLTRYRKRLIQAHASEGQRVQKTLEDAGIKLDSVAADVLGVSGRAMLGALVAGERDPQVLAELAKGRLRAKLPQLRQALRGRFGDHHALLVRLALAHLEHLEGAIATLDTEVDRVIAPFARARDQLATITGVGKRAAETIIAEIGVDMTVFPTAGHLASWAGRCPGNNLTGGKRRSGKPTKGNRWLGEVLIECAWAAARSRDTYLSAQYWRLARRIGKKKAAVAVGHSILVIAWHLLTSDCDYADLGGDYFVRRDTDRQRQRAVAQLQALGYRVTLEPLAA

SEQ ID NO: 514535 - protein, 339 aa, unidentified
MQNITTIGLDLAKSVFQVHGIDHEGQAVLRKKLRRGHVLKFFGTLPPCLVGMEACGSAHYWARELSAQGHQVRLIPPQYVRPFVKTNKHDAADAEAIAEALVRPTMRFAPIKSADQQAVLMLHRSRELLVKQRTMLINAIRGHCSELGMTASQGASRVNDLLVIIENPDDPRLPTFAREALSVLMAQLHAVKEAIRTLESKLQAWHRSQEVSQRLTTIPGVGVITATALVATIGDGSQFKSGRHLSAWLGLVPRQHSSGGKSRLGRISKRGDGYIRRLLVHGSRTVLRWQRAAPQKSVPWIGELLTRRPTNVVLVAMANKTARTVWAMMRDQQTFKAVA

SEQ ID NO: 514536 - protein, 409 aa, unidentified
MRYYVGVDWADREHAVWVEDEQGAKVEARTVPHTAGGFSEWGRWLDERRAQGIELWAAIEKPEGRVVDFLLDHGVVVYPLNPKALDRARDRFRASGAKSDPFDAQVAAAFLRTDHGHLHSLQPSSEAAQELKLLTRDCQRQIRQQTRLVNQLTATLKEYYPRPLEVFEDLTTPLARDFLRAYPTPDALRACPQRQWQRLAHAHHLSAERTAELWAELQQPQLPVPPHVVRAKARLLQTLVAELEPVLEAVATYRRAVEDFFAALPAAEWVRSLPAGKTGVTLPTLWAELGDAAGRWHSPQHLQAQAGTVPVTERSGRVHVAKFRFACNKSLRHAVDQMAFLSLRQSEWAQAYYRAYRARGHEHHEALRALGAKWLKIIFVMWTHQVPYDEKHHLATMARQHLRQVPQPA

SEQ ID NO: 514537 - protein, 406 aa, unidentified
MNAVGIDVSKGKSTVAILRPGGEVVASPFEVSHNPRKLNELVTLIKSLNGDSKILMEYTGNYYLPVALFLQKSGLFVSVVNPILVKDYNNKSLSVRKGKTDKKDSLKLAAFALDRWHELPLFSPQSDSRTLLKAFNRQYNQYIKLKVMLKNNLFSILDQTFPGANTLFTTPARKADGHEKWIDFVLKFPHCECVSKKSFSAFSKSYLSWCRKFGYLFSEAKAKEIYAFACNCTPSLADSEAVRALVSIAVSQLNTLNETLASLQKEMDLLACSLPEYDTVLSLYGVGSVLGAQLIAEIGDVSRFSDKKALVGFAGIDAPPFQSGNFNPQSRNISKRGSAALRKTLFQVMSVILQKAPANDPVFLFMDKKRSEGKHFYVYMMAGANKFLRIYYARVMEHLNSLQEAA

SEQ ID NO: 514538 - protein, 456 aa, unidentified
MKIPQSTIRLLTGRLVKILLNREVSTMKSNTQNKKIEAITEKTLVIGIDVGSETHYARAFDYRGIEYSKKPFKFSNTEAGFVTFKEWILDLKEKHEKDKVVPGMEPTGHYWFNLGKYLQDNEMKPVLVNPHHVKKSKELDDNNPTKNDRKDPKVIAGLVREGRYMIPYLPDGVYADLRTASNIRFQLQSELTRIQNRISRWFNIYFPEYKTVYGKPDAKSGMLILKEAPLPEDILTLGIDGVDQIWRDAKMRAVGKARAKTLIEAAEHSVGRKEGAVSARMEIRMLLEDYESRNMRLQEVMVLIEELVKQIPMAEKLLEIKGVGIKTVSGFLAEVGDISRFNSPKELQKLAGLALVENSSGKHKGETTISRRGRKRLRYLLFEVAMSLVAKNPEFRELHNYYTTRRLNPLKKMQSLMAIAAKLIRVFFAMLTKGVDYDPKKMVSDIKRPAVYLQAA

SEQ ID NO: 514539 - protein, 382 aa, unidentified
MDLIHSCCAGLDVHKKTVVACIRRTGPDGRVDRQVRTFGTMTADLLALADWLAAADVRQVAMESTGVYWKPVFHLLEDRFEVVLVNAHHIKQVPGRKTDVKDAQWIAQLLQYGLLRPSFIPPPPIRELRDLTRQRAQRVRDRAAVANRVQKVLEDANIKLASVASDPLGVSGRAMIRAMIAGEQDADKLAELARRRLRGKIPELKRALQGRVTAHHRFLLRMLLGQIEALEGLIAQFDDRIGVVMAPFVEVARRLEAIPGVGPQAAEVIVAEIGTDMTKFPTAGHLASWAGLCPGNDESAGKRRSGKTTKGSQWLRAVLVQVAWSASHTRETIFSAAYRKWAKRMGKKKALVALGHKILVVIYQLLKDQTQYQERAKPAQAA

SEQ ID NO: 514540 - protein, 355 aa, unidentified
MNDEKYIGLDVHQATIVVAVIDSTGKLVMESILETEAATILQFFAGLRGTLSVTFEEGTWSVWLYDLLNPHVDKLVVCNPRKNALLKDGNKSDRIDARKLAELLRGNQLKPVYHGETGVRMLRELSRSYLTIVKDLSRVMNRLKAVYRSWAIPCAGRDVYYRRHRAQWLAKIREAGVRRRAERLYEQLDMLQHLRQQARRELLAESRKHAITAKLRQIPYLGPIRSALAVALIQTPHRFRSKRQLWAYSGLALETRISAEYRLVEGQVRRSKKLLSIRGLNKDHNHDLKGLFKGAATMASVRPGPFQDFYQAALAKGIKPTMARLTLARKIAAITLTLWKKGENFDAEKLKSQAA

SEQ ID NO: 514541 - protein, 433 aa, unidentified
MKVKYEDRLKQKLLAITTDTLVVGVDIAKNYQWARFVDFRGIEHDRALKFKNRKGGFETILARIREICKKENFARVVVGMEPTGHYWKAFANWLEKQEGITVVLVNPYATKQAKELDDNSQTKSDRKDALTIAKLVKDGRYFELYLPHDVYAQLRGLSTARTGLNRRKNALKNTITAVMDEYFPEYEEVFKCPLSGKASRHILKTCPFPKFILELGENGVTDEIKKAVKKTVGRKKAGQLVKAAKESVGVDYGEEAARLKLRLMLEELELLEKQTEELEGQMADTLHQTEYAGFLLSIKGVGVVTLAACLGELGDPERFEDSRQMSRMAGYNLVEDSSGKNRSGTKISKRGRKNLRSVLYQMALVMVATNDEMKQLYHYLKTREKAPLKKMQALIVISKKILTLIHTLAKKKENYDPGKVFGHVRREQLKAAA

SEQ ID NO: 514542 - protein, 416 aa, unidentified
MALKIVYPICCGVDVHKSFIVACIASTNDNGVTSYKRRRFSTFTGDLRRFADWLASNNCKDVCMESTGKYWIPVFNILEQTCNVVLAHPKYVKAIRGKKTDKRDAQWIADIFKHDLVSGSFIPPFEIRQLRDLMRYRSKLTSFCVGEKNRAQNCLTVSNIKLDDVFSDVFGKSASAITEQLLSCPDGSFDVSPFIDRRCKASPDKVQAAIDGLMCSEQVQKLKIIRSHMDSLALCKANLESSILELSKQFSSQIDLVMTVPAIQLFSAIAIISEIGVDMSVFPTAKHLCSWAGLVPQNNESAGKKKTTRITRAGAYIKPLLVQNALAVCKSDKHPEIKRRYLALKKRRGHKKAIIAICRMLLTAIYAMLKKSEPYNPDLYRKEDDVPASRTFSVDQAISFVQRNGYIVVDSDGVVA

SEQ ID NO: 514543 - protein, 376 aa, unidentified
MKKIVICGADVHDNSITSRIAVNKDAPETRVFRYTTQGRNSLFKYLKFVARRHGTERIVMAYEASSLGYGLCDEARDTGIECYVLAPSKMPQSEDQRKRKTDERDAQKIVEQLRGHVLAGNELAKVWIPDLQTRDDREVVRMRLEVANKLSAARAQVRTLLKRNKMEKPKEVGKAWTVSDRQWLQRLMEQGHELALGGRVALASLLRQIAAFEAEIKELDKAVEALAATDRYRTAVEALDTQLAGVASLTAMVFLTEMGDLRRFKNRKKVGAYLGLVPSSHESGESNDRKGHITRQGPARLRKVLCQAAWVRIAHDKEEHKVHARIVAKNPKKKKIATVACMRRLGTHMWHLALETQLQAGVYLDKKLPQTQLRAG

SEQ ID NO: 514544 - protein, 470 aa, unidentified
MTPRYQKKGRQPSTRARLRVTHPHAAGIDVHATVHWVAVPAQDAPAPAPDHPPNLPPHVRSFGACTADLIALADWLTICRIRTVVMESTGIYWIPLFELLESRGFEVLLVEPRQSRHAPGRPKSDVLDCQWLQRLHSYGLLSGSFRPAEQIVVLRSYLRQRQMLIRHAGQHVQHMQKAMEQMNVKLTEVVSDVSGVTGMAIIRAILKGERNPLELAKLRNDKCKRTQAEIARALYGNWRAEHLFALQQAVTLYDCYREQLRVCDEQMQKYLATFADRSQGRPRPRRHGRARRERRRNDPAFDVAGVLFRMSGVDLTVLEGIDPNTALVLMSEIGPDVSRFPTVKHFCSWLGLSPQHQLSAGKIRKRRVQRGASRAGRALRMAAQASHHAQNVLGAFYRRIQARAGAPKAIVATAHKLAERVYRLLKHGSEYVCQDLEAYEAAYRQRVVKGLARKAATLGYRLEPTTATGT

SEQ ID NO: 514545 - protein, 402 aa, unidentified
MNAVGIDVSKGKSMVAIMRPFGEIVSAPFEIKHTAGDIHSLVELINSVEGESRIVMEHTGRYYEVLAHQLSEANLFVSAINPKLIKDFDNDSLRKVKSDKADAVKIARYALDKWQNLKQYNVMDELRNQLKTMNRQFGFYMKHKTAMKNNLIGILDQTYPGVNTYFDSPARSDGSQKWVDFASTYWHVDCVRKMSINAFIDHYENWCKRKKYNFSKSKAEEIYGKAKELVPVLPKDDITKLIIKQAVDQLNSASITVESLRTLMNETASKLPEYPVVMAMKGVGTSLGPQLMAEIGDVSRFTHKGAITAFAGVDPGVNESGSYEQKSVPTSKRGSSDLRKTLFQVMDVLIKTHPQDDPVYQFLDKKRAQKKPYYVYMTAGANKFLRIYYGRVKEYLASLPES

SEQ ID NO: 514546 - protein, 400 aa, unidentified
MERVERAWAGIDAGKGHHHVVVTDGEGRRMLSRRVANDEPDLETLIAAIVDCATEMNWTIDLADGPAALVLALLLGRGQRVWYLPGVAVNRASDGYRGEGKTDAKDAAVIADQGHMRRDLRELRLDDPLIAELRMLTGHRADIAADRTRAINRLRIQLLGVSPALERALDFTNRGPLVLISHFQTPRQLAAAGQSEVYRCLRNQKVRHADRLAATAIRAAATQHTSVVSEATAAELIARLARAVLDLDRQLAELDKQIFLRFEAHRHANVIASMVGIGALLGAEFLAATGGSLDGFASADHLAGYAGLAPAPRDSGRRSGNLHRPKRYNRQLQRVFYTSALISIQTSTASRAFYDRKRAEGKRHSQAVLALARRRVNVLWAMIRDHSLYDDRRSPSTLAA

SEQ ID NO: 514547 - protein, 399 aa, unidentified
MFYRPPLDIRVSVDVGCKFHQVAVGLSTGEVLDEFSISHQPDGFRTFFAKLEQLEQQYQCPVRVAMEGYNGYARPLDSMVLARGWQLNNINNLKLARFKEIFPGAAKTDVIDARRGLELFQLMDHLPTAKDVLQVVAEPPRENQMLKRLSRRRRRLVNERVRVVNNLQADLQAVCPSLLALTGDAGNIWFLQLLTHTDDLRKLSRLHLKTLRKIPGIGAAYASRVQQWQKQAQFSAEAEWVGEMIQQDAARILELHSQIKALEAKMAAAATQSNIAGLLATLPGFGPICTAELAGEIGHEARFFKEASLALYLGMATLDNSSGQYRGSKIPRQVNSRAKAAMMIAVDRHRKQVPASQRYYEKKRAEGKGHNQAVRALGRHLCRIIFKMLKERRAYMPPN

SEQ ID NO: 514548 - protein, 330 aa, unidentified
MTTNPPQIVFNHIVAFEVSKETLVVHTLPADEQCTIDNKPQAVRRLIKAEIKRNRNKQLGQMLVICEATGGYERHVLDVALEMGVSVHRAHGTRVRHFGHYRGLLAKTDPIDARLIAQYGLKTENIRLYSPPPPDTAALRALHARRTEIQQMIIAETSRLDHAQHKSVLKSLKAHIASLKAALAAIEADIAQLVEGSEMLRKKVALMQTVIGIGPISAMVVLAYLPDIGQLTKGQAARLAGLAPINNDSGKKRGARHVEAGRTAIRRALYMAAGVAMRANPILKAFSDRLRGKGYPFKYVVTAVMRKLIVILNAVLRDGQSWKGAQIAAA

SEQ ID NO: 514549 - protein, 356 aa, unidentified
MLNKFNKIPDYSGHNIYVGLEVHKTSWSVNIMADEIEHRQFTQPPSPLILYKYLSENFPGANYFSAYECGFSGYHHHRELLNLGIQNIVFNPADLPVTNKEKVNKRDPVDSRRISRALQRNQLKGVYVFNPDHEQFRSLFRMRWKAAMENRRVKNRIRSFLQYYGIIPPASLKPDFWSAAFLDWLKQLSLPEKSGTLALEYLLIAYENTRAQLLQVTRHLRHQVKLRYQSIYLRLLTIPGIGPINAMCLIAEIGDIFRFRSCRHLASFVGLIPRSHQSGNKDPQGSLTYRSNKYIRAALIESSWTALRFDPALLKYYKDRVVKHKSQVVISKIAHKLLNRIRFVWMTDCNYQVGIS

SEQ ID NO: 514550 - protein, 344 aa, unidentified
MANLNQFCDFTKLIGIDIAKSVFQIYSCDTQTGEITNVQIKRDKVLESLANCGKCLIGMEACGSSQYWARKLQALGHTVRLMDPKLVKPFVRHNKSDKADAEGVYHALVSGVRAVAVKTETERDIQTLLTMRALLVKQRTARINHVRGLLAEYGHVMQKSVDQFDKKVDECINSLEGDAVQLVIDTLRDTVKSIRDDQDRIKTLQREISRLASQTKNAKHFLTVPGVGDTIMAYMCVLLADPTQFSSGRQFAAYLGLVPMHTGSGGKTVTTKIPGRCDKALRALLVQGAHAVARSKYRTDWVKNILAKKPKKVAMVAIANRMARQCWAVASKGQDWRRMPVTAT

SEQ ID NO: 514551 - protein, 430 aa, unidentified
MAYRITGIDVHKKMLAVVVSDVEIEGEFQFERRKFGSNPEQLRSLAKWLLEQEVEEVVMESTAQYWRPVWEALERYWKPIREKREGARRRSGTLHLAQALSNRGRRGRKRDFPDAERLVKRLVARELTLSFVPDAEQRLWRTVTRKKYQLTRDKVRLQNQLEALLEEAHIKLSSLVSDLLGASARRMLQALAEGETNPAALATLADQHLRATPEQLCDALGACTELKPVYRRLLKMALEQLQFLEQQMGQLDKEMANLLSQHQDAVQRLAEVPGLGVDSAHQIIAEVGPTAATFPSEGCLSSWVGACPGQEESAGVNYSHRSPKGNRHMRRLLSQTANAAVKAKGSIFELVYRRSVPRLGHNRAIGAIAHRLCRLTWLILHQGVRYEERGPAVSKKSKQARTARMIRQLRRLGYRIEAPNAQHPSSAQVQ

SEQ ID NO: 514552 - protein, 405 aa, unidentified
MGKVFVGHDWAEDHHDVFVMDSDGRQLAKARLAEGMEGVAGFHEMVSHLVEEPAEVVVATETDRGLFVGALVAAGYQVIAVNPMSTSRYRERHSTSGAKSDPGDARTLAELARTDAHNHRPVAGDTELAEAIKVLARAHQSLIWTRTRQANQLRSTLREFYPAALEALGELTGADALAVLEVAPTPDLGRKMSISKISSALRRGGRARRIEEKAAEIQAGLRSDQLEAPPLVSEAMGATVSALVGVISELNRQIAGLEAQLVSGFEAHPDAKVIRSLPGLGMILGARVLGEFGDDPNRYANAKCRRNYAGTSPITKASGKHLVVLARYARNRRLADACHRWAFSSLSASPGARAFYDARRVAGDTHHRALRALANRLVGILHGCLRNGTLYDEHLAWGHRSTAAA

SEQ ID NO: 514553 - protein, 350 aa, unidentified
MVVVGADVHKRTHTFVAVDEVGRKLVEKIVVATSAGHAEAVMWARERFGAEVLWAIEDCRHLSARLERDVLAAGQKVVRVPPKLMAQTRASARTRGKSDPIDALAVARAALREPDLPVASHDEVSRELKLLVDRREDLVAQRTSTVNRLLWRVHELDPERAPKSRSLGLAKHRRLLGEWLATQPGLVAELARDELADITRLTVVINALAKRIGERIRNVAPALLATPGCGELTAAKLVGEAARVTRFKSEAAFARHAGVAPIPVWSGNTAGRVRMTRSGNRQLNAALHRIAVTQIRLDGLGRSYYRKRLAAGDSTTEALRCLKRRLARVVFNHLHTDHQNRLKPCQPAAA

SEQ ID NO: 514554 - protein, 445 aa, unidentified
MKSHPDIFFLEAAPMKSKPVPVAGVDVSKEFSDMCILTPDNAVFERVKIYHDKASMTQSVKALARAGAAFGQRPVVVMESTSHYHRTLQQFLTRHKYQVITINPLQSSAFKNVTVRKIKSDPTDAYRLALAYRTQALRPNLVPSDKIENLRLLTRQHFDLKRDITSYVQRLQCVLDQVFPGFRKQFERLHCETSLIILEQYPTPEALKRARTSSIAKIFQCAARRSPEYCRKRAEALKAEALKALEIRVSRESADLLIKAYVSVLRALEQTIRQVDDEIHRVIQSDPKLLADVELLCSIPGVAEFGAAVIIAEIGDFSNFRKAKQLVAFFGLEPSVHQSGKYVGKNNQLSKRGSRFMRKMLHLIVQTNIAHLPGKPDVYRNPVISDYYKKKCESKAKLAACCAVMHKLVNIIFAVLRDRKPYEIRTPEEHIKLMQARCVAAVTAA

SEQ ID NO: 514555 - protein, 390 aa, unidentified
MVYVGIDVAKDTHECLIVNGDGVIVSQPFAIANNHVGFEHLFSKMESCHNDLSDIKVGLEATGHYSDNLLAFLVSKGLTTIVINPLHTNLYRKSLSLRKTKTDRIDAHSIVTLLRTETLKPYSPMSSHIRELKSLTRYRFSLVQDLARIKGSYARLCVILFPELEKIVPTLHLISVYTMLAMLPTAETIAACHLTHLENILSASSKGRYGKDKAVEIHKAAMESIGSHSDAKALELQQTIQRILCLEAQIEAVEAKINPIIDSLQSPIMTVPGISYRMAAIIIAETENFTNFTHAEQVLAFAGLEPSVYQSGQLTSTHAKMVKRGSKYLRYALFNAAKYVCRWDPHFGAYLAKKRSEGKPYNVAVSHAAKKLVRVLFHLVKTNQSFISQA

SEQ ID NO: 514556 - protein, 460 aa, unidentified
MAKSIANLFIGAELSMNAVGIDVSKGKSTVCIRQPGGSVLAKPFDVRHDAASLQGLAERIRELSGESRIVMEHTGRYYEAVAKVLHEQGLFVSAVNPMLITNYGEYKVHGVKTDSADADKIARFALDRWGLLREYSGMDTIRYDLKTLNRQFQLASKQRTAFSNNLVDLLEQTFPTLRKLFESPVRADGTQKWVDFAEAFWHVDCVRKLSLNAFAEKYLKWCRKHNYNFSVEKAALIHVTAKELVVLVSNAEINKFMIQQAARQLTFISQSVECYRAQMLKLASQLPEFPAVMAMFGTGNSLGPQLMAEIGDVRRFKDKHSLAAFAGIDPTRNDSGRKNSRKNRTTKRGSPYLRRTLFLIMTVLIQKSPAEDPVYQFLCKKRAEGKEYYVYMTAAANKFLRCYYGKVREYLKEQNLWDTLPIESMNEITPDVADEPDSDIEGDPFSAAANALMIDSVDPV

SEQ ID NO: 514557 - protein, 419 aa, unidentified
MSSTKTKKVKNVNEKTLIVTVDIGKEVHHGYFRSPNNKEIMPFPFCNDGYSFKKFWGKICQFQRKQGLEDIVIGFESTGPYAEPLFHYLRKKPVKLVQVNPMHSKRLKELTGNSPNKTDKKDPRVIADVISLGHALTLVVPEGAAAELRRLAHARERALKSRTAMSNQLQHIVFVIFPEFLSVMKNISTKSALYLLKNHPASENIVALGIESVCTILKKVSRGQLGTKRAEELLKAAQNSVGIDEGKQSILLEIAHLVSHIESLGQFIDNLEKQMEVYLEQIPYSHSLLSIKGISIVTVGGLIGEVGDFKQFNTISEITKLAGLDLYEVSSGKHKGQRRISKRGRSLMRKLLYLAAVNMVRYNGIMHDQYQRMLDRGMLKGKALVAISRKLLRLIFALAHNNTVYIGNYSEKHKYKYVA

SEQ ID NO: 514558 - protein, 409 aa, unidentified
MDALIERGAGLDIHQATIVATVRVPDDAGKRRVVTHTFGTMTVDLLALREWLQAYGVTHVAMESTGVYWKPIYYLLEDGFTLLLVNMHALKQVPGRKSDVKDSEWLAQLLECGLLRGSLVPPAPMRDLRELTRYRKRQIEDRAQEVNRLYRVLEEAGVKLASVLTDVMGVSGRAILDALLGGTTDPTVLAELARGRLRSKIPALRQALHGQFRPLHAFLIGQILTKIDFLEETITVLSEEIDVHLRPFESTVQQLMTIPGVKRRTATTVLVETGGEMSRFATAAHLCSWGAMCPGLNESAGKRRTGKTREGNRYLRGALIESALASTRTKGSALQARYLRVRRHRGHKKAIVAVGHQILEIAYYIMRDGATYHELGADYFARRDRERTIRRSVKQLEALGYHVTIEEAA

SEQ ID NO: 514559 - protein, 356 aa, unidentified
MNIIGCDLHTRSEQIAMLNTETGEVVERRLDHESGEARRFYEGLEEPVLVGIEATGYTRWFAEMLEELGHQLVVGESGKIRAMNPRKQKHDRRDAQHLLNLLIRGDFPKIWLPAAEERDVRVLIEHRHQLVELRTRAQNGLQAIALSYGLRRRKRLWSKAGQEKLQKLPLREGMARRREDLTQLIAQLTVWIGELDQRIVQEVARRPEAQRLMTHPGVGPQTALATVLVLGPVERFPDDRHLTSYLGLIPQEDSSGGRQRFGHLTKQGNRLMRFLLVEAAQTASRTDPRLQRAYRRLVFRKGAPIAKVAVARKLAIRLYIMLRDGIDYEEFCRRGPAPDGAGRGSHAGMLGDVALA

SEQ ID NO: 514560 - protein, 423 aa, unidentified
MLKLKYSICCGLDVHKNVIVATIVTTSKDGISEYMQKSFSTINSDIQRFHDWLIENNCYHVCMESTGKYWIPIFNYLENDIDVCLTHPKYVKAIKGKKTDKKDSKWIADLYKFDLVRCSFIPPKDFRQLREIARYRFKLVCMKSSEKNRIQNCMTVSNVGIASVLSDPFGKTATEIMSYLLEHTADSIDENAVRKLIKKGAKAKSNEIIEAIKGYNIETDQAKKLELARGHLEYLDDMITQTEIELYVRMKPYYEFVEVVSTMPGMTELSSTIILAETGVDMDIFDDAKHLCSWCGLSPANNESAGKKKSVRIAKAGDYLKPMMVQCALAAIKSKKQPYFAIKYGRIKKRRGHKKAIIAIARMMMVCIYHMVSARKPFTPTDYEELMNPQNHVERVVLNEDNVFAYLESLGYDSSKLVKRNDN

SEQ ID NO: 514561 - protein, 419 aa, unidentified
MNETVRWETITYYAGFDWAKDHHDVVIVNPQGKIVKDLTFEHSAEGWAKWKELVAAYALLAVAIETNQGAAIEQLLESGVIVYPVNPKSAERYRDRKAPSGTKTDFLDAWSLADALRVDGHGWRALKPLDPLIQELRLLCRDEVDLIAKRTELVNQLQAALHEYYPAALQAFEDWTATPSWNFVQQFPTPQLLRQAGRRKWEKFLHVHHLYRPELNEKRLEIFAKAHEFCGPAAVTRAKSRLALALVKLLNALENQLEDYRKEIRRLFNEHPDHELFGSLPGAGEKLAPRLLSELGSDRSLFDSAQALQCYVGTAPVSFESGQVRQVYVRFMCNKSFRHAVHLWADLSRKFCSWAQVYYQQLRAKGKTHATALRCLGQRWLKILWKMWQTKTCYNADFHMANQLKHGSWVLSVKPSKSK

SEQ ID NO: 514562 - protein, 420 aa, unidentified
MRSIGLDIHRDFGEVAIGEGAEIRSAGRIEMTPQALELFAGSLGRDDRVALEVSGNAWEVARIIEPHVARVVVVSPTDTGIRSARAKTDRLDARALARLLASGSVDSVWVPDEATRAMRRRLQRRSQLVRVKTKAKNEIHAALMRRLIPKPGFSDLFGIKGRRWLAELELPAAERETVDGCMRQLDFCEAEIAEIERAIAAEALKSREVLRLMTVPGVNVITAATFMAAIGDIGRFADRKKLVGYLGLDPKVRQSGTTTASRARISKQGSSSARYALVEASWSVVRAPGPTRAFYERIRARRGHQAAIVAAARKLACLFWCLLTRCEDYAYAQPSLTKKKLRRLELAAGAQRGKAKPGTWAANKAMREAERELARQAEVADKRTVADWQRAQAKKGASVTTGRASDRPSGGEAARQTISP

SEQ ID NO: 514563 - protein, 462 aa, unidentified
MPRRKLKTTTRPRQARLVYREDAPTLQVQNPHAAGIDVHTDNHVVCVGPGLVQTFGAYTADLQAIADYLRQAGVTTVALESTGVYWIPLFEHLQALGFECYLIEPGQLRGCGARPKTDVLDCQWMQRLHTYGLLKASFRPPESVRALRAYHRQRQMVIRHAAAHVQHMQKALEQMNVKLTEVLSDITGVTGLRIIRAILAGERAPHTLAGLASPICAKSRDEFALALQGLWQPEHLFELRQAHDLFQTYQRLVDECDRQIKAELAGQPDRAGDKPGPGPRPRRSRKKNDLRFEATGPLFRALGVDLTEIEGIDVGTALVVLAEIGVDVSRFPTEKHFAAWLGLCPNTARSNRREKRQSPRQGASRLKQALRMCAQSVGRTQTPLGMFYRRIKSRIGGMGACTATAHKLARLVYRLLKYGRAYVKQGMDEYAAKMHTNAERILRKKAAALGYELTPRAAGATT

SEQ ID NO: 514564 - protein, 425 aa, unidentified
MNSNTNQKINQVTENTLVIGIDIAKHKHYACAIDERGRVLQKSFPFTQSRAGFDAFYEKILDLRSTHEKSEILVGFEPTGHYWMNLAAYLSAHGIPFIMVNPLHVNKSKELDDNLQTKNDQKDALVIARLMRDGRFSYPRILEGVEAELRNGATLRSKIQEDLNALQNRIVRWIDRFFPEFMMVFKNFGKMAYAVLEKTPLPIDIQGKSPEELLFLYRQVEGMKSPQLPKAKQLVEVAQHSIGLTEGLVMARIEIATLLQQHHLMQDQLNALTEQLIDLAKQMTDYEYLASVPGIGDVTIVDLLSEVGCLTQYEHPRQLIKLAGLTLRENSSGQQKGQKRISKRGRRKLRTLLFRVMVPLIRHNKAFKQLHEYYTTRTINPLRKKQSIVVLCGKLLKILHALCKKKIQFDEQQMMKDLYCLEGVA

SEQ ID NO: 514565 - protein, 480 aa, unidentified
MPTITKSRARLKTQSAAPVTALASRDRLDVPTAKRRARRRSEPPERPATMPAEEQKLAQNRAILPPSGVNPGGTPTRSVTQLDGAQGRMTMRIVALDLGTKKTSFCELSQGQVVQRLTVSDVCSLEHLLGPDQPPAQVAIEACREAWFVHDLLVQWGNEVVVIDTTRSKQLGIGQHGRKTDRIDAEVLARALESGRVPKAHVLPPQRREMRRVLLVRRTLVENRAQLVTTARGLVREQGVKIPTCHTSSFVSRVRAQQLPADIAQLIEPMLVLIQLIDSQVVSITERLDALCAQEPTVALLTTTPGVGTVVAACFVAVVDDAKRFHRAHQVESYVGLVPNENTSGGGKQRLGAISKHGNSYLRALLVQAAWTIVRSRDKSNPLYLWAAQLIERRGKRIAVVALARRLVGVLWAMWRDGTVYDTEHLAKQNVRGLRGAIQTLEQQSAALAQAAKKTSAKQPRIASTATPRRKTKTPAAKAA

SEQ ID NO: 514566 - protein, 417 aa, unidentified
MEIVYERVAGIDVGKKIIAVAVRTPGERPGKRRQQLRKYNTFHQTLTQMVAWLVAEGITHVTMEATGIYWKPIFHALCAAERPLEVLLVNARHVKNVPGRKSDALDAAWLAELTECGLLRGSFIPPPQIAAIRELTRYRKKLIEQRTSELQRLAKVLEDSGIKIDSVASALTTLSARAMIEALIAGERDPAVLADLARGRMRSKIPDLTLACAGRFADQHALMCTLHLEHIDHLADMIARLDARIDEATLPFVQQTNLLATIPGISERAAQVIISEIGVDMARFPTAAHLASWAGLCPGNNESAGKHRSGRTRKGNTELCTVLTECAWAAGRTSTYVGAQFRRFHRRFGGKGGKKAATATAHTLIVIIWHALAETAAYRDLGSDYFTRRIDSPEARKRRLIHELEALGHKVTLEPAA

SEQ ID NO: 514567 - protein, 383 aa, unidentified
MACVVGDGGGVIDRFDISHDATGLTEMARRFRAAGVQRVAIERGDGPVVEVLLDAALAVFVVPSRQIKSLRGRYGSAGNKDDRFDAYVLADTLRTDGHRWRALREDQDDTRALRALCRARKDLVETRVQVLNQLRGNLELALPGAIGLFSKPDSKITLAFLRRFPTAEKVDWLSVKRFGSWLASMGYSGGVSAAVLFQRLTDAAPGLLGAEGQARGRITLGLVTMIETLNAEVEAIEQQMSLLLSAHPDQHIFTSLPRSGMVRAASLLAEIGDCRERFPTDDALAALAGASPSTRQSGKRKQTVFRWACNKKLRAAVMDFANGSRMADPWAADIYQRAVTRGYRHPHAIRILARAWIRIIWRCWQDGQAFDPARHRGRHTLAA

SEQ ID NO: 514568 - protein, 371 aa, unidentified
MGNDITFVGLDVSKATISVGLAPGDRGQAVSYFGSVAHRPAALDSLCRKLSREGSRLHFCYEAGPFGYGLHRQLTEWGHVCEVVAPSLIPKRPGERVKTDRRDALSLATLLRAGQLTAVWVPDASHEAMRTLARLRWLAAGDVVRAKQQILSFCLIHDRVYRAGPTHWTKTHRNWLADQKFEHGALGLAYGELLFRLERAEEMLTRTQQELREHLTDWSLHEVVDALQALRGFDWLNATTVVAEIGDFQRFPTASHLMAYVGLVPSEYSSGERRRRGQITKTGNRMVRRALVEAAWTYRYPARQSYRLRNRSSHLPEPIRDKAWQAQIRLCRRLRDLRRRGKPHNVALAAVARELAGHVWAIARMVPTPAA

SEQ ID NO: 514569 - protein, 338 aa, unidentified
MSKITTIGLDLAKQVFHVVCCDERGTVIGRKMLRRSQVLEYFANLSALRVGMESCASAHYWARELNALGHEVKLLPPQFVKPFVRGNKNDYNDALAIAEAVVRPEMRGVVIKTVAQQDIQALHRLRAQCVASRTAACNQLRGLLGEYGVALPRGVGSLRRRLPALLEDGENGLSELFRRLLAQGYQRLCELDDHIEAYTAEVKRHSRQDDACRRLQTIPGYGPIVASVFHSTVGDGQAYRRGRDVSASLGLVPRQHSSGGKSVLLGISKRGDGYLRSLLVHGARAVVRQAEHKDDKLSRWINKIRAQRGYNKASVALANKLARIGWAVLAKRSVYQAA

SEQ ID NO: 514570 - protein, 388 aa, unidentified
MNTITTTASGTTILAIDLGKYKCVACILDPNSGEFRFTTFDTSRAELQKLIAKHRPGVVIIEACLLAGWVHDLCGQLGVRCLVANTASEAWKFKHLKRKTDKDDALRLAQLHLLGQLPTVTLPTTNVRQWRSLIACRQTWVGRRVAVQNRIRALFVAQGLPAPRGAKAWSETGLAGIATQAKPLAECGPDELWRGLLDLALTEYRQVCALIDQAEARLDALGKQNADVILLQTTPGLGPRTAEVVAAYLNDASRFKTAKQVSAYGGLVPRQHQSGEMDRRGRITKRGPALLRKLLVECAWCMLRYNGWARGIYLRLTGGGERRKKQAIVALARKILVRCWAMLRDQKAWHDPQAGPKNPLPPSKQKRQAEAQRRREAKQSAVLEGANA

SEQ ID NO: 514571 - protein, 483 aa, unidentified
MKSKQQEKTKEASCGPTQGHWQQMNRKQRREMTRKIQSEDIRLEVIHPDAAGIDIGNESHYVAVPPARDSQPVRRFGCTTAELKEMALWLKQSAIRTVAMQSTGVYWIAVYDILEEAGLEVYLVNARDTKNLPGRKSDVQESQWLMKLHTYGLLRNSFRPSQEIRTMRTYWRQRNDLVQSAGRHIQRIQKAMTQMNIQLANVLSDVSGMTGQAIIKAILAGERDPHKLAAFRDPRVKASEEQIARSLEGNWQEDLLFLLQQEQNGYEFCQKQMAECDQRLEQYLRQREDRSAGVNLPEEKRKGRLRKKKKGNTPQFDLRAGLFRMTGTDLTRIDGVDVMTAITILSEAGWDMSKWETEDHFVSWLRLCPDNRISGDKIIGKGRLPTNNRVSTALKMAATTLRLSKTYLGAQFRRLRSRLDTPVAIKAMAAKLARLVYRMLRYGMKYVDRGAEFYEAQHRQLQIKHLKSKAAKLGFQVIQVPAA

SEQ ID NO: 514572 - protein, 397 aa, unidentified
MYYVGIDIAKRIHEAVVIDETGKIIYKSIRFANSREGYEILMQYIGRVTKLKSQFAFGMESTSHYCLPLYTCLSQDGYQVHVINPIQSNSLRNMYIRQTKTDTKDSLVIADVIRFGRFSETVVPQDKQFALREMSRNRFYLTDCVSDLKRKVTALVDQVFPEYETLFSGIFLVSSIEFLIKYPTPELVRRVRADTIASLLIKHSNGHFGRAKALALKDAAQRSFGVPDACGVYSDLIRAFLTQIKFIQGQIDALDAKINTIMKDLDTKITTITGVGAVLGAVMLAEIGDISRFKSAEKLAAFAGIDPTVKQSGDFVSTKNHMSKRGSPYLRRALWMASVCAVQSDPMFRAYYEKKAAEGMKYMKIIGHCTKKMANVIFAVLRDDKAYIPIMNVPISA

SEQ ID NO: 514573 - protein, 441 aa, unidentified
MSYRIAGIDVHKKMLAVVVSDVEIESEFQFERRMFSSNPEQLRSLAAWLVEQKTEEIVMESTAQYWKPVWETLERHWKPLCEKREGARRRSGTLHLAQALSNRGRRGRKRDFIDAERLVKRLVARELTLSFVPDPEQRLWRTATRKKYQLRRDVVRLHNQLEALLEEAHIKLSSLVSDLLGVSARRMLKALADGETNPAALAALAHERLRATPEQLCDALGACRELKPVYRRLLKMALEQLQLLEQQIGQLDQELATLLHPHQDAVQRLAEVPGFAVDSAQQIIAEVGPTAATFPSEKCLSSWVGACPGEEESAGVNYSHRSPKGNRHMRRLLNQAANAAIKVKGSIFEVVYRRCVPRLGHNQTIGVIAHRQCRLIWLILHQGTRYEERGPAVTMRSRYQRTWRMIRQLRQLAIGSNHQVLNPARHMRSYFRLWETSKPVT

SEQ ID NO: 514574 - protein, 423 aa, unidentified
MLCAFGLPVPRRWVVLLHAAPVVVPTVVVAVDVGKSTVALSATDGARRRLLGPVEFEMTRPALAEVVAKLHGVVPDGTPVRVGVEAAGHYHLPLLAASAWPVGWQLVELNPTHVTEQRRIAGRRGVKTDAIDLEAMTELLLAGRGVPVAERGAVVVELTAWAAHRARRVATRTATKNQLLGQLDRSFPGLTLALPDVLGTKVGRLVAEQFADPARLAALGVSRFVRFAAARNLQVRRPLAERVIQAARDALPTPQAQAARRVLTADLALLADLDAQVAAAEAELARLLPVSPFATLTSVPGWGVVRAANYGAALGDPARWPSPRQVYRAAGLSPTQYESAGKRRDGAISREGSVQLRRALIDLGVGLWHCDPAAKTYATTLRARGKHGGIIACAMAHRANRIAFALIRDQAYYDPSRWNSHTG

SEQ ID NO: 514575 - protein, 465 aa, unidentified
MTKRHQSQVRRNSGNKVSRSLTLLNPDAAGIDIGASEHYVAVPPERDEQAVRRFGAFTEDLHKLAQWLLQCGVRTVAMESTGVYWIPLYQILEDYGLVVKLVNARHVKHVPGRKSDVQDCQWLQQLESFGLLAGSFRPEAKICILRSYMRQRQMLIRNASRHIQQMQKALTQMNLKLHQVLSDLSGQTGMRIVRAILQGERDRLKLAALKDPRVKSSLGTIAKSLEGDYRSEHLFALRQAVELYDYYQEKIAECDQAILQEMQSLETRAAAGSVPPPPRPGKGRSRHNPIPFDSRAELYRIMGVDLTSIDGLNEATVQLILSELGLDLCKKWPSEAQFCSWLGLCPNNEISGGKVLRRGTRKVINRVANALRMCAESLLNSKSALGAYARRLRAKRDSKIAISATAHKLARLIYRTLKYGQEYSDIGQAQYEAKYRTQAIKSLQKRARQLGVQLVDLPPTDVIVP

SEQ ID NO: 514576 - protein, 352 aa, unidentified
MPFAGVDAHKRYSRVVVKDEAGSILCQATLQNDVTSFREFFGAIDGPTKAVLEAGRDWGVIYDLLEGIGVEPVLGNPVKTRAIAEAKIKTDTISATTLADLLRADLIPVVHVPSREVRSQKNLLRQRLWLVELKTRIKNRIHNIIDRNHVGPPPAADLFGKAGRHFMDQLQLPSPDDRLLRSHLELLDLVQGQIGRCEEWIDEALGERPEVANMRTLPGFGKILSALLALEIDDVHRFSHPGKLCAYAGLVPTTYASGGKVRHGRLLPSCNRWLRWAFVEAAWAAQRSSAYCRAYFDRIKRRKGANCAVTALARRLCEITWHCLTDSRAYEERVIMPIRKELARPPSAVLGR

SEQ ID NO: 514577 - protein, 401 aa, unidentified
MKRLSGGIDVGSESHHITILDDEDHILYNQKVSHQLSEFAESIKLFKQIEKKEGGKLSFALEGKNGYSAPLDRILLDQGFTLYNVDNFKLKRFREAFAGEWRDDQRDALMLSKMLKLKEHINSPREKVFIKIEKPSLVTESLKLLSRHQQTLIDERVRLTNRLGKKLLEVCPQILRLGKLKNKKIIAVLTKYPDFSKYKRITLCSLLKIKGIGKKGAFFLLKKLNNIEYMPGLTDIYQTIILSYAKRILELQKEIEDLDKKLDEIGEESKEVKHLKTIPGVATKLASRLIGEIGDIDRFPSEKQLAVYCGVACVDNNSGKVIKARAVYKANKTCKHTLITMAGGSIRFSFQCRDYYLKKRAEGKSHNHTLRCLARQLIRVIYKMLTEDRDYIVRKELRKVA

SEQ ID NO: 514578 - protein, 424 aa, unidentified
MSKRVRATGKAQISARFHITGGCDTDKNLIVAAIYHADTGHLEAREFHQHRADALLAAEWFRTQQVEFVIIESTANYHLLYYDTLREQGVNIAVINPIVVKSLLRVEGKSDKGDAMTLARLAASFELKTSNMPDSQQRELRLLFKRIDALKTHRTQITNRTNSILTGYGFTVFRLVPINSPTGFHILQAVIDKRNPTEIAALHRTKSKRIEIEKCCSVELPDYLRTYLQEVLGDVRLINQRIAAGEVELLSKISTYDLDDQVILMCTVPGVTKMLALRIIAEMGANFHQRYFSAEAFAKGIGVVPSNEVSGGKLLKRRASHGNQRVKFHLLSTAKAFAMYGRGPLRSWFDAYRARANFMKATAALARRISEGLWWVMVRNEPFRFWQGEKPKSGCEAIQLGELLISPETGEILIDLQATQSDDV

SEQ ID NO: 514579 - protein, 395 aa, unidentified
MSFKILKNNCCGLDVHKTWIYAYIGITDSFKRTEYKQARFSSFTKGLQELCLWLAKYNCIDVCMESTGKYWIPVFNVLEKNNIFVTLSHPKYTKPQKGNKTDRKDAKWICDLYMCGMVKPSFIPPADIRQLRDLVRYRFKLTCMITGEKNRAHNCLTVSNLKLDDVFSDIFGKSSRSITEQILQHPGEVFDVAPFVDSRCKTPIEEIQAAVDGAISHEQAVKLRQCLKHIDELEMHKAEIEREIFRLSDKYEEVLNLIRTIPGFDKNPLTAIQVLSEIGADMSVFPTAKNLVSWAGCCPRNDQSSRKIKSTRISRAGSYFKPVLVQIANALIKSKKHPEFTTRYRRIKARRGHKKAIIAICRMILTAVWHILTDLKPYTPEGFLIAHHNQALFTS

SEQ ID NO: 514580 - protein, 373 aa, unidentified
MTTGVVKKRASSRRGVSSGTTLELGKATPSRRKKVPVEREYVGIDLHRRRSVIVRKSADGELLSKIHIDNDPVALMTAVAAAGPEPELVVEATLGWYWATDLLAEMGCHVHLAHPLGNDWGKRRVKNDERDANDLVDLLRLGRLAEAWIAPPELRELRELVRYRHKLMRLRSGLKAQVHAVMGKHGVLPARVDMFGPGGTAQLDALQLPPGYAARLASLRRLIDVYSGEIAELDRTVASRLNGHAGYRAVQALHGVGPVLAAVFVAEIGDISRFDSPHRLCSWAGMTPTHRESDTKVRRGSITKQGSRLLRWAAVEAVSKNHGHNKIKNDYRRIAERRGRNIARVAAARRLLTLVYYGLRDGEIRCLAQPVDR

SEQ ID NO: 514581 - protein, 360 aa, unidentified
MRNERTSVGLDVHARSVVGCAIDGSTGEIHRRRLTPDPNEILGWVRSLPGPARVAYEAGPTGFGLARFLSAQGVECLVAAPSKLQRPSGDRVKTDARDALHLARLLKLDEIVAVRVPGVAQEAARDLVRAREDARADLMRTRHRLSKLLLRQGIVYSGGKTWTGQHDRWLRARHFPETGRQLAFEAAYEAMVLTGDRRDRLDAAITTMATDSEFTDVVRRLGCLRGVSTLTAFGLAVEIGDWHRFTGASIGAYLGLVPTEDTTGNSRHQGSITKTGNTHARRLLVEAAWHHRKTYAIPGAVMRARWDQAPAAARTRGHEGNQRLHRRWQVFTDRKKKPVIANVAIARELAGWCWSLATLE

SEQ ID NO: 514582 - protein, 418 aa, unidentified
MADEIMAEETIRWFAGIDWGSAKHQACLLDGAGTVVGERAFAHGGAGLAALCDWLVSMAGDPGSVAVAIEVPHGPVVDALLDRGFAVYAINPKQLDRLRDRISVAGAKDDRRDARVAAAGLRTDPHLFRRVLAGDPSVIELREWSRLAEEVQQERVRLGNRVRQQLWRYYPQLLALSDDVTAEWVLALWNMAPTPAQAARLREATLARLLRQHRIRKLDAPAVLAILRQPAIPVAPGVTEAAVLHLRSLVARLRLANQEFRQAERKLEELCTALSETQPTAQDSGPGDATILRSLPGVGPVTLATLLTEATGPLARRDYPALRTLSGVAPVTKRSGKSCIVVMRYAAQVRLRNAVFHWARVAVLNDRRCRGRYEALRARGHSYGRALRGVGDRLLGVACVLLRRGMLFDPDYGSSASA

SEQ ID NO: 514583 - protein, 455 aa, unidentified
MRKKRSPQNQKQNKRVLEQINHNAAGADMGSETVWICVGEHASDDPVRVFGTTTAELRASAQWMVDAGVDTVALEATGVYWVAAYEIYQEYGLRTILINSRAIHNFNGLKKSDFIDCQWIQLLHTFGILQASLRPEKVMVELRGLRQRKSVVEQSSEQIQRMQKALVLMNIRLDQAVSDITGVTGMAIIRKILKGERDAAKLATLRDPACAKSELEIAQALTGHWRDEQVFALEQAVKLWDFCRTLIAECDVKIEAVIQKVPARAQAPEAALTKKARAKARKNQVNFDGRTLLHDRLGVDLTEIKGLDVLTILTVISESGIDLSRFPTEKHYASWLGVAPGTKKSGKRVLSARSRRTTNRAATALRLAAQSLLKANSELGAFGRSLRARVGAEKAITAVAAKLAHRIYLSLRTGRVFADRGAEYHEQQHHDRYLASLHKRARKLGLQLVPLQQTL

SEQ ID NO: 514584 - protein, 412 aa, unidentified
MKWVARIGIDWADKKHDWVLKDGQGRRDGGVFLASPEAVHEWVRSIRAQYPEGKILISLEQSRGALIYALRQYDFFILLPINPRALSLHRQSLYLSGAKSDPTDADLICDFGADNFDKMRVLVADDVQTRKLGLMVEARRSLVDQRTSNIQALTAACKQYFPQVLEWFGGAGEQLTLAFLQKWTTLEQARTIRRDSLRTFVRAHSRWSEEKIEALCSAIRSAVALTPDEAIIESYAMQAQSIASVVLVLDEQVSRYDKWLATLTQAHPDCEVFASFPGAGQVMTPRLIPAFGTNRDRWQDAREIQTYSGIAPVVDASGKRRRVLARWHCPKFLRQTFHEFALASIPHSQWAKAFYRQQRDRGNGHHAAVRSLAYRWMRILFRCWKDEELYDEERYLTQLRLKKSPIITRLAA

SEQ ID NO: 514585 - protein, 362 aa, unidentified
MLNDKTVVGLDVHAKATQAAVLEMATGELSFRRLGGQPSEIVGYLQGLGGSVLATYEAGPMGYGLARAGAERGLDVRVCAPGSILRRPYERIKTDRRDAERLARLLIAGELSFVRVPSIEEESFRDLARCREAARGDLMRARHRLGKLLLRRDVRFPGPGSNWTQAHWKWLNGLEFNDVPSRAVLADYLTGVRALEQRRGALNDIIEGASPESPWAQTIARLRCMRGINTVTAFGLCTEIGDFHRFAHPRTLTAYLGIVPSEHSSGEQIRRGPITKAGSPHARRLLVEAAHHYRHQPAIGMALAGRQDGQDPRACEIAWRAQRRLHHQYQRLRLERGKPANIVTVALARELAAFAWEVGQLN

SEQ ID NO: 514586 - protein, 364 aa, unidentified
MMSDQHVHVIAGVDTHGQTHHAAVIDSLGRHLADREFPATGSGYRQLLSWLGGHGTVQAVGVEGTGAYGAELSRVLARAGLSVVEVDRPDRKTRRMKGKSDPIDAYAAATAVASGRATGVPKTRDGIVEAVRALRVPRRSAVKARTQAINQARQLVITAPEELRAQLRGLPARELAAVCARFRPSDLASPLGATKAALRILSRRILALSEEIADLDVELKALTAQTAPTLMNRMGVGPDVAGQLLATAGDNPDRLRSEAAFAHLCGVAPIPASSGRRDRHRLNRGGDRAANHALHTIALSRMRWDERTRSYVDRRTAQGLSKKDIMRCLKRHIAREIYHALINDLQARDPATKAPTTADLAKAA

SEQ ID NO: 514587 - protein, 353 aa, unidentified
MLAELVDHVIGIDPDRDWITAAVVDANTTGVIATAKFAANNDGYDDAVEWADTHTAAGDRGWVVEGSGSYGRGLTAALSRAGEWVIEFDRPHQRPTKDGAKTDELDAVRAAREALGRRQLHTPRTHDGHREALRVHTVTRAGVVRARTAAINELKALVLTSPDELRSDLRGLATPALIKRCAAFRTTPKRPIAEQCVRNTMRVIARRVQHFNDEIEVHDAAMKQLVDEAAPQLVAEPGVGYVTAAMFIIAWSHPGRCRSEAAYARLAGVAPLPANSGQSQDRHRLNRYGDRKLNRACHMVALVRMHHHEPTKAYIARRRAEGKTDREIRRCLKRYIARNIWRLLEHQSPKITA

SEQ ID NO: 514588 - protein, 353 aa, unidentified
MKVLTTSNKGGSVMKITTVGLDISKNKFHFYAVNQAGKKVKKRILSRSELLPFFSTLEPTVVVIESCGSANHWGRKFTELGHEVKLIAPQYVVPYRRKNKNDFNDAEAIAEAAQRSNMTFVPIKSIEQQDAQMLLRIRDRHVQNRVQLSNQIRGLLAEYGLIIPSLGKAALRKALPEFLEDAENELTISSRTLFSELHEELLQLDEVIKTYDKKVEGVSKLNETCRRAQTVVGIGPITAAALYGAIGDGNNFTNGRHFSAWCGLVPRQNSTGGKSVLLGITKRGNPYLRTLLNHGARTVLKNCEGKSDRLSLWAQKLKKEKHYNQACIAVANKLARIVWAVISKDEEYQVNYI

SEQ ID NO: 514589 - protein, 402 aa, unidentified
MNAVGIDVSKSKSVVAIMRPFGEIVSTPFEIKHTASDIHSLIELINSVEGESRIVMEHTGRYYEVLAHQLLEANLFVSAINPKLIKDFDNDSLRKVKSDKADAIKIARYALDKWQNLKQYNVMNELRNQLKTMNRQFGFYMKHKTAMKNNLIGILDQTYPGVNTYFDSPARSDGSQKWVDFASTYWHVDCVRKMSLNAFIDHYQNWCKRKKYNFSQSKAEEIYGKAKELVPVLPKDAITKLIIKQAVDQLNSASTTVESLRTLMNETASKLPEYPVVMAMKGVGTSLGPQLMAEIGDVSRFTHKSAITAFAGVDPGVNESGTYEQKSVPTSKRGSADLRKTLFQVMDVLIKTHPQDDPVYQFLDKKRAQGKPYYVYMTAGANKFLRIYYGRVKEYLASLPES

SEQ ID NO: 514590 - protein, 339 aa, unidentified
MSIVTVGIDLAKNIFALHGVDQSGRAVLVKPKVARGQLLEMIASLPPCLIGMEACTGAHYWARQFRQYGHTVKLMAPKFVAPYRMSGKRGKNDANDAAAIVEAVTRPNMRFVPIKEEQQQSTLCLHRTRQGFIEERTALYNRLRGLIAEFGIVLPQKVERLRREIGPHLEHLPGWANRCVGDMLQHADTLTTYIDDYDRAISEAAKQDARSHRLMQLPGIGPTTASALVASIGQGHDFSHGRQLAAWIGLVPGQYSSGGKARLGRITKAGDAYLRSLLVMGARSVLAGLGDKQDGFSRWARNLVERRGYWKAVVAIAAKNARLAWAALHYGEDFKRQLA

SEQ ID NO: 514591 - protein, 408 aa, unidentified
MNAVGIDVSKGKSMVAALRPMGEVALLPQEFLHTEIGLEQMAYAIIALGEDTRVVMEATGRYHEPVATALHEYGIYVCVLNPLFIKQSGGGSIRKVKTDKADAMKIAKYGLDNWVDLREYTPMDTVRQQLKLCSRQYNLYMKTVVSLQNNLISLADKTFPGVNELFSSPERADGHQKWVDFVMTFWHCDCVCRVSEKAFTERYQKWCKRKGYHFSAEKALDVYAGSCGHFTTLPKNDNTKLLITTAAQQLLAGKMTLAALRAEMTRLAKQLPEYDTVRAMYGVGETTAAQLMAEIGDVRRFPRRSSIVGFAGVDPAVDQSGKHEAKSTPTTKRGSPHLRKTLYQIVCTYLKRSPVDEPVYQFLDKKRSEGKPYFVYMTAAQNKFLRIYYARVKECLEAFDARQSLAQS

SEQ ID NO: 514592 - protein, 409 aa, unidentified
MRLFVGLDVSSFDMKVCFLNGEGEKLDSFSVSNDLPGAQVLKERLLQCTTNQKVETLKIGLESTSVYSFHPSMFLHHDEDLKRFGTKVFLLNSKQVANFKKSYSDMNKTDEIDAFVIADYLRFGRNQMSIVKESQYVVLQQLTRSRYQLVRMLTKEKQHFLQHLSYKCNTFSQEVDSSIFGNAMMELFLEKFSLEELADMPLEELAEFLQEKSKNRFGDPKCVASTIQKAVRTSYRLDKVVEGSIDILLGTSIEIIRIYQKQIKELEKSIKRIMAGLTQTLESIPGIGPIYAAGIIAEIGQIERFGDETKIAKYAGLYWRTCQSGRFTAENTSLSRNGNHYLRYYLVEAANSVRKHVLEYQEYYAKNYNEVPKHQHKRALVLTARKFVRLVDALLRNHQLFTLERRVKV

SEQ ID NO: 514593 - protein, 433 aa, unidentified
MEEVTDEPLHRDRVCGIDIGKAGMTATIRVPSDKDPARRAQETREFGTTRREVLALADWLRAWQVPAVVMEATGDYWKGPFYRLEAEGFDCVLADAKQVKHLPGRPKHDPGDSRWLAACFERGAVTSCFVAAPEFRVIRLHTRYRRDLTAERTREKQRAEKLLESAAIKLSSVVTDLHGVTGRDIMNHLIAGQRNPKVLAQLARARARRKISELEAALEGAEFFTAEHAALLAAMLARIDQLSTQTGELTQVIERLLTPYEEQLQQAESMPGWGRRSAQDTLAETGADMSRFPSGAHLASWAGRTPLDNSSGKRQGKAKSKKGNRYLAAVTGETAVAAGKTQTREGARYRRLSRRRGKAKAQVALGNTQLKVYHALLSNPGTRYEDLGPNYYERQRDTRRQIAHHVGKLGALGFEVTLCRTPDPTPQGGDQAA

SEQ ID NO: 514594 - protein, 368 aa, unidentified
MAKVVIGVDPHKRLNAVVVLNHRGKVLARRQFPNTSDGFGELATFSHRWRPRTWAIEGCNGVGKHVAQRLVAAGERVLDVSTRRAALVRVFAGGNGRKNDDVDAHSIALVGLHTPDLPEVRADDRRVALRLVSNRRKELVGLRTQCVNRLHRDLVALLPGGAPRALTATKAKALLAAVRPRDEIGRLRRQLAADQLADLVALDRKLSAIEAQLKELVKTTPTSLPELYGVGPVITGIILGEVGDVARFKNRHHFASYNGTAPDDKGSAGHPAYCVNIKGNRKLNHAIHMVAITQIRNPRSPGRAHYDRKLTETKTTKEALRALKRRISDVIYRQLCLDAEHEAGPGGQTGTTLQSSVTGPTPLCVNLS

SEQ ID NO: 514595 - protein, 337 aa, unidentified
MRHLGVDLHSNNLVVCYLSERGKQSFGKFALSEVERFQKELSKTDVVAVEATANSRWFIKQIASKVARIEVVNPRQFEVIAKSVKKTDRADAALLAEFSSKEMLPTVRQKTDEQAEVQGLCSLRTNLVEMRTALFNRMHSIMIGSGRQEAKRSVKSALGRRRLLAQVWTDLERIQLEIIARQIAELDKSIEEAEQAIAKAGEKLPGYENLLSIKGIGSQSAALLRAVIGNIADFETENKLASYFGVVPRVANSNQTVRHGRITKQGNKAARTALLQCALVAKKFSEYLKQFYDSVKERRGSGKAKIALARKFLVVIYHTLKNNWMFTDFTKFEKAGN

SEQ ID NO: 514596 - protein, 338 aa, unidentified
MEVYAGLDLHATNTYVAMIDGENNVLYKQRHKNDVPAILSALDPFKKDIQGVVVESTFNWYWLVDALMDAGYRVHLANVSAIKQYEGLKQIDDKRSSLWLANLLRLNILPTGYIYPKEERPTRDLLRKRLQLVRHRTSHVLSVKNILARNLGVRMKTYDIKKLKASEVRTLFPEKEMRLAVMSSIGLIQHFQEEIDSIEKLLAKKFKVKKEFAKLLTVPGVGTILGLTIMLEVGTIDRFPTVGDYSSYCRCVRSIRTSNGKVTGYGNSRSGNKYLSWAYLEAAHYAKRHHEMIQRYYERKMARTNKIVAIKTVSHKLARASYYVMRDGVDYDEARLFA

SEQ ID NO: 514597 - protein, 343 aa, unidentified
MKSMHYIGLDIHKKMIAFCIKSKDGRIIDHGIVTANRQSLLEWVQTVPQPWMVAMEATLFTGWIYDLLRPYATATKVAHPQMLKAITAAKKKNDAADAEKIADLLRVDLIPECYMAPTELRELRRILRYRNYIVRMAVKEKNKISGLLMEVGAIYAKRRLHGKRYFHQLLDTIEDVPKSVIDMLTLSRSNLELFMAVQKKLVTALRANPLIRDRVKRLMTIPGIGEVTALTWVLEVGEPERFASIRKAVSYCGLCAAQKQSAGKEYRGPISKKRNKHLQTMLVEAAKLAPHWNPQLAEIYKKELTKGHRNRATLAVARKLVAYLLCVDKSKQVFQLRVEAEAA

SEQ ID NO: 514598 - protein, 367 aa, unidentified
MKKVSTTAAKQRKNFPERKLTIGLDLGDRSSWYCVLDEAGSVLLEQRLSTTPKAMGEGFGAMPRCRIALETGMHSPWVSRLLGELGHEVIVAHARNVRLIGESRKKDDRLDARMLARLARIDPQLLAPVRHRSARAQADLTVIRARAGLVRARTALINTARGLAKSYGERLRGCSPRNVNPEKAQGLSPELQTALEPLLAAVESVSERIRECNERIEQLAQQSYPQVALLKQVKGVGTLIALTYLLTLEDPHRFRKSRDVGCYLGLQPGRRNSGQSEPQLHISKEGDPYLRTLLVQGAHHILGPFGADSDLRRWGLKLAERGGKNGKKRAVIATARKLAVLLHRLWVSGEVYEPLRNSSQAPVPAAA

SEQ ID NO: 514599 - protein, 407 aa, unidentified
MYNAVGIDVSKGKSTVAVLQPGGVIVKKPFDVVHSISGLKELTDYIVSLDGDTKAVLECTGRYHEPILRSLSEADIFVSAVNPHLIKDFGNNSIRKVKSDPADAKKIARYTLDNWADLQEYSSMDNTRTQLKTLNAQLDFFTRQKASAKANLISLLDMTYPGLNDLFSSPARPDGSEKWVDYAASFWHVECVRGSGLKTFTERYKAFCKREGYNFSETRAKTLYENAKELVAVFPKDRSNKNLIEMAINQLRSLTECTIRLKNEMDELASTLPEYSTVMEMNGVGKVLGPQLIAEIGDVSRFTHREAITAYAGVDPGVDQSGKRVSKSNRASKCGSARLRKALFLVMSVLLQTKPDDAVYHFLDKKRAEGKPYNVYMTAGANKFLRIYYGKVKAALAAQANSNSDQS

SEQ ID NO: 514600 - protein, 387 aa, unidentified
MGAMSQVNDLSRSLTAFDQSATLTVVVELSAASWLVAGLVPGVDRRPLKKQEPDPVALLQLLERWRAEAVKAGRTVERIALAFEAGRDGFWLARWLQARGIDAHVIHSTSVAVSREHRRAKTDRLDTTLLIRVFLGWLRGERGHCGMVAIPTLEEEDAKRPSRERENLVGERTRIINRIKAALSRLGIRGFKPELRQAARRLEALRTPEDGPIPPNMLDEIRRDMARLTLVRAQIDAIERARCVRLEQAPVSGPHAMVRLLARVIGVGVETADMLVHEVLSRKLRDRRAVARYVGLTGAPDESGSKRREKGLAKAGNARVRRGMVQLAWRFLRFQKDSALSQWYRARTAGATGARKTTMIVALARKLLIALWRMVTTGEIPAGVALR

SEQ ID NO: 514601 - protein, 352 aa, unidentified
MTSQQTIPNVTIGLDLGDKISCICEIDASGQVVKRATIASTPSAIERYFGGCPPCRVALEVSTHSPWVSRQLEAMGHETVVSNTSKVYVKPRRKRRNDRIDAEFLARQARSDVELLHPIQHRSAEAQQDLALLRARDQLVQARTKLINHVRGAVKSTGSRIRKCSAEAFARQAAEQVPEPLRLSLQPLLEVVADLTKRIRGMDDQVERMAEAHPEAVRLQQPAGVGVLTAVAFVRAVEDPKRFKHSREVGAFFGLVPKLDESSDSSPQLRITKTGDPLVRRLLVSAARYILGPFGPDCDLRRFGQAIAARGGKNASKRAAVAVARKLAVMLHRLWVTGADYDPEWVQHHRAA

SEQ ID NO: 514602 - protein, 379 aa, unidentified
MNKHRTFAGLDVHARSVSGHAMDELTGEVWQRLLPADPVEVGRWLESLPQPVKATYEAGPTGYGLARFLWSRGITCSVAAPSKLQRPVGNRIKTDARDAEQLWRLLRLGEIVEVALPDAQQEAARDLVRAREDVRGDLMRVRHRVTHLLLRQGIVYGGGKSWTVAHQRWLGTQRFDAPARQLVFEDAVEAVVLTTDRRDRLDKAIEAMAANSSYTLLVRRLCCLRGISTLTGFGLAVEIGDWRRFTGSSIGAFLGLVPSEDSSGQSRSQGSITKAGNTHVRRLLVEAAWQHRRSYRTPSKIIRDRWELAPSAARVRGHQGNRRLHQRWQYFQARKKNTIAGRCQIFCVSSGYLCERRHCCDHDRQRGACRTARTAAGAC

SEQ ID NO: 514603 - protein, 376 aa, unidentified
MSNVRFIGLDVHAETIAVAVAEPDGEVRSVGVIPNRLEAICKLVKKLGPVASLRVCYEAGPTGYVVYWQLTALGVRCEVVAPTLVPVKPGDRVKTDRRDALKLARSYRAGDLTPVWVPDAAHEALRDLVRAREAAKKDQLRARHRLGKFLLRQGRRPPTAMNPWTQTHLTWVKTVHFEHAAQEATLLDYLQEVEHMVERIARLDRAIDDAVKTAPDQMRAVIEALQALRGIALVSAVTIAAEVGELSRFAKPSQLMGYSGAVSREDSSGERTRRGAITKTGNAHLRRVVIEAAWAYRYRPAVGTALRKRQATVGPDVKKIAWKAQHRLHARYRHLTARGKCKQQTVTAVGRELLGFIWAIGVHVEAKQRQRKSVAA

SEQ ID NO: 514604 - protein, 329 aa, unidentified
MDSPSPFPIVGIDVSKATLAICYHVNDHVKHLEVSNSKAGFQQLVQACGAQCRFVMEATGTYNLALAYYLHEQGGQVAVLNPLVIKRFIQMHLSKGKSDRKDAQWLLRYGQQQPVKVWQPDETVLVECRQLEQVSEQLLKQKTMVSNALEALQRQPIISKLALKRLQQTLKSLTQQVDAVEAELLALLELRFAAQMTLLCSIPGIGRKTAGMLLLFAGGFTHLDNYRQLIAMAGLSPREHTSGTSIRGKVRITKMGGGLIRGKLFMCSFSAKKTNAACAALFDRLVAKGKNKKLALIAVCNKLLKQAFAIIKSGVPYQADFSSKLAPTA

SEQ ID NO: 514605 - protein, 339 aa, unidentified
MQVTTVGLDLAKNIFQVHGVTDGDEVAFNRALRRAQVLPFFERLEPCLVGIEACGTSHHWARELIKLGHTVKLIPPIYVKPYVKRGKSDAVDAEAICEAVTRPTMRFVEVKTPAQQAILALHRTRDLIVRQRTQTINMLRAQLAEFGIVFPQGVGHATQFAKRVLEGEQPDLSEVAGDVIAQLSEQLLFLHGKVAWYSLEMTRVAKREDRVALLQTIPGIGPITASAIVATVGTGRQFNNGRDFAAWLGLTPLNRSTGGKERLGRISKMGDRYIRRLLVIGMMSRMRQIMQNPERYDPWFADILARKPGKVAAVAMANKTARMVWAVLTRNEPYKVRTI

SEQ ID NO: 514606 - protein, 407 aa, unidentified
MGDQPTATDVDVFVGVDMAKEDHYAHAIGPDGNELYARTVRNDQADIEAAIDTASAAGRTVLVIDMTASSAHLLLATAAARRVPVAYVTGLQMRRAADLYAGSAKTDPRDAFILADYARRHVDRLTWLDINDELLVRLRVLNGRDVDLAGDATRTINRCRDALVSSSPALERVVGPNLGHGGVQDLMGRWATPTALRAAGKTRVRTLVSKRSPRLADKLTDQIWEALDAQTLTLPAEDTWGEVIADLAGDLTKIAARRDALKGDIEEAFLAHPLGKVLVTLCGFGPRTGARTLAEIGDPHRFATGGHLASYAALAPVNRQSGRTLDTATRQRRGNHRLKNALFLAAFVATQHDPDARAYYQRKRAEGKKHNAAVICVARRRCDLILAMLKNREPYRQPQPENLPQAA

SEQ ID NO: 514607 - protein, 341 aa, unidentified
METVYFTGIDQHKRTSFLTTLDRDGDIVRSSKLKNNPEAIRAYFSTLPGEHHATVETTTGWYWMNDLLEQEGVDLSLAHAKFVKAISYAKVKTDKVDAHTLAQLLRVGLIPEAHKISSDMRDVRDTLRTRLHLVEKRVSAQNSVHRVLEKFNTDSMGDLPELFRLQADLHTERVALINEQIKTIDSTLNGLLLDTDDIQRLLWIPGIGRLNAFSIYLEVDGIERFATVKNFYSYCRLVPGANNSGGKTRHRSSKEGNKYLKIAFSHAATRAIQYFPVVKKYYHRMARKKGAPIARALIAKEIAKSVYFVLQTQEPYNRVFKGMNLEREKLASWPRRASPDS

SEQ ID NO: 514608 - protein, 394 aa, unidentified
MIYAGVDIAKTDHVIGAVDERGAEMCRPMPFKNAEAGLERAVAWLEGLAGSPSDVVVGMEATGHYWMACYSFLVARGYSVAVINPMQVKAVRKLKKLDKVKNDRIDAWLIAETLRIGQYDETRLATDEVASLRSLSRYLQSLRGMAAELKTQCVCLMDAHFPEYAGIFSDMFGAGSRAVLSKSPLPFELARRRADSLARDIAEASRRGGKSAGYAAKIKAAARSSIGVRLGQEAASFQVKSLIRQIEFADSECAKVEARVRALLDEVEPLVLTIPGVSYATGAQIVSEIGDVSRFRNASALVSYAGLNSSVSQSGQFDSGGGPITKHGSPYLRRALWLAANRARQYDPGLRAFYDKKRAEGKPHRVAVTAVARKLCHIVFAVMRDQVPYDPGRE

SEQ ID NO: 514609 - protein, 375 aa, unidentified
METIYIGVDFHARQQTICYLTTESGEFVTHELKHQDKDEVRTFYAQFVGRVIVGLEASGYSPWFEQLLEELGHEVWLGDATEIRRRARWRQKNDRRDAELILDLLVHDEFPRLHRPSLESREILRMLRYRHKLVKMRTIIKNSLQALALQSGLSRRTKLFTKIGQQELRAAPMSPVMKQQQEQWLELLLVLNQRIVETTLWLKQQSLNDARIRLLRTHPGIGLLTSLGLVHTLDPISRFRNQRKVTAYAGLEPMERSSAERKRFLGISKAGSRLLRFLVIEAAHTAVKKDDDLKRFYRRLQERRGRPKAKVAVARKLLVRSFIMLRDEIDYAEFQRRAVAARLARQSSRPSVPDRLIGQPASSESQECVRSESKK

SEQ ID NO: 514610 - protein, 393 aa, unidentified
MICVGIDVAKDKHDCFILSSEGEVLADVFTIPNNAEGFDTLLQTIHRCARPEDKIKVGLEATGHYSYNILGFLLDKGLHTFVINPLHTNLYRKSLSLRKTKTDRVDARTIAAMLMSDVDLKPYTDTAYHNEELKSLTRYRFDKVRERAKLKQSVSRLVTILFPELEKLVSSLHLASVYALLIEFPGAKQVAGAHLTHLKAILSDASKGRYGRDMAVTLRDAARCSVGSVMPAKSLELQHTIRLIRELDAEIEDIETAIQSMMDEMQSPITTIPGIGVRMGAMILAEIGDFSRFDSPDKILAYAGMSPSTYQSGQLSLSGPYSHMEKRGSRYLRYALYNATKYVCLWDPAFAAYLAKKRGEGKHYNVALSHAAKKLVRLICALEKSQQSYRNAA

SEQ ID NO: 514611 - protein, 346 aa, unidentified
MTQVIRIGMDTSKQVFQLHGVDASEQPVLRKRLRRSQVEGFFCRLAPTVVGMEACGGSHHWARMLGALGHEVRLMPPQYVKAYLKRGKNDAADAEALCEAMSRPSMRFVTVKTEAEQAALMLVGVREQLVRRRTQLSNMIRGYAAEFGLVAARGLCRVEPLLARIEAHEELPAQARALFAELGAAYAAVQDRAAALDAELKVWHRQSAPSQRLAQIPGIGPVCAVTLTLKVPDPHVFASGRQFAAWLGLTPKDHSTAGRQRLGVITRAGDEAARSLLVNGATAVIQQVRRGRRQPSPWLESLLQRKEPKEAAVALANKMARIAWKLMVSGEAYNSGLAAGERRTAA

SEQ ID NO: 514612 - protein, 350 aa, unidentified
MQKIYIGVDFHARQQTICYLTTDSGELRFHQLLHQDKAAVRAFYAQFRGSVVVGLEASGYSPWFERLLEELGCEVWLGHASEIRRRARWRHKNDRRDAELILDLMLHDEFPRLYLPPLPSREVLRMLRYRQKLIKMRTMGKNSLQALALQSGLAKGPHLFTKAGLQELRRAPMSAAMQWQREQWLQLLEPLNQRLLETMLWLKQQSQADARISRLRTHPGVGLLTALCLVHSLEPVSRFSNRRKVTAYAGLDPLERSSAERQRFLGISKAGSRVLRFLLVEAAHTAIRKDAQLGQFYQRLAKRHGRPKAKVAVSRKLLIRTYIMLRDEIDYAEFQRRAVAARPVLPAHGL

SEQ ID NO: 514613 - protein, 292 aa, unidentified
MGKKLVVGVDVAKGSFAVSLFDGERFRDFSLSSSPEELLERVAPHLPEDPGEVFFIMEATGVYHFNLALFLRKKGYPVSVVNPFVVKKFAEMLQKRAKTDSVDARTLAQFGFFASPPPFVPKDEKAYLLEEIQKSIEDYQKRRTEILNHLEALRHRPFRHPELQKLYEEELQRIEKTLKDLEKEAENLAMEYAPREYELLQTIPGVGKRLAGAILGILSPLTRFESSKELSSFLGLAPQIDQSGKRKEGFRVRGGIPFCGSSSTLLPSVLLGLTGSVSSSMNVWYPRENPRK

SEQ ID NO: 514614 - protein, 318 aa, unidentified
MKKAFFCGVDVSKDKIDVCFLTSITSEKAKFETLPNNYDLIKVYFNSFKNDEILVVFEATSNYHLALQKALSDLNIRYNVTNPYKTSLFLKHLSAIKSDVNDSYGLAVYARIFKSEISPDKYNAEYLQIKSYNSTLNLLQKLNTQLKNFKQSQKLVKNSVVDEVIENLIKEIAKLQSMLQKLAFDLVKKTIPETEEIIKSNKGFGIDLALNLFPQLHFNRDKSEKQFVSFLGLSPRIFQSGSSVYKSQKINKMGSSNIRRILFMSALCAIRFNEKFKARYDRLIANGKKKMVAIVAVMCAIVRYLKSLFQFNAEIKAI

SEQ ID NO: 514615 - protein, 335 aa, unidentified
MKFNYFIGIDVSKCTLDVVLLDSQGKYIGSKTITNDTKGFRIMLRWIYKVARHSKGHNIFCLEHTGIYSFPICCFLEEQSISYSLQPGLEIKRSMGIQRGKNDQTDARIIAQYAYLHRNDIQIYQLPSKFLLKIKQLLSYRGRLVKSKVAFQVAAKELSCFTDEALHLMIINDSQDYVSQLQNSIKEIDMQIKNIILATPQLSKLYELATSVKGIGLQITANLLVYTHGFTKFKDWRKFSCYCGLAPFEYRSGSSVRGKTKVSYFGNKKLKAIIGNGVSSAIQHDKELANYYHRKLNEGKHKMLVKNAIKNKLLSRVFAVVKRGTPFVPLHQFAT

SEQ ID NO: 514616 - protein, 358 aa, unidentified
MKIIGCDFHPSYQQIATVDTETGELWEGRLEHEQGQARRFYQALGTQTVRVGMEAVGNSQWFEQMLAEMGHELWIGDAAEIRRLVVRQQKTDRRDAQHILQLLRDGRFPKLWVPTQQMRDVRQLLRHRQKLVELRTQVKNQLQHLALNQGVRRKRRLWSEQGRRVLEQLPLQGWTARRRSDLLAMLDRLDQQVGELDGAVRLEAEQRPEVRLLMTHPGVGPVVGLAYALTIGPHTRFARGKKVASYLGLIPKEHSSGGRQSLGSISKQGNTMMRTLLVEAAQTAARLDEELRRGYSRLKAKKHSAPAKVMVARKLAVRMYWMLRENKTYAELYARHPVARMQGRSGHSVVAEKDRSLE

SEQ ID NO: 514617 - protein, 412 aa, unidentified
MLFVGDDWAEDHHDIEIVDETGRRVARQRLPEGLSGVSRLHALIAAAMPAEWAELETGEAAGRVKIGVETDRGPWVAALVAAGYEVFAINPMSTARYRERHCTSGAKSDAGDAHVLAEIVRLDRAHHRPVAVDSEAGEAMKLVARSHQTMIWERTRHVLRLRSALREYFPAALTALGDLDEPDTLALLTAAPDPDRAARLSTSRIAAALQRANRRNVDARAAEIQAAMRAPALRQPPAVQAAFTVIAAGEVRLITALNREVDALGEVVAEHFGRHPDADIYASQPGLGVILGARVLAEFGDDPHCFTDAKARKNYAGTSPITRASGTKKKVIARHAKNDRLADALQQWAFGSLRGSPGARAYYDALRARRIGHQAALRQLANRHVGILHGCLKTRSLYNENTAWPDQNTAAA

SEQ ID NO: 514618 - protein, 356 aa, unidentified
MRVHKQSIGIDISKDTFTACFCLLHQDGHLQFSDVKKFKNEKSGFNQLLRWARKVKDPALQMNFLMEATGVYYENLAHHLYDIKQQVHVVLPNTSKHYFSSLNIKTKTDELDAKVLSQFGVERTHRKWVKPNEIYIHLRNLCRYYVQLQEQKTALGNIKHSKENSHQVQKLILRSNTKLIKEIDKQIVAVKVEIEKLIKQDDQLKAKVDKLLSIKGVGVLTIATIIAETLGFQFVKNIKQLASYAGYDVVQRESGTSIKGKTRISKKGNRYIRNALYFPAMVACRYNETLKKTYIRIIEKKPSKMIGQVAIQRKLLILIYTLWRKNETFDNNYRKINSSTDNCEAMQDRVIEIALP

SEQ ID NO: 514619 - protein, 395 aa, unidentified
MFIVGIDIAKRSHEAIIIAEDGQVVRKAFSFRNNCTGYNLLLEQVRKLTLVKSQIVFAMESTAHYWLALYARLLKDGYTVMVLNPIQSHSLRELYIRKAKTDARDSLIIADLVRFGRCKASNVPQDKILALRELCRSRAYLVDMAADLKRKLIALLDRIFPEYESLFDSVFSKASIAVLCKYSTPQKAKNAHLGKLTDILMESSNGHFGEWKAHQLKEAACSSFGIDDSGGVYSTLLGMFLEQILSLTAQADSLEKQISVFFQEFNNPLTSIPGVGTVLAATILSEIGDITRFSSADKLLAYAGLDPSVKQSGEFKSNQNRMSKRGSPYLRRAIWLASTVAVHRDPMFQTYYEKKISEGLHYMNVIGHVSRKMTAVIFAVLRDGQPYQPILQSAG

SEQ ID NO: 514620 - protein, 342 aa, unidentified
MAFYSGIDLSARESSVCVIDDDQSIIFEQKMANNLERIELSLRPYKKDLQIVVESSFNWYWLVDGLQSAGYKVCLAHTLGLQMIAGAKVKTDRRDAYALARLLRAGMIPKAYIYPPAERAVRDLLRRRWRVVRQRAYEYGQIRHLLLRSGYIDFDRNGVKKIDDDKLLGLFDHPFLVLQVRQQLQRIKLYDKQIEELERRILSQAKTRSDFSRLLEVPGIGEILGLAILYEVGQIERFPNVRSFSSYCRLVPGIAQSGQVSRRGRASKRGNPYLKNAFVQAAIVAASRYPQIKRYFDKQTNRGRSGKLKLVGYNIVAHKLARAVYHILKDGKSFKMEMLFGK

SEQ ID NO: 514621 - protein, 335 aa, unidentified
MHYLYYVGLDVSKETFDASLVAFEDANEMAHRKFANSRKGICSCLHWVEKRHGIRLDDVIFCAEDMGSYISEMAVCASDRTLNFNFSLISPLVIKYSMGIARGNTDRVDDRRIAEYAITHYRKIALYLPAEKELCQLRTWLILRAHLAKQRVAKLVLLEKLDYKEKFADVSIQRSMLQEEIAYAETHMKTIEREMKELIAADSNICRNYKLLTSIKGVGPITAIVMLCSTLNFTKITDHRKFACYCGLAPFEHSSGTSVRGGCHTSSMANRDIKVQLNRSALIAIRCDPQLKAYYERKVAEGKHKFSVLNAVRAKIAARCFAVVRRGTPYVALQI

SEQ ID NO: 514622 - protein, 319 aa, unidentified
MDNLSHGRVIGIDVSRDWLDVHCLPDGHRCKVPNTPAGHAAVADLARDRDAVACFESTGGQEWQLWALLETEGVTARQVPPAQVKAFAQSRGTRAKTDRIDAELIARFFAFRPEAGRSLPAEKLRLLRALTTRRAQLVEMRKRLLAQIRAHQKLGTAVMFEDVDTELKQRIDSLIKELEDRITRAIASDERLSETAGVLRSIPGIGPVASTMLIAEMPEIGTITGEQAAALTGLAPVAHDSGTLRGKRAIAGGRRALRHVMFQAALVAAHHNPSLKSFADRLRKAGKPHKVIITAVARKLVTIANTLCKSRQKWTAAKA

SEQ ID NO: 514623 - protein, 366 aa, unidentified
MEKKIAYVGIDYHLNSLSIAVMVEGEKDLYQSIRIENKHKVILKYMKKLAKDFEIRACYEASCNGYSFQRKMLQWGYHCDVIAPSLVPKKKGDRRKNDFRDARNLAQNYAHGMLSVVHPPTEYEESVRSLIRCRLAFKEDEKRVKLQINSFLLSQGLDWPKNKWTHQHRMWLANLRFDNPYLQQVLDEYLEHLQYLQIRIKNLDSQIEQIAHSDIYASSVKRLRAFKGISTLAAMILIAEITDFRRFPNPRALMAFLGLIPSEDSSGDRQKGGGITKAGNRRCRTQLVESVQHYVRKPVIGPQMAQDLAEVDAKSANLARKCMERLHKRYWALIMKGKARQVAITAIAREFVGFIWAMMQDEPVTT

SEQ ID NO: 514624 - protein, 532 aa, unidentified
MATKRNSRKSRTNGPARLGKPNGIIQPRVQKVGPQRFGVVAVDCAKARSKWMLCDFYGKVLVPPTEVEHARAQLQLATVQFKEACGRHDIRDAIVAVEMTGTYHRPIQRAFRKAGVETRLVHPFASKHYRLPAHGDNKTDDHDLEAIFRAAVNGFGLLEPVWDETYLQLQLFARHRRDLVEKRAKLQCQIRQYLERCLPGYAALFSGDDLWSRPVAVSVARRATSAEAIRQAGIPGVTRWLREETLRFHARTVEKIVAWAANAADADPLAAHLSRVWQTLYDDWRSKSEQIATLERELAGILAKTPYLLLLSLPGINVVSAGELAGEMGPIEHYAHARAVTGRAGLFPSRYQSDEVDRADGPLAHLRNARLRAAWMRVADNLIKCNPHYRGRFQLWKQRRVDSRDIRCRIANRAVRPVFQMVSGRKLYRHPSRLDRGYIMEKLLVFHREHQTPPHEIVGDLQQAARQIPKHAHLEEAGPLQTVYQRCRRSRRKGPQAIGTLLVAVLARLGVSGLESESEAQGPVANVTERST

SEQ ID NO: 514625 - protein, 436 aa, unidentified
MTLINFVAANQKYYAFNLLSVFIMVFWSVQYLLQHLLVQTQVSHQLLQPLILILQLPQTPQFRHARPGKFFLPVNGMDYFLPLRLTVRNVLTRRITMNIVFLGIDLAKNVFQLCGLNQAGKPVYTKRTGRKELLQTLANIPACLIGIEASTGAFYWQREFEKLGHKVKVISPQYVRPFVRGQKNDGNDAQAIAVALMQPTMQFVPPKSPEQQDIQALHRARQHIVNHRTATVCQIRGLLLDRGIPIGSAVSRARRAIPLILEDAENGLSSRMRRTIAELYDLFNDLGRRIHFFDKEIETVFRQSEACPRIAKVKGIGPKTATAVVAAIGKGTEFKNGRHFAAWLGLVPRQHSSGDRQVLMNMTKKGDKHLRTLFIHGARAVVRVATNNNDGHMNQWVNQLKERRGFNKTTVAVANKNARIIWSMLRNDTGYQVVCN

SEQ ID NO: 514626 - protein, 315 aa, unidentified
MFVGIDVAKAELVLAVRPSGESWTVANDDAGVRAVVQELVTRGPSLIVVEATGGYEIACVAACAAAELPVVVVNPRQVRDFAKATGQLAKTDRIDAGVLAMFADRIRPTLRPLPDPDTRALEALLTRRRQLGEMLQAERNRLSQALGRGQRPVTKSLRKHIAYLERELTIADTDLGEAIRQSPVWREQDELLQSVPGIGPTVARTLLAELPELGHLDRRAIAKLVGVAPMNRDSGTWRGRRTIHGGRASVRAVVYMAALVAARRNVVIRSFYQRLLAAGKSKKLALVACMRKLLTILNTMLRTHTRWNPEFTTTA

SEQ ID NO: 514627 - protein, 428 aa, unidentified
MRSIGLDVHRDFCEVAIVEDGEVRSAGRIATSPESIALFAGSLCPTDQVVLETTSGAIEIARLLGPHVARVVLANAADVRAIAHARVKSDRFDAATLARLLAAGMLDGVWVPDERIGALRRRIARRAALVRQRTRAKNEIHAVIMRCLLGRPPASDLFGKKGRAWLTTQQLPPAEAETVAGCLRQVDFLGTEIAAIDAKLAEFALTSPQAKRLMTIPGVDVAAACTLIAAIGDIRRFDSPRKLAAYLGLDPRVRQSGEKPARHGRISKRGNPHARHVLVEAAWQAMRTPGPLRAFGERIRARKGTQVAAVAVARKIATIAWQMLTRSEDYAFQSPSLVRKKVRNAELKSGAPRLSTRHTGTRQRVTPDERERDRELQQQAENGYRRLIADWQATGPKAGAGATPGRASSRPSTRQATRQTTEPQTSAL

SEQ ID NO: 514628 - protein, 400 aa, unidentified
MNTGTITAVGIDVSKHKSTVAARRPGGEVVLLPFDVEHTAEGLKKLITKLRELDGEIRIVMEHTGMYWRPIAMTLKEAGFYVSVVNAILIHNFSDNSIRKVKTDRADAMKIANYGLTFWSDLQEYAGEDENRQLLKIQSRLYERTATTAGMLRNGLISLLDQTFPGANKLFRDESRNSKGHVKWIDFVLRFWHKECVAALSLAAFTDTFQKWCKRTGYKFSASDAERIHAIARNAVATLPKNDSTKLLITQATNSLNAIYDSLQAIRTEMDCLASMLPEYELVMSMEGIGKVTGPQLMAEVGDVRRFSHKGALVAFAGVDASPYQPGSFDSKSRHVSKRGSPYLGMVLFVIMSMTLIRAKTANPVFCFMDKKRAEGKHFYVYTVAGSAKFLRIYYAKVKE

SEQ ID NO: 514629 - protein, 397 aa, unidentified
MYIVGIDIAKRKHEAAVIDGEGAVIIKPFSFTNNCSGYNRLLAMLAKAKLPLDEVSFAMEATGHYWLALFTRLQKEGFRVQVINPVQTNSIRSFYIRQAKTDPRDALLIAEVIRFGHFSESTLHPENIYELRELCRGRHAIVSMQADVKRKVVALLDQVFPEYETAFTNMFSDTSMAILQTCPTPKELSEMPLEELCHLIEVSSHKRFRMAKAQELQVLARNSFGFAMAGDVFSTMIRLYAKHLDFLKQQVREMDRKIAEIMDTLDTPITTITGIGPTLGAYILSEIGDINRFSSSAKLAAYAGIDPTMRQSGEYNGVRNRMSKRGSPYLRHAIWLATSSAVLHDPALKLYFQKKRDEGKPYMASVGHACRKMVSIIYAVMRDNKAYTPCIPNEIST

SEQ ID NO: 514630 - protein, 408 aa, unidentified
MEVLYPRCAGLDVHAKTVVACVRIASGATVTYEHRTVSTNTRGLLDLADWLTARAVTHVAMEATGVYWKPVWHVLEGHATLVLANAMHIKNIPGRKSDKNDATWISDLLALGLIRSSFVPPAPIQDLRDLTRTRKQLVREITRHTLRLQKTLEDANLKLTEAISDILGTSGRAILNALVAGETDPERLADLTSGRLKATRAELVEALRGRVTAHHRFILNLHLTQIAALDTAVADIEARIREALVPFRPAVSLLTTMPGVSETAAAVIVAEIGTDMSMFPSAGHLLSWAGLCPRLDESAGKRRSTRTRPGAPWLKTMMVQIAWPAARKKQSYFRAQFLRLKSRRGPKKAILAVAASMLTDVYYMLRDGVEFHDLGDQYFEQRDKARLTTRLLQRLRDLGVEVEVKNVA

SEQ ID NO: 514631 - protein, 345 aa, unidentified
MMLIGCDFHPSWQQVCWVDTETGETQQCKLVHAAGEAEKFYGQFSAPARIGMEATGNCQWFVEMLAALGHEVWIGDAAKIRASDVRQQKHDRRDAALLLRLLMEERFPRIWTPSSEQKDLRQLLIHRYKLVRLRAQAKNGLQHLAMNQGLQKKNRLWSKAGQQALRDLALQPWASRRREDLLNVLVMLDRQIESLDLAVQQAAEQNENAKLLMSQPGIGPVTSLAFVLTMGDVSRFPRGKQVASYLGLIPREYSSGGKQRFGPISKQGNRFMRMLLVEAAQVAVRCDPQLRREYLQRCYHDKPKGVAKVAAARKLAIRLYWMLHTQKRYPEIVHVESSSRVALGG

SEQ ID NO: 514632 - protein, 449 aa, unidentified
MAKKKRKYRKLERSLPVMRPNAGGIDIGATEIFVAVPADRDRESVRSFPTFTQDLHALADWLQQCRVDTVAMESTGVYWIPLFQILEARGIEVHLVNAQHVHHVPGRKSDVLDCQWLQYLHSVGLLRASFRPEHAVCEIRSLMRHRENLVQMACVHVQHMQKSLDQMNLQIHHVISDITGVTGLAIVDAIVAGNTNPKELAKLRDHRIKASIETVTKSLVGDYRREHIFTLQQSLTAYRHYQKLIADCDQEVQQRVEAFQSNDDGPTAAADSSSATSPTAPSFDLHSHLERIFGVDLTAIPGFDVLRIQTIFSELGADMSPFPTDDTFCSWLNVCPKDGTSAGRRIRAPKVKTKNRVTQAFRMAALSLHNNKSYLGDYYRSQRARHGALKATKNAAHKLARIFYHLVKTRQPYDETVFAKLEARNQKHRLHKLQTLARQMGYSLVQANA

SEQ ID NO: 514633 - protein, 354 aa, unidentified
MNDEKYIGLDVHQATIVVAVMDSTGKLVMESILATEAATILQFFAGLRGTLWVTFEEGTWSAWLYDLLKPHLDKLVVCNPRKNALLKDGNKSDRIDARKLAELLRGNQLKPVYHGETGVRMLRELSRSYLTIVKDLSRVMNRLKAVYRSWAIPCAGRDVYYRRHRAQWLDKIREAGVRRRAERLYEQLDMLQHLRQQARRDLLAESRKHAITAKLRQIPYLGPIRSALAVALIQTPHRFRTKRQLWAYSGLALETRISAEYSLVEGQVRRSKKLLSIRGLNKDHHDLKGLFKGAATMASVRPGPFQDLYQAALAKGIKPTMARLTLARKIAAITLTLWKKGENFDAEKLKSQAA

SEQ ID NO: 514634 - protein, 382 aa, unidentified
MPAYADPAPKPISADTIFLAFELSGTSWLVALHAPDADKVERHRLSAGVAAEVLGLIARTKARVTRRLGTTPRVACCYEAGRDGFWLHRVLEAEGIASHVMDPTSLQVDRRARRAKTDRLDAQALLRALMAWSRGERQVCSMVRPPSPEHEDERRLSRERGTLLKERLRLSNRIKGLCAAQGIYHYEPLGADRRERLARLVTGDGRALPGRLAAEIGRQLDCFELVLRHLAEVEAVRDARAAQAREEGGSKLATLLRLKGIGPELATVLELEVFHRHFANRRDVAAYAGLAPSPYASGGTSREQGISKAGNRRARKALIELAWLWLRHQPESALARWYRDRVGTATGRVKRIAIVALARKLLVAIWRYVETGLVPAEATVRT

SEQ ID NO: 514635 - protein, 430 aa, unidentified
MVVVGTDAHKYSHTFVATDEVGRQLGEKTVKATTAGHATAIMWAREQFGLELIWGIEDCRNMSARLERDLLAAGQQVVRVPTKLMAQTRKSARSRGKSDPIDALAVARAVLRETDLPLATHDETSRELKLLTDRRDVLVAQRTSAINRLRWLVHELDPERAPAARSLDAAKHQQALRTWLDTQPGLVAELARAELTDIIRLTGEINTLAQRISARVHQVAPALLEIPGCAELTAAKIVGEAAGVTRFKSEAAFACHAAVAPIPVWSGNTAGQMRLSRSGNRQLNAALHRIALTQIRMTDSRGQAYYQRLQDAGKTKRAALRCLKRRLARTVFQALRTVHQPSSEHTQPAAACHRSYCSSHLGEPPRLTDMTQKTRIQPLPPKRGPLRLSVGVVCAARWVCRCDRRRVAVVCSGSPGVWLTLRLPSSWGWR

SEQ ID NO: 514636 - protein, 426 aa, unidentified
MNANNDEILNDYAAFVGIDWADQQHVFGLQVAGQTKKETGSLAQKPEVIGPWVAQLRERFGGRSVAIAVEQSRGALIHALLSYDFIVIYPLHPTTVAKFREAFKSSGAKSDPLDTNQILEILTKHLDLLKPLNPDTEETRLLGRLVEDRRKAVDRRTGHIQALLASLKEYFPQAIELANGNLTSRLACDLLKKWPTFPAFQQAKPSTIKRFYYGHNIRSPKVLEKVLNLAQTAQPLTTDLAIVESGSRLSQMHAQLIQTLNPIIEGYDRRIEQVFQAHPEAHLFRQLPGAGPALAPRLLSFFGTDRSRYETAQSVHSFSGIAPVTKSSGRTRVVYFRRACPKFDRQTFHEFARLSLAKCQWARNYVHYYKAKGKKYHTIIRALAFKWIRILFRCWQDRTPYSDDTYLKALRKRGSIFATFHLEQKS

SEQ ID NO: 514637 - protein, 345 aa, unidentified
MIVLGIDIGKREFFVSLQQSQDGGVIQVLGKRGPFANTPAGHQELTAWMLKRVSGDVQVVMEATNVYWERCAHHFHALGYVVSVVNPAQIKYFARSVLRRGKTDAMDAEIIARYGLVMHPGCWVPPSTALMDLKTLTREREFVLVRRTQENNHLIALRDAHHAAAVVLTLAQQRLDLLDQQLVALDAALHELVDADVTLAQPLKLLLSVPGFAFTSAATVLAETAGFSRLETAEEISAASGMAPSPQQSGLKNGKGSISKTGNARLRRIAYLSALGASKSHSRMKTFYQGLKARGKPPKVALIALGRKLLITGLAVVKSGKPYQDDFSRAQDGSGPTPHTVVSGS

SEQ ID NO: 514638 - protein, 349 aa, unidentified
MPNYNKPHQFYAGVDLHARSMFVHVLSAKGKTVFERDLPAEPDAFLDAVKPFRKNLVVGCECMFAWYWLADLCEDKRIPFVLGHALAMKHIHGGKAKSDKIDAGKLAAMLRGGMFPLAYVYPRAKRQTRDLLRRRSFFVRQRAQLIAHIVNTNSQFNLPPLAKKLSYAANRSEEIAERFTDPSTRLMIQADLHLIDAYDAQIAELERHLLKSAKVDEPVTFGFLRTIPGIGPILGLILLYEIDRVERFPEAGNFLSYSRLVRCAHESAGKVKGFGAKKIGNGHLKWAFSEAACLMLRGCPAVKAWLQRQESKRGKRKALSVLEAKIGRTVYHLWRKQQAFDVKRFLKNG

SEQ ID NO: 514639 - protein, 317 aa, unidentified
MNFVGIDVAKDSMEVMVHESSKRWNFMNDESGLHKLIVKMKRLSPCLIVLEATGGYENTVATGLQCKGFSVAVINPRQIRDFARSIGTLAKTDILDARVIAHFAAKIQPPTRILPTEEAKRLGAILMRRRQVVTLLTAEKNRLLQANPAVRERVKNHVTWLKQELSDISKELKQMVQDDPEWKEKDKIIQSVPGVGPILSVTLLADFPELGTLNRKQIAALGGVAPFNRDSGKMRGKRTIWGGRGVVRTATYMAAFAAIRCNPLLTSFFNRLVAAGKPRKVALVACMRKLLCILNAMLKNRTRWTCYSPQLVGLCYC

SEQ ID NO: 514640 - protein, 366 aa, unidentified
MGAIYIGVDFHSRQQTICYLKTETGELVITELKHQDKEQVCAFYQQFQGQVIIGLEASGYSFWFEALLERLGCEVWLGDATEIRRRARWRQKSDRRDAELIWDLMVHDEFPRLHQPAAESREVLRMLRYRQKLIKLRTMSKNSLQAIALQAGLAKGKQLFTRVGQEQFQALPMSPVLQWQRDHWFELLKPLNQQLLETMVWCKAQSKDDVNIQRLRTHPGLGLLTSLCLQHTLQPISRFRNQRKVVAYAGLDPVVRSSAERALHLGISKGGSRMLRYLLVEAAHTAIRYDEDLKRFYQRLVERRGRPKAKVATARKLLIRAYIMMRDEIDYAEFRRRAVAARLARTGQGPTTVPVVLIGQSASPGA

SEQ ID NO: 514641 - protein, 340 aa, unidentified
METKTLLVGIDVSKLTLDIAITLDGKTVEANLKIPNSQAGFKVLASWMKKHARLQECDEIHCCIESTGIYSDAIVDYLQELGGLKVSFINPVQAKAYGRTVLLRTKTDKVDAGLLARYVAAVKPEVTLPIPMEIKELRSLIRHLDYLITRRAQEKGHLESTTDKVVINSVKDILKHYDKQIKKLEKLINDYLDKRPDLKKKVELLKTIPGIGETTARILLCELHVENNGEKITAKVQIAHAGLAPAQKQSGQSVRGKSMICKTGNARLRRCLYFPAIVASKFNPVITVFYQRLLARGKHKKVAIVAVMRKLLSVAIGVLNNKVAFDPEWSVKTVKQVKCA

SEQ ID NO: 514642 - protein, 310 aa, unidentified
MTIICGVDVCQAWLDAWLEPAGHRRFANSAEGVVELAAWCGVHGVELVVMEASGGIEQDAFLALWKRGQACAIANPRSVRKFAEAMGFLEKTDRIDAMMIAGYAEARRMVPTPPPSAEQQKLTALAARLRQVTTDLGVQKRRLHSAREPATRASLKEAIAFFTAQAKTLVAEIAALIDVDPLWTALDRTFRSVKGVADRTTAYLLADLPEIGTISNRAVTKLAGLAPLPDDSGKRQGQRSIRGGRASVRSILFLVADVARKYDPSLADFRERLLAKGLSKMQVRIALARKLLVRLNAKARDTRAMLANAV

SEQ ID NO: 514643 - protein, 399 aa, unidentified
MISVGIDISKGKSTVCMVKPYGEVICLPFEMEHTDKGLSELSSMLLKFNEEVKVVIEATGIYHLPVLSFLQERELFVAVVNPFEMKQYRSRGLRSVKTDKRDSIAIANYGIDCWFRLKNYEVAESIYQELKILGRQYSHYMRMRIESVQSLTHLLDYTMPGIKNLLKGWQDSSGKDKLSDFVEVYWHFDNITRLTEEDFIAGYAAWAKEKGYHQSQNKAVKIYSLAHDGIPTLPAEMESTQIMIQQSVNVLKQVNTTLKTILTRMKELAKKLPEYPVVRAMGGVGDVLAPKLIAEIGDVRRFHSGKALIAYAGIDAPPYQSGQFTGTNRKISKRGSSTLRKIGYEVMRVLKTHSAPEDSSVYYYILKKESEGKSKKLAKIAGLNKFLRIYYARVKEVYQ

SEQ ID NO: 514644 - protein, 389 aa, unidentified
MKIFVGIDIAKLNHFAATISSDDEILIEPFKFTNDADGFQLLVSKLESFDKNSLIIGLESTAHYGDNLVRYLVTELYQVCVLNPIKTCQMRKNNVRKTKTDKVDTYVIAKTLMIQDNLRFVSFFDLDMMDLKALGRFRQKTIKQRTRLKIQLTTYVDQVFPEIQYFFKSGLHQHAVYALLKEAPSPKEIASMHMTHLANLLKVNSHGHFTKEQAKELRVLAQKSVGANDSAISIQITQTIQQIELLDSQLEKIEAEMTDIMKFNDSVIMTIPGIGYINGGMILGEIGDIHRFSNPNKLLAFAGLDPSVYQSGNFQAKTTRMSKRGSRVLRYALVNAAWNVVRNNATFKAYYDAKRAEGRSHYNALGHCSGKLVRVIWKMLTDNVEFNLK

SEQ ID NO: 514645 - protein, 327 aa, unidentified
MTFYCGIDLHSKRSHVCVIDRDGKKVKEENLNNDLSLILEFVEPYGKDVHIAIESTINWYWIVDGLMEAGYDVRLAHTLGLYMITGAKVKTDRRDAFKLAKLLRMGEIPEAYIYPRGKRPLRDLLRRRAGLIHQRASCYSSLRVQFIRYNLNTMSGSDLKGLLPDDIDTMPIPQELKDYCVMLLQRVDLLSSQIHDIDLYLKGVTIEDPRFKILLTLPGVMYALGLTIYYEIGDISRFSSVREFASYCRLVPGISQSSDKVKRGKGSKQGNHYLKWAFTQAANLAARYYPKLRKFRDRHANRRKGNAATMIANCYWLIRLQLLPFIC

SEQ ID NO: 514646 - protein, 352 aa, unidentified
MTIMSEHVEVVYGVDSHRDTCHIAVVNATGGVVEDFEITTDAAGYDRAVELAGAGPQRRVWAVEGCGSYAAGLVRVLQAAGERIVEVERPKRHRDNTPAKSDRLDAIRAAREVLSRDHTELASPRLSAHHDRLSVLVMARRAAVDAAGDATRQLHAAILVAPDELRDRFRALSTSRKIKLAANLRPDNYRDPVCADTARALRSIAHRIQTNQHETYELTTHIRTIVNQWRPDLLDNRGVGPIVAAVVLCAWAHPNRFRSDAAFKMFAGTAPITASSGLTHRHRLNPAGDRQLNRHIDTIVLCRLRTDPATRAYRNRKRAEGKTNREIRRCLRSYITRQLFRQLQHPPTPTTG

SEQ ID NO: 514647 - protein, 303 aa, unidentified
MFGIGIDVSGENLDVAVHEQAFRQFKNNKRGWASLIRWLQRWPAKQVVLEASGGYEQKALDALHEAGLPMVRINPGRGRSFASATGKQAKTDRIDAMVLAHMADVLKLTRYVPPAAWQRRLGELCQRRRHLVQMRVSEHQRMRAFSEPSLISMLNQHLREIQKTIKQLDTTIAALLAEQEGWRDFAKLKGAGPVLMATLACELPELGRLSGKAIAALVGVAPMNRESGNWKGRRSITGGRAVVREALYMAALTAKRYEPRLKEFFESLVNQGKPGKVALVAVMRKMLVILNARKRDAEAQMAS

SEQ ID NO: 514648 - protein, 331 aa, unidentified
MKNYFIGIDVSKKTLDVALHSLEGKLNCNHIVIENNAKGFKNLLSWLKKMKINHQDVLICMEHTGIYANKVVDFLETKNIAYSLQSALHVKKSLGLVRGKSDKVDAFRLAEFCYEKRDTIKESQKPSKNIIVLKNLFTERRKLVGSQAEYKQIRSEIANYQGKEFLKRKNRIIKHFQREIDEIEEEIMEIIKSDPEIYCNFLLITSIIGIGMVNAVGTIVYTNNFKNFSDPRAYACYVGVAPFPHSSGTSINKRKSVSKMGRLQLKADLSQAVRSAILYDPQMKAYFKRKFNGKKGAESNYGTVLNAVKFKLICRIFAVVRRQSAYIKFAF

SEQ ID NO: 514649 - protein, 408 aa, unidentified
MQVVHERCCGLDVHKRTVAACVIAPEGRETRTFSTMTKGLEELAVWLAEHGVTHVAMESTGVYWKPVYNLLEDDFTVMVVNAHHIKTVPGRKTDVKDAEWIAELLRHGLIRASFIPPRWHRELRELVRYRRRLIQERARVVNRIQKVLEGANIKLGVVASDVVGSSGLAMLRAMVAGVEDPKALAGLAKGKLREKRSALEEALRGRMGDHQRMMLQSQLRHLDFLGQEITRLDEQVRQRMDRFEQAIERIDEIPGMGRRGIEQVLAEIGVDMSCFPSAKHLASWARICPGNHESGGKRRNTRTGHANPWLVSALVQAAWAASRCRNTYLSAQYHRIAARRGKKRAIVAVAHTILVTIYHMLRTGSTYHDLGANYFDERRRSSIMRRSVRRLERLGYQVNVELAQPAFS

SEQ ID NO: 514650 - protein, 351 aa, unidentified
MPRKTDTAVVRTIGIDTGKNTLHMVGLDERGAIVLREKVSRHRIAARLVNVSPCLIGIEAGMATHYVARELSALGHDVRQVPPTYAKPFRQGHKNDFRDAHAVAEAVQRPSTRCVPIKTDDQLDLQALHRVRSRLIGGRTAVINQLRAFLLEHSIAVRQGHRFLRQQLPQILATRTDVLSPRMVRIAADLVGDWDYLDERIERVTDEIESLAQTDVSCGQLMTAPGIGPIIASATVAAIGNGAAFAKGRDFAAWLGLVPKQMSTGDRTILGRITKRGNRYLRMLFIQGARAILLRPASWAKHSFGPWLTAAARRLHHNVLTVALANKLARIALTILMERRNYEPRITPAAA

SEQ ID NO: 514651 - protein, 457 aa, unidentified
MNRKRSKPKIDRTMPTVHPNAAAIDVGATMHMAAVRADRTPEPVRSFGTFTTDLHRLVNWFKECGVETVVMESTSVYWIPIFELLDAHGFTVFLVNARDAKHVPGRKTDVSDAQWLQRLHSYGLLRASFRPKGQIAELRAYVRQRERLLEYAASHIQHMQKALTEMNLQLHHVVADITGATGMRIIRAILAGERNPKVLARLRDYRCHASAETIEKALTGSYRSEHLFALQQALALYDAYHEKVSACDVRIEAVLKELSIGRGRRSDSMPSSRRRTDQANGLAFDVRAALFALLGKDITQIDGLGPYLSLKLIAECGDDLSAWPSAKHFTSWLCLAPSNKISGGKVLSSRTRRCGSRAATLLRLAAVTVGRTDTALGAFYRRLSARIGKAKAVTATARKIAVLFYNAVRHGMEYVDPGASFYETRYRTRVVNNLHRRAKAFGFVLQPLEPKAGAVVS

SEQ ID NO: 514652 - protein, 344 aa, unidentified
MKDTNILAIDLAKNVFQVCKRDPKGKILFNRELSRAKLKELLAKQPRSVVAMEACGSAQYWARLARALGHEVKVISARTVKPFQTKQKTDRNDALAIAIAASQEHIHGARVQSAEEQALQSLERARHLAKTHQIAQSNQIRGLLGEFGIIVPPSLSQLRKHIPFILEDAENSLPQSFRETLNYLWQHLLQQIEHVAILERQLEDAVKYDTTCQKLMKLEGVGPIGALGLAVRLGQGENFTNGREASANIGLTPKQHSSGGKERIGHISKRNADKRLRSTLFQGAPSVITQVSKRPARTSKERWLQALVERRGKKIAAVALANKTVRTAYAILKNDTEYQPISLV

SEQ ID NO: 514653 - protein, 350 aa, unidentified
MWIIGCDYHPSMQEVALVETETGEYDERQLNHSDGEAEKFYRDLKQRGVNVRVGMEATGHARWFERLMAELGFELWIGNPAEIKAARVRKQKRDREDARLLLRMLRENRFPRVWVPNPENRDVRQLLWHRHRLVQMRTRVMNQLQAIAMSEGVRLRKKLWSGTGRAKLESLQLAPWAAHRRKDLLELLDRITPKIEELNVAVEEEALKRPEVRRLMTHPGVGPVTGLAFVLIIGTPERFRCGKQVGSYLGLIPCEDSSGGRQRLGHISKQGNSLLRFLLVEAAHTAARDDAEWRRRYLHLAMRREKRIAKVALARRLGVRLFWMWRRGWDYQQVLESSVRTRGSSRASMV

SEQ ID NO: 514654 - protein, 362 aa, unidentified
MRKTTTGASGQTIGLDLGDRWSQICMLDEEGRILDETRVATRPAALRAWFGKQPQSRVALEVGTHSPWVSRLLEVCGHEVLTANARKLRFIFDNDSKSDRADARLLARVARLDPQLLSPIHHRSEQAQADRSVLRSRDELVRCRASLIGHVRGMVKSTGMRLPSSSTPGFVKRVSSEIPASLQPALHPILKAIEALTEQIRALERRVLELENKYPATGALQQVSGVGSITSLNYVLTIEDPHRFRRSRALGSYIGLRPRRDQSGARDPQLHITKAGDPLLRRHLVQSAQYILGPFGPDSDLRRKGLEIAARGGKASKKRAVVAVARQLAVLLHHLWVTGEVYEPLHNTMRRGAVQTVEAAHS

SEQ ID NO: 514655 - protein, 303 aa, unidentified
MNIVYLGIDLAKNVFQLCGLNQAGKPVYSKRTGRKGLLQTVANISACLTGVEASTGAFYWQREFEKLGHKVKVISPQYVKPFGRGQKKDGNDAQVIAVALMQPTMQFVPPKSPEQQDIQALHRARQRIVNHRTATVCQFRGLLLDRGITIGAAVSGVRRAVPLIPEDAENGLSARMRRTIAELYDLFNDLAHRINFFDKEIDAVFRQSEACQRIAKVKGIGPKTATAVVAATGKGTEFKNGRHFAAWLGLVPRQHSRGDRQVLMNMTKKGDKHLRTLLFMVPALSSGLPRIAMMAVCISGLIS

SEQ ID NO: 514656 - protein, 443 aa, unidentified
MDVLVERPGALDVHKESVTACVRVPREGVRVQEVREFKTTVRGLLALHDWLAELGVTRVAMEATGVYWKPVWAILEADFELLLCNAAHVKNVPGRKTDVGDSQWLCRLLECGLLRASFVPPKPVRELRELTRRRKTLVRDRQREAGRLHKTLEDTGIKLDCVATDILGVSGRLMLEALIGGERDPAALAGLAKGRLRVKHSALIEAFEGVRFGPQNALLIGGILRHIDFLDAEIEALSTSIETHIAAHSEPARDADQAGADAGTVRPFELATQLMCSLPGIQHRTAQTLIGEFGIDMSRFPSDKHFVSWAAQCPGNHESAGKRRSGRTRKGPQHLNTALNDAAMGAIRVKDGHFARKYRRVKARSCHGVALGAVKHSLLIAIYHMLTTGELYRPPTPNPEAEQRQRERTTRRLVAQLEKLGNVVTLQTATPTATATAQAAVSP

SEQ ID NO: 514657 - protein, 354 aa, unidentified
MIIIGVDFHPEFQQMASVDIDTGDFQEKRLAHREDAEKFYRALAAARQKVRVGMEASGHARWFERLLAELQFELWIGDAAEIRTKRVRKQQTDRQDAQLILQLLLEERFPRIWVPSWENRDLRQLLWHRHRMVQARTRIMNQLQAVALNEGLRCKKRLWRERGRQQLESFRLAPWAGRRRRDLLELLDRLNPTIAELTQAIEQEAEKCPPAQRLRTHPGVGALTALAFVLILGEADRFHCGKQVASYLGLVPLEDSSGNRRRLGHITKQGSSMLRFLLVEAAQVTVRSLPEWRSKYFHLAMRRGRKIAKVAMARKLAVCLYWMWRKGWDYEQLTKFGSHAGQPGNRHGVQSNTE

SEQ ID NO: 514658 - protein, 366 aa, unidentified
MEVTTIGIDLAKSVFAVSGADSRGRVVIRRQLRRAQVLGFMRGLPRCVVGMEATGGAQYWARQFNALGHEVRLMSPALVMPYRKGNKTDRNDADAILEAVSRPSMRFVMVKSVAQQDLLALHRVRAQLVKSRTALCNQLRGLLRERGVVVRTGAAALKRSLPAALADDSSELSGEMGELLYEISQWLRSLEQCIASCEARITRKFKHDERCVRLAEVPGVGPLTATALVAAVGNAQRFKNGRELSAYLGLVPRQHSSGGKTVLLGITKRGDRYLRTLLIHGARSALRQCKLEGDARSRWVARISAARGPNVAAVAMANKNARILWALLSRGDRYRSSRVLTRAVLRPGSPPPVERARGAKLRVAKD

SEQ ID NO: 514659 - protein, 375 aa, unidentified
MAKNTRFVGLDVHAETIAVAVAEGRGKVRALGTIPNRPEAVRRLLGKVGKPGELRVCYEAGPTGYALYWQLTAMGIACEVIAPSLAPSKPGDRVKTDRRDAERLASSYQAGTLTVVWVPDPKHEALRDLVRAREAAKQDLKRAKHRLGKYLLRYGQRPGNGAKAWTAVWWQWVRKLELPHAEQNTTLLELILEVDHQSQRVARHDGAIDRAVASAPEHLRAIVSALQALRGVAQETAVTVALEFGSFSRFERAPQAMSYTGLVASEYTSGSKRRQGAITKTGNSHLRRALVEAAWHYRHRPRLNQRQKQLQGELPPKVAEIAWAAQERLHRRYWALSNKSKPSPKVIAALARELVGFVWAIGKETEQALAAKRAA

SEQ ID NO: 514660 - protein, 349 aa, unidentified
MNPITLVGIDLGKNTFHVHAQDRHGKMVLRKKLGRAALLHWLMSLPPCTVAMEACGGAHYLARQLRSHGHTPRLIAAQFVRPFVKSNKNDFIDAEAICEAASRDSMRFVTPHTETQQVLNALHRVRETLVADRVRAVNQIHAFLLEYGISLPRGDKALTTLAATVESHSQLALGMDEIVMGQLARLRGFEAELAALDRKLAVLLAGDELGQRLQSIPGIGPITASLLCARMGDGSQYTSARAFAASLGLVPAQHSTGGRSTLLGISKRGDPHLRSLLVQCARSWLQRLARYQGPLADWVRALMQRRHGNTVACALANKLARIAWAVAVKRTPFRVDMASTVRTASMATA

SEQ ID NO: 514661 - protein, 315 aa, unidentified
MTSFVARSVGIDISKDHLDVAVHPEGQARRFTNDRKGHTELLRWLEPLGATRIVFEATGPYHRTLERRLSEAAVPFAKVNPRQARRFAEAIGRLAKTDRVDAAMLARFAALIEPQTRPMVSQTIQQLAELVAARRALIKDRTATTNRAKVLRIALLKRQAGQRLNQIAKQVEDLDRHALALIGADPVLQNRLDILTSIPGIGEATAIALMADMPELGQMDEKQAGSLAGLAPVARESGTWRGKSFIRGGRAHLRQALYMPALVAMRFNPDLKAKFEAMTAAGKPAKVAITALMRKLVVLANALLRRNRKWTKSIA

SEQ ID NO: 514662 - protein, 340 aa, unidentified
MQITTKFYLGIDVSKHWFDLSLLTVINHQKQIMVTERFDNSEKGIKEMEQWLKKQNVSFNDNTLLVIENTGIYHRLIWEFCSTHKLPIHIGNAAHIKWSFGIARGKNDVIDSQRLCNYAHKHADELKATPELNPVFIELRDMMTSRSKLVSQSGSIRSHLKELKLSNNKATQKLIEQVHKPVLDGLKKSIALIEKQILNIIHKDDTIKTNYDLLITVPGIGHLTAVYILCCTNNFIDKISGKQLACYAGLVPFQDKSGSSIKGRNKVHKMANKELKKMLHLCALSAVKCYPEFKQYYERKKKEGKHVMSVLNAIRNKIVLRAVAVVNNQKPYVENYRKAV

SEQ ID NO: 514663 - protein, 329 aa, unidentified
MKVQHIIGADLSKRSIDLVYHLSKAYIKIDNSINGFNDLMQWLQKLNINTSETMIVMEHTGLYSYCFESFLHQHQIAFCKVNALEIKRSIGLVRGKTDKLDAARIAEYGYEKRDRLTVDQPVSNGLKRLQVLHSTYQRLVRHRAALINALKEYKHIGITEKDLVIQTQRQLIKNFDKHIQKLMSEIEMVINQQPALKQNFLLLQSIKGVGKILALTVIIKTHNFTRFINARKFACFCGTAPFDHSSGTSIRMKPRVSHLADKQMKTLLDLSAKSAIQYDKELKEYYLKRTQNGKSKMSTINVVRNKILYRMFAVVKRQTPFTENHSQAA

SEQ ID NO: 514664 - protein, 333 aa, unidentified
MGRFWVGIDVAKRKLDVALLDEAGKVKSKVLANDPAGFAALMTWLKERGAEAASSHLCLESTGIYSEGCATFFADAGWKVSVVNPSLPKDFGKSELKRNKTDAIDAGLLARYCLKMEPPAWQPPPLEYRKLRSLVDRRQALQDMHQQEANRLESTVETSARTSIAEHLSWLESRIAELNRDIDDHIDGHKQTLGKDAQLLASIPGLGRTTAAKVLGLLGDLRRFDNGKALAAFIGVTPQRQESGDSVRGRSSISKAGHASVRHALFMPTLVATRHNPKIKAFRDRLVAAGKPKKSAVLASMHKLVHIMYAVVRKGVEFNPRFGQLALDVQDGI

SEQ ID NO: 514665 - protein, 322 aa, unidentified
MSQPNPLCVGIDVSKATLDIAASSDIAQFTVSNDSDGFDAIITGLRRHSVALVLMEATGGLEVAVACSLQAEGFEVAVVNPRQARDFARAMGYLAKTDRIDARVLAQMAEVINHHPERKRFIRALPDAERQALAAMVVRRRQLIAMLVAERNRLHPSHPQNKKSINTIIKALEDELVRLEKEMDSHIRNHFKEITERLSSIKGVGTMTVSALLAEIPELGTLSRREISALIGVAPVNRDSGTMRGRRTIFGGRAGVRSALYMAALVATRFNPVIKTFYVRLLAAGKAKKVALVACMRKLLTILNAMLRKNEEWDESYHHVTP

SEQ ID NO: 514666 - protein, 350 aa, unidentified
MTSMTSTRRVVTVGVDTHSDTHHAAVIDEVGRPLADAGFPATPAGYRQLLTWAGGHGEIAAVGVEGTGAYGAGLARHIRAAGQTVIEVDRPDRKTRRQLGKSDPIDAYAAAAAVLSGTASGIPKTRDGLVEAIRTLRVARRSAIKARTQAINQLKAVLLTGPAQLRQAMAGQTTRELVGNCRRFRIDRRPADAADPVIAAAKITLRRLARRIAALTEEIDELDAELRPLVSQAAPTLMAVYGVGTEVAAQLLTTAGDNPDRLRSEAAFAQLCGTAPLPASSGRTTRHRLNRGGDRHANYALHVIALVRLSSHPPTKAYAARRRTEGLSNLEILRCLKRYIAREIHHALVT

SEQ ID NO: 514667 - protein, 329 aa, unidentified
MEGEVIAVGIDVSKKKLDVAVLFPDGRFRSKVVSNSVGGFEELRLWLGKQGVERAHVCMEATGIYWEGVAEYFFDRGFVVSVVNPFQVKAFGGSRLARAKTDRVDARLIAEFCATQRPEPWSAPAVEVRELRALVLRREALVRMRSQEENRLCVARGCVRGNIEAHIEHLDRSIREVEKEIKRHIDRYPHLRKQRDLLRSIPSFGDVSVWTVLAFFGGEDMRFRKPRQAVAFVGLDPREHTSGTTVRRKARLSKVGHCVVRRVLYFPAVTALNRTDWGIAFRRRLEGAGKPPKVIIAAMMRKLVHIAIGVLKSAQPFNPAFHYQGAHSP

SEQ ID NO: 514668 - protein, 409 aa, unidentified
MNLYLGIDVGKNKLDFCALDSDQRCCFQGETTNDLNGAIKIKQTVLTETQTHHYEKITAGMEATSVYNFHPMTFLAEDSELQALGLSVITINPYTSHHFSQLFNDGKTDAIDAKQLADLLRVEPLGTPVARQENYVALQRLTRERYHLVKQMTDSKNHFLNNLYYRCNTLERELPTSVFGSAMMTLITDEELTLDEAAALPLDELVTHLQQLAHGKFGDAEAVAKAIKKATRSSYRLSKVVTDSVDEILAVYANEIRMLKKQIQVLDKTITQISTQNTDINCLTSVPGIGPVYAAGIVAEIGQIEHFPDESHIAKYAGLAWLPHESGTSVRQATPRTRKGNQYLRYYLVEAANSIRRYDITYQRYYHKKYEEVPKYRHRRAIVLTARKLVRLVEVLLRNHQFYIPPKVV

SEQ ID NO: 514669 - protein, 446 aa, unidentified
MRRSKWKSDGVEFRRVNANAAGIDLGARTHYVALPQDREVSVRQFGCFTEDLRAMAQWLKANGIETVAMESTSVYWVPVFQMLESQGLDVHLVSTRHLKAVPGRKTDVADCQWIQHLHECGLLRGSFRPADAVCVVRAYVRHRDTLGEESARHVQRMQKALEQMNLQLHKVVDDITGETGMAIIDAVLNGERDGKKLATLRNPHCRRSEDEIARALVGDFREELLFCLRQELAGYRFVQEQMSRCDAEILARLQAFEAKAQAKDLPKAKNKKIEGSEIRRALFCAAGVDLSLVPGLGETNLPTLIAEVGFDLAKFPSEKAFASWTALAPKNFITGGKRKRTPQSAASRVGQVFRMAAQAVGRTRTALGAFYRRMQARKGGAFAVAVTAHKIAKLFYRLLKNGETYVERGVAYYEDRYKSHRVAAALNILKRHGLHATLREIPNAVP

SEQ ID NO: 514670 - protein, 349 aa, unidentified
MAETAICVVDLKGEVRLEATVATEPDLIAQTLAPWRATLRRAGHEAGALSPWLQPALKDLGVPATCLETRHVRAALSAQRNKTDATDALGLAHLMRTGWYRTAHVKTEAAYRLRLLLIQRRNLKRKFLDLENSIRHSLKSFGVKLAKVGRGAFDKAVRDACADDPMTAQLMDCMLIARAALWTQYLKLHALTVRVVAQDEVCRRFMAIPGVGPIAALTFRTAVGDPMRFKRSRDVGAYFGLTSKRWQSGTSIDIQGRISKAGDPDVRRALYEAASAMLTRYKGRSALKTWGETIAKRCHKKAVVAVARKLAVIMHAMWRDGTVYTDAAETGVADGGATAKERKLLGAYA

SEQ ID NO: 514671 - protein, 402 aa, unidentified
MNAVGIDVSKGKSMVAIMRPFGEIVSAPFEIKHTASDIHSLVELINSVEGESRIVMEHTGRYYEVLAHQLSKANLFVSAINPKLIKDFDNDSLRKVKSDKADSVKIARYALDKWQNLKQYNVMDELRNQLKTMNRQFGFYMKHKTAMKNNLIGILDQTYPGINTYFDSPARSDGSQKWVDFASTYWHVDCVRKMSLNAFIDHYQNWCKRKKYNFSQSKAEEIYGKAKELVPVLPKDDITKLIIKQAVNQLNNASTTVESLRTLMNETASKLPEYPIVMAMKGVGASLGPQLMAEIGDVSRFTHKGAITAFAGVDPGVNESGSYEQKSVPTSKRGSSDLRKTLFQVMDVLIKTHPQDDPVYQFLDKKRAQGKPYYVYMTAGANKFLRIYYGRVKEYLSSLPES

SEQ ID NO: 514672 - protein, 339 aa, unidentified
MRIVPVFVGLDYHQSGVQVCVMDGKGNVLLNRKVDNRTGKIAKAIRRVGQPAGVAIEACCGAADLADRLHQQTGWSISLAHTGFVARMKQNPDKTDYGDARLLADLLRVGYLPKVWLAPADIRRLRRLVRYRQQRVNHRRDAKLRIRALLRENRLRCPLEVSAWSRPWMRWLRTVQELGAEDRWLLDQHLEDLELFGKQIEEVEKLLTARAEEDAVIRKLLSFHGIGLVTAVTMRAEIGRFDRFRSGKQLARFCGLSPRNVSSGERQADAGLIKAGNPQLRAVLIQFGQRLASRTTGRWAGLVARLLKHGKPRNVVVAAVTNRYLRWLYHQMQPEQLAA

SEQ ID NO: 514673 - protein, 323 aa, unidentified
MAKRITICAGIDTGKRKLDVALEGSSERIEVENTPEGHMELVGWLRLGKVKRVGIEASGGYEQAVVSELRRKRFVVVVFQPAQVRAYAKFHLQRAKNDKIDAALIAACTAAAKKIHPAPDPRLLPFAQHLTMIEQIGEDIAKLKNRLESCRNERIQKLWKEQIALLARHRRGEFKALLAAIREHRDLAARLDLIYSVGGSGLPTAVSILVRMPEIGQITREQAAALAGLAPYDDDSGDHVGVRHIEGGRERLRRALYTAALPASFRWNPQLMALYNRLIAAGKGHKRALIACARKLLVIINAVVARGTPWLAEPPKIASAPAT

SEQ ID NO: 514674 - protein, 403 aa, unidentified
MSQNGSVAAERRRGATTDGRVPMPIYCTYFGIDSHLRTTTICALTPEDGELRTRTFRGNDYGEMAEWMAGFPQPSHGVYESGCTGFVPARMLTRGDTLVEPVASSKLPSSADSRSRKNDRRDAERLARLALAGEVSPVWVPPEQAGGLRELAQATGDLACVREAARQRVNAILCRHGMSWDERTPTGRPEKRRCQHLRDWLRSVGLGDAGSQAAYLAALSAAESAEVACDEPGARAEGIAKASDPGPPVDALMCVKGVGFSSALAFAAEVGDFSRFASGRRAASYFGLAPSGGPGAEGRGLGRVPGNGCALVRRPLIEGAWVLARGNPACRKRGRTPVPLAIREHARACSGRLLGRRRGLIARGPVPREANTATAAEMARMLPHIGRDAQEAAVLATEVARAA

SEQ ID NO: 514675 - protein, 405 aa, unidentified
MTVYIGIDWSEKKHDICYMHANGEVLRYLQILHSMDGFVALDKAREELGVEATDCVVGLETAHNPLVDYLWDQGYLRIIVLPPKVVKSSQGRYRQSGARDDPWDARLIADILRTDQKRYTVWQPDRPLTRQIRTAVRMLSHLNKELVRNSNRLRAVLLRYYPAVLELFARLDAPVTLAFVQAYPTPQAAANLSYDDFVSFLRQHHHTQPKKWVQSYNQLHKPVAYTPADVVAAYSPQAVTLASILAVLVESKGCWLKQLTRLYENHPDRAIYASLPAAGTFLEPALLAKLGDDRNRFPTPKVLQAVAGTCPVTQRSGKRKVIYFRWACDHEFRHIVHQWAKLSLDVSPWAEAYYRSVLPHCRTSNDAIRRLANRWLEILWRLWQDGKPYDQVYHMKQHTARCTAR

SEQ ID NO: 514676 - protein, 403 aa, unidentified
MTVRPVVWVGIDVGKTSHHACAVDETGKVLWNQKVANEQRAIEQLIARAHKGADEARWAIDLTSPMALMLITVLPGAEQSVVYVPGHVVNTMTGAFRGEGKTDAKDARGIAETARMRSDLSEVAMPDELVVELAQLSGYRTDVMADWVRGVNRLRSLLGSIFPGLEAAFDHSNRTPLILVAHLCTPAEIRAAGITGVTAYLGDNGGWPTAIAKTAATAVAAAKQQPLALPGEAGTAALVKRLAGKLLDLDHEIKDIDKTITERFRDHPYAHIIESLPGFGPGLGAEFVVVTGGDLASFATAGRLASYAGLVPVPRDSGRISGNLHRPKRYNRRLRRVFYMAALSSIRGDGPSRQFYDRKRGERLIHSQALLALARRLVDVLWALLRDGRELTPDKPTPATAAA

SEQ ID NO: 514677 - protein, 404 aa, unidentified
MIFVGDDWSEDHHDVCLMDQAGKRLASRRLPEGLTGIRQLHELIAEHAEEPDQVVIGIETDRGLWAGALAAAGYQVFAVNPLAVARYRDRHHVSGGKSDASDAKLLADLVRTDRHNHRPIAGDSLDAEAIKVLARAHQSLIWARTRHTNAMRSALREYYPAALLAFEDLAHGDALGVLGRAPTPEQGAHLDLPAIQSALKRGGRKRNIAARARQIRAALRSEQLAAPAPVAAAFGATTRAAVGIIVELNRQIAELEAELATHFEAHPDADIYRSLPGLGVILGARVLGEFGDDPNRYTSAKSRRNYAGTSPLTVASGKKRAVLARHVRNRRLYDAIDHWALCALTSSPGARAYYDHHRAAGDVHHQALRALGNRLVGILHGCLRHHTTYSEHTAWAHRQITHAA

SEQ ID NO: 514678 - protein, 320 aa, unidentified
MRNAVGLDISKTTFDATAIIGGIEKSAKFDNDSKGFEQFKDWLEKLNCPDAHICMEATGNYYEGIADYIGSLYKVSVVNPLKISKYAESRFARTKTDKQDAKLIAEYCQTAKAQDLVIRKPIIDDGYKLKRLSALYAQLTADSTAQKNRLEAAKDTFVVKICQSNIRHLQKQIKAVKKELEKLTKQPALKAQTDRLATIPAIGRLTAVMLLNYLSGADFQTSNKFAAFAGLTPQIKDSGTSVRGKPSLTKYGNRRLRAMLFMPAMVAYRIKAFPAFIARLEAKNKPKKVILSAIMRKLAVIAYHVHKKGENYDPTRYRAA

SEQ ID NO: 514679 - protein, 338 aa, unidentified
MNYTIVGADIAKNVMQLHWVDPETGEIINKPIKRAAFLEHFANRAPCLIGMEACGGAQHWARRLMEMGHQVKLIPAKFAKAFNIRNKNDAADARAIWIATQMPGKSVAVKTEAQQAVLALHRIRQQKIKFRTMQMNCLRGLLTEYGEVMGKSRAALDKAIPGVLERLAGRLPAMLIESLREQWNDLQDLDRQIAEIERRLQAWLKDDEACRKIAAIPGVGLLTATAAVATMGDPKAFRSGREFAAWLGLVPKQVGTGGKTVLLGISKRGDTYLRTLLVHGARSVLSHSREPGAWIEQLTQRRHRNVAIVAIANKMARTIWAVLAHGKSYEKGYVSKTA

SEQ ID NO: 514680 - protein, 407 aa, unidentified
MSYEPHNIVGIDVSKGKSTIAVMRPFGEVVISPFEVTHTSSDLKVLADTLNKLDGETRVVMEYTGKYYQPIARYLYESGLYVSVVHAKIIHDFANNSIRRIKTDKADAVKIANYGLSNWDVLPSYTKEDDTRLVLKTLNRQYNHLMNQYVVARNVLISIADQTCPGLNEVFTNPRKADGRIKWAEVYRRFWHCEYITGFSRNKFISLYNNWCVKNGFRGSDEKASELYLLAKECVPTLPKTEYTKKIVEQAASELISLSDAMASVHREMLSIAKTLPEYPAVLSINGIGETLGPQLMAEIGDVRRFSKRSNITAFAGVDAPPFQSGKFDSKSRRISKRGSCELRKQLFQVVRIIVQLNLYDDPVYQFVMRKKAEGKPYYVYMVAGCNKLLRIYYARVKEYLAAENAN

SEQ ID NO: 514681 - protein, 385 aa, unidentified
MVSGRIRDTAEGFARLLAMLADAGDTAEQPTPVAIETDRGLLVAALRATGRGIYAINPLSASRYRSRHQVSGAKSDPADAVVLANIIRTDAHAHRMLSADTELAQAVRVLARAQQDTVWARQQLGNQIRSLLKDYHPAALAAVSLLPSGGLARADARALLRTAPTPAAAAALTRTQLRTLLTEAGRRKHIGRDADALHDLFGHEQLRQPPLVENAMALQLTALLVQFEAACVAADQLQEAAEAHFEQHPDAEIMVSFPGLGLLSGARVLAEIGDDRTRFADARGLKAYAGSAPITRASGKKKVVLHRHIKNRRLAAVGHTWALASLKASPGARRHFDARRATGDWNHQAQRHLFNKFLGQLYHCLQHQHGFSEHRAFPPPLTAAA

SEQ ID NO: 514682 - protein, 442 aa, unidentified
MAKGKRKLQMIHPNAAGIDIGSEKIFVAVEEEVKSFDTFTNSFSNAVNYLVEKKVQTVAMEATGVYWVTLYDMIEKVGIEVYVVNGRDVKNVPGRKSDVADCQWIQQLHSYGLLRASFIPEENIRQLRSYIRLRSDHISKLSEQIQHMQKALVLMNIKLHNVISDITGVSGMKILRAIIQGEEDPIKLTEMCDHQILKKKKESVIESLKGNYKQEELFALRQAVEIYDFYEKKMEECDKAIEKVLQEMTAEKNTPENLSTPKRVNHNSHPPQIDDLHLLLMKLTDGKDPSQITGLSDYVMLQEISEVGVDLSKWKTVKHYTSWLGLAPSKHSSGKSNKKRRLYRNTRAGQIFKLAAFAIANSKHHALSGFYKRIKAKRGSYIAIKATARKLAVIFYNIMTKGFNYVEQGLIKYQQTYEEHLRQRLEKQAKKLGLSLVPSVVH

SEQ ID NO: 514683 - protein, 389 aa, unidentified
MKIFVGIDIAKLNHFAAAISSDGEILIEPFKFTNDADGFQLLVSKLESFDKNSIIIGLESTAHYGDNLVRYLVAEFYQVCVLNPIKTCQMRKNNIRKTKTDKVDTYVIAKTLMMQDNLRFVSFFDLDMMDLKALGRFRQKTIKQRTRLKIQLTTYVDQVFPEIQYFFKSGLHQHAVYALLKEAPSPKEIASMHMTHLANLLKVNSHGHFTKEQAKELRVLAQKSVGANDSAISIQITQTIQQIELLDSQLEKIEAEMTDIMKFNDSVIMTIPGIGYINGGMILGEIGDIHRFSNPNKLLAFAGLDPSVYQSGNFQAKTTRMSKRGSRVLRYALVNAAWNVVRNNATFKAYYDAKRAEGRSHYNALGHCAGKLVRVIWKMLTDEVEFNLE

SEQ ID NO: 514684 - protein, 388 aa, unidentified
MQVVADRAAAPTAIQTDLRAIFISLELSRSTWLITSLSPGGGEKMSKHSVQAGDIAGLLRRFAQLKEKARARTGRDFPIITIQEAGLDGFWIHRVLQSEGIESHVVDPASIATSRRRRRAKTDKIDGETLVRTLLAYKRGEPRVCAMVKAPTPEEEDSRRLCRERKVLTAERVLHVNRIKGLLFCQGISGYEPLRRDRHERLEELRTGDGRPLPPHLKAQVNRELDRLELLLKQIKAVEAERDALLVAAHTPAAVPASMLLNIKGIGPEFAAVLWSEGLFRHFDNRRQVAAYAGLAPTPWQSGAVDREQGVSKAGNPRLRTTLIQLAWLWLRNQPHSALTLWFHERVNRNGGRLRKTTIVALARKLLVALWKYVNAGVVIEGAAMTTA

SEQ ID NO: 514685 - protein, 338 aa, unidentified
MNYVGIDHHRQYSHMTLMDQEGQVLRSGRIPNIQAEIEKFLEGFEAVEAVIETGRSSYTMVDVLDEMGVAVKIAHPNEVKAIARAKIKTDKRDSEVLAHLLRMNMIPEVYRRSVENRQAQRVLRQRAFYVSAMTALKNRVYAFLAQQKEEVREDVARETNIFSAKGQKALLELDLARGEKRLLEALLKTYRHLETRIEESTALVGKLYEESREAQLIRTIPGFGKYLSVLVAVEIADLARFADAAHLHAYAGVIPSTHSSGDRTHHGKIIRAGNRWLRWAAVEAVWPAIRADFNLRCFYERLARGKGANKAKVATARRLLTIIYKVLKEGRNYIAYPR

SEQ ID NO: 514686 - protein, 350 aa, unidentified
MKKVVKQVVGIDVAQDELVCCFGKVYEDFTLDLVTRYIFQNKPTGFKKLIEWLEPIVNKEVQLRFVLEATGVYHQSFAYFLHDQSYAVSIILPNKISNFKRTLDVKTITDKTMADAIAQFGLERNLDNWQPPKGIYRVLQQLTRERSQLIDEKVVIKNQLHAENAEAKPNKKSIERCNKRLALIEKQVKEIVQEINDLIKTDEEVKKIMLLVCSITGIGILTAATVLGETNGFELIRNKRQLTSYAGLDVKEKQSGTSVKGKPCISKKGNKHLRKAMHLPALSAIKHDERFKAIYTRIVSKHGIKMKAAVAVQRKLLEMIYTIYKTKVAYDKGYFKKHNEIIEAVECEIV

SEQ ID NO: 514687 - protein, 335 aa, unidentified
MKFKTFIGVDVSKLTLDICSISGEGLIEDYQIPNDPKSLKSFFGLLEKKFDLSTVLVCAEHTGHYSNPLRSYCLDSGIDIWLESGAEIKLRSGVQRNKSDKIDAGRIASYALRYSDKAKTERAKVDALEEAKLLLSERELYVKERAKYKAQIRDLKKFIASPYYKDRKKRMDKHLALLSRSIVQIDKRVKEIFKETEKLSKQKDILKSIDGVGEQVAVHTIVATVGFEKFSNGRQFACHAGVAPFSYSSGTSQRSRNKVSNRANKKLKTLFHMAALSAIQMKGEFRDYFERKLAEGKNKMTIINAVRAKIINRIFALIREDRKYEKNYIFTLQHP

SEQ ID NO: 514688 - protein, 362 aa, unidentified
MSNSTTWVGMDVHKENIVTVSISGDSGTVMTRWETPNTAKGKERLAGRIAGLGKARCVYEAGPCGYDLRRFLDGKGIPCDVIAPSLIPTKPGDRIKTDRRDAEKLARMHRMGELTAICVPTPAQEALRDLVRAREDANEDLVRCRHRLQKFLLRQGRRFEGKSWTREHWRWVRALTFDDANAGTVLAEYVLAVDQQLERVARLDARIEEEAQNPGIAPAVARLKTLRGVRTLTAMTIHTELIDLSRFASPRDLMSFIGLVPSEYSSGGKQRRGSLTRAGNAHLRRVLVEAAWHYRHPPHRTGETIRKRREGHPPDVIEAARKAEVRLYRKFTRMVMRGKRTTVAAVAVARELAGFVWAIGRI

SEQ ID NO: 514689 - protein, 321 aa, unidentified
MLTRIYIGVDISKDWFDVCTSLDEKAPVERYLNNPDGHARFIKAVSVLARKVHMCMEYTGGYETPLALACRAANLTVSLIDGGKFSTYRKSFGRARAKTDKQDARLLARFGAERRPPEWFPAPDEYRTLRELVRHRQSLLEAKTQWGCRASHSVQSELVSSQRQALRQVLGLQVKEADKTIAAHIQAHPNLEQARDLLVSIPGIAKVAAARILAESGPISNYKSARQYAMAAGLSPIVLHSGQKTPPGKLPVYGNADLRCALFLPVVSSMSHKTGVWDFMQRVGRSGDKLKMTLIVAGMRKLAHIVYGVLARSTKFDKTKL

SEQ ID NO: 514690 - protein, 420 aa, unidentified
MAQTVEIVYPVCCGMDVHKSFIVACIAVTDERSHTKHYIKRFSTFTGDLRRLAEWLASYNCRDVCMESSGKYWIPVFNALEKTCNVCLTHPKYVKAIKGKKTDKKDAKWISELFKCDLVRSSFIPPPDIRQLRDLCRYYVKLTGFVTSEKNRAQNCLTTCNFKLDDVFSDVFGKSATRVLNALLEHGNGNFALDGLIHASCKSSPEEIRAALDGELNPSQAEKLALIRRHMNDVLSLKASLEALICGLAPPYQPQIDLLMTVPGISTKLTAIRILAEIGADMSVFETAKQLVSWAGLTPQNQESAGKKKTTRIGRAGAYLKPLLVQIALACGKSEKCPELKNKFIALKKRRGGKKAVIAIARKLLTAIWHMLAKNEAYNAELYLKADKPPVARELTTSQAIAYLRNKGFLIVDEETGEVA

SEQ ID NO: 514691 - protein, 444 aa, unidentified
MTKPQLTPTQGILVAIDIGKTRNEVLIEIPGQARRRRLTVLNTRADYDRLIDLLSGLGQPVTCAFEATGNYHRPLAWRLLQAGFTVRLISSLALARTREALHNGWDKNDPKDAQVSLHMLRIGASQHYHDPLAAGLNDIQEVSKTHEAISKAKTEVLHRILTHHLPLYFPEIGRFRHNSRSDWFFAFLDRFPTPGSITALSKEAFIAAAWGVVGRKVAKERLLGDIYETARASIGLPIPIDAPAVRLFRLVIAEARSLIEQRNALEAMAIELLHESPDYKLLCRIPGVGPITALTILAEAGDLRRFGHHRQFLKFCGLDLATHQSGAFRGQTTLSKYGNARLRRALWLAGQVAIRQKENSFRDKFERTIARDRHNADLRRKALTAITAKMARVVHAIIKSGADYRPFVEEPVPGGRTSLSMGREGATATLSIMLGSSAWTCISC

SEQ ID NO: 514692 - protein, 423 aa, unidentified
MDVIHQRVAGLDVHKETIVACVRIMVDARVSRECRTFDTTTAGLKDLLAWLTASGCSHVAMEATGVYWKPVWNILSDGTFELLVANAAHIKNVPGRKTDVNDATWIADLMACGLIRGSFVPDQAFQELRTLLRTRKQLTREQTRHVQRLQKTLEEANIKLDSVISDVMGLSGRRMVEAMIAGERNPQKLAALADRRIKASPKALYDALHGRLTDHHRFRLRLHLAQYDVLAAAIGAVDQEVDAAIDQMDEVEKGGQAFFRSLIRLLSGIPGVNTLSAQTILAEITPDMTRFATAGHLVAWAGLCPGQNESAGKRKSSRLRKGAPWLKTTLVQCAASAVKKKDSYFKAQFQRLKSRRGPQKAICAVAAAMLTTIYHMLKDGTQFQDLGAHHFDRRPPEAKARHLVAQLTKLGYTVQLQPLAEAA

SEQ ID NO: 514693 - protein, 415 aa, unidentified
MKKVYDKCCGIDVHKKIMVACFIHGKEQEIREFGATTRELLALADWLEQGGCEMVAMESTASYWKPLYNILETSNLPAMVVNARHMKAVPGRKTDVKDAEWIADLLQHGLLQASYIPDKAQRELRELVGYRKSLVADRTRELNRLQKMLEGANIKLSGTVAEINGMSARIILNELLDGKTIDKTRLEEMKKQKIIAHNLRASFDQIADDLNGVMSPLQNKMMRELLKHIDELNVHIKNLDEDIDNHMNDEEKKATSAITEIGGIAGASAKAIISVIGTDMSRFPTDAHISSWAGLCPGNNESAKKRYSGKTNKGNRLLRTTLIVCAHAAAKMKNTYFSAQFHRISAHRGKKQAYVAVAHSMLIAIYHILKDGVKYQDLGADYYNQFNKERKINAYLKKLKELGWTEQNAMIVQPA

SEQ ID NO: 514694 - protein, 341 aa, unidentified
MRMFAGLDIGGKHTAICVIDESGKLVWRGIVDTHPEMIDGALQRFKGSLDKVGLESGPFTPHLFRSLEAMGYPMICMDARRAADAIKSRRIKSDKGDAWALAEMLRTGWFSSVYVKSVDTHRLKALLGARDQLVKLKRSLGNQVRGLLRPFGIRLPSRAGGKKFDEAAYLATQKDAILHAAVRALLESLASIEGQQARLDDELDELAKRNEIAWRLMSVPGVGRITALAYMAAIENVDRFRRTRDIGAYLGLTERRYQSAETDVGMGISKQGDAMARHYLYEAANVLLTTVKKRFALRNWGLRLIKTIGPKRARVAVARKLAVLLGRMWKDGAHFEAVVAA

SEQ ID NO: 514695 - protein, 433 aa, unidentified
MKPKSTPAPTPSPYAAFVGIDRSDRKIDITVLDPRGKHRDRREISSRPNSLEDWILELRHQFPQGQVALCIEQPCANLAAFFIQFDFVDLLLINPATFRKWHDAFKPSKAHDDVTDSAGIAELAHQNHTKLTVWKPDDARTRQLRSLLESRRSLVDLRTRLNNQLTAVLKGYFPQALEICGKYLHGKVACDLPSKWPTLQKIRRARPETIGSFYHMRQSRRPDVIGERLNVIAEAVPLTNDPAILEAGTLHVKALVSQFNALRASIGNFDREISVLLDSHDDADIFKSLPGAGPNLASRLLVAFGTDRDRFRCANDVQNLTGISPVLRQSGNTRLVLRRQACPAFIRQSFLEWVGQTLTRSTWARAYYDQLKARGVRTHTARRALAYKWIRIIYRCWQNHETYDEDRYIQTLTSRKSPLVPAIRQMQLAENKA

SEQ ID NO: 514696 - protein, 400 aa, unidentified
MLSIGIDVSKGKSTVCGMKPGGEIVYTPFEIQHTREGMSELVSLLHNSGEEVRAVLESTGSYHCPVVAALLENGIFVSVINSLRMKRFCSQSIRKVKTDRIDAMQIALYGLAYWQELQPTRLPEDTYRELQLLARQYYQMTSMLIKAKVDFNAICDQVLPGMQELMNDHAGRHKLSDFVLRYRHTTHILEMGETRFRKDYCKWAEKKGYRNCERMAALIFATAQNGIPVLPNAPSTQIVITEAIRVLHTVEASRDAILTQMQALAKTLPEYSLVREMPCIGDTLAPRLIAEIGDVRRFHSKRALIAYAGIDAPPYQSGKFCANNRHISKRGNRYLRKTGYEVMQSYVMHKPANDPIFMFIEKKRSEGKCGKLAMVAGLNKFLRVYYGKVTELYRSLPAIE

SEQ ID NO: 514697 - protein, 321 aa, unidentified
MTYIGIDVSKDTFVVAYSSEKNSKTKVFKNTTKGIHEFITTISKDEHHCVMEATGNYSALLVYLLSEAGITTSLENPLKVKNFARAMLSTVKTDEIDARLIALYGEKMQPAPYRLRSDAILTLKQKRTVIRQLKKQLIATRNLKGSMEVLPFFDAKCKKSIEKTIAFLEKQVKDLEENLTTLARSEYKKQMDLLTSIKGIGVTLAAALIMATGGFTYFDNAKQLTRYLGLSPTYQQSGTSVNFKGHINRNGDSSLRGQLYVAAFASLRCNTECKSCYDRLRSNGKPGKVAIIAVANKLIRQAFAVVTQEKPYVDGYVSSKK

SEQ ID NO: 514698 - protein, 408 aa, unidentified
MNAVGIDISKDKSTVAIMRPFGEVVASPFEVLHTADELGKLANLLLKLDGETKVVMECTGNYYLPVAYTLHEQGISVSAVHAQLIHNFGDNTIRKGKTDKKDAVKIANYGLTYWLDLPDYIPEDDIRHMLKVFSRQYSKYSKIKTMLKNNLISLTDECFPGVNELFSSPPRKSDGHEKWLDFLAEFWHCGCVGHSLKSFSTKYRKWCRKRGYYFSESKAEGIYISANSDVVFMPKNDITKLLITNAVAQINAISETINATAKEMKQLAESLPEYPIVSAFFGVGDVLCPQIMAEVGDIWRFPKKSSLVRFAGLEPVENSSGKFIGTEKISKQGSSHLRKSLFQVMDCILKKSPENNPIYQFLDRKRAEGKHYYCYMTAGSAKFLRIYYARVREYLLKLESESELSCQG

SEQ ID NO: 514699 - protein, 349 aa, unidentified
MSQNLNSAVAVIGIDIGKNSFHVVGLDNRGAIVLRQRWSRGQIEARLANLPPCLIGMEACVGAHHLSRKLQALGHDARLMPAKYVRPYSKGQKNDFRDAEAIAEAVQRPTMKYVATKTVEQLDLQALHRVRERLVSQRTGIINQIRAFLLERGVAVRQGLRFLRAELPRILATPPDVLSPRIVRVISDLAEDWRWLDDRIDQLSSEIAVLARQDAGCERLMSVPGIGPIISSAMVAAIGTGDAFSKGRDFAAWLGLVPKQMSTGDRTILGKISKRGNRYLRVLFVQTAWVVLIKPMSWDRHGLKHWIEAAKKRLHRNVLAIALANKLARIAWGVLAGGRTFEASKLQIA

SEQ ID NO: 514700 - protein, 308 aa, unidentified
MKRDDYDLVAIDVAKEILCVLIAGRLFTLANTACGLAALLKHLRTLKSPWVFCEATGGYERALVAMLHKHAILVTVINPALVRHFARSEGVKAKNDPIDTQMILRFAQQKELEPSAPPKRPELTALMDRRTHLSDELARERTRLQNSSKLIHVSIRRMIRLLEREVNRIEQAISALIEKDDTAHYAADVMLQTKGVGPVTAWAVLAYLPEITQLSRNRIVAMAGLAPFDKDSGKSKGPRHICGGRHKIRNVLYMAAMAACRHNLVIKPYAQRCADRGKDKKWIFTAVMRKLLIHLQRNLKNHQICLVS

SEQ ID NO: 514701 - protein, 356 aa, unidentified
MSRDIKYIGMDVHKEAIVIAVLNSNGKLVMESIVETKASSILQFIHGLHGELHVTWEEGTWAAWLYDLLQPRVQQVLVCNPRRNALLKEGNKSDKIDAQKLANLLRTGMLRPVYHGEHGLRTLRELARSYQTISQDLTRVMNRIKALYRGWGIACGGTRVYAARYREEWLHKIEHLGVRRRAELLYQQLDGLQKLRQTLRPELLAESRKHKAAKLLRQIPCIGPIRAARLLALMQTPHRFRSKRQLWTYSGLGIETRDSAQYCFVRGQLQRAKKPQQIRGLNRNHNHEMKDIFKGAATRASCGVGPLRDFYVGLLDKGMKPEMARLTLARKISAIALTLWKKEERFDAEQLKTQVA

SEQ ID NO: 514702 - protein, 343 aa, unidentified
MEAITTIGLDIAKSVFQVHGIDAEGNVILRRQLKRRYVLTFFQKLPPCLVGIEACASSHHWSRELQALGHTVRLMPPAYVKPYVKRHKNDATDAEAICEAVTRPNMRFVATKTPEQQSCLTLHRTRHLFIRQQTSVINAIRAHLAEFGIVAPVGRQGVEQLLGVAADTNDKRLPEVARACVAALGAQLRMLKAQILQFDRMIRAWHRSNEESRRLDDIPGVGPALATALVASVADPKAFRSGRDFSAWIGLVPKQNSSGGKDKLGNISKRGDRYLRSLFTTGALAVIRYAKIHGTKHRPWLTALLTRRPTKVAAIALANKIARIAWAMMAKGERYKEPAALAA

SEQ ID NO: 514703 - protein, 339 aa, unidentified
MVSHSRSRSIPTAAPGRPAAAGCGGLPIAEPLCIGANVSKEWIDFCDTQGRSKRVDNRADAIEAAFVGPWAEAAFVVCEATGGYERVLTGAAARLRLRLRRVHPNRARAFARATGRLAKTDPLDAVILARFARFLFDEPAPPAPSAQSQELAAMVNRLNQLTDLRQSETCRAKLALGAAIKATIAAVLKAIGEQIAAMQRAIDAFIAADATLAENAKLLRSCKCVGPKSVQAILALLPEIGTLDRRKIAALVGVAPITSKSGSSINHASISGGRQALRDCLFMAALTASKHNPTFKAFRDRLTAQGKPHKVVIVAVLRKLIATLNAMIKSRQPFKMALT

SEQ ID NO: 514704 - protein, 298 aa, unidentified
MTIHTESQTEINVGVDVGKSKLDIVLHPLDLHFQIPNDETSIRKIVQVLKSQNVTRIVTEATGRYEHAFVFACDQANLPIVVVNPVSIRRYAQAIGVLAKTDKIDASVIARFAATIQPDIKPIPDKQSRLIKDLLTRRSQLLEMQTMEKNRLQILPKALHRSIKTLLRSLETQIKTITKQIDEAVMQVKHWRTKAEILTSVPGVGKVLAYTLLSELPELGKLNRKEIAALVGVAPMNRESGTWNGKRRIRGGRHRIRTVMFMAMLSSIQCSPVFKRFYEHLKAQGKLTKVAIIACSAS

SEQ ID NO: 514705 - protein, 367 aa, unidentified
MNQRTYVGLDVHARSVVGCAIDERTGEITRQRLAANNAGIVDWVKGLGPPVRVVYEAGPTGFGLARALESAGIACVVAAPSKLQRPPGDRVKTDARDAEHLARLNLLDQITAVAVPGSSREAARDLVRAREDVRSDLMRSRHRLSKLLLRHGIIYSGGRAWSNAHHTWLHQQHFEDASLQATYETCLETVELTLDRRDRLDARITTVAETDPYAEVVHALMCLRGISVLTAFGLTVEVGDWNRFTGKTIGAFLGLVPSEHSSGQTRSQGSITKTGNTHARRLLVEAAWHHRRNYQPTREMQARWDKSDAASRIRGHQGNHRLHDQWEKFEKRKKRRVVANVAIAREMAGWCWSLAAPVQREHPWPVE

SEQ ID NO: 514706 - protein, 351 aa, unidentified
MSVRRILAKTIDTDLEYEAIGIDLAKNCVSAALLTTDGEVVCIDRLDYSELEKSAQALSPTTFAMEPCTEMNYLVQKLEAWGHRCLVIGGKNVQNYVENHYSGQKTDLNDAQALAFLAQDTQLRTIKAKDIEQQKYASLTTLREQYIKQYRQTIVSLKGICQAWGLNISKGISGKAQLKDLIENHAAFPEELRESLVDMVTHAQTAQKALNKITKTLEELAKNDKLCQLIRTIPGLGLICSCRLRATIGDIKRFKNPKDFPAYYGLVPRSIATGHNEKKGRITHRGDKTMRSLMVQGAGCVIRLATCGKLKSKQLTKWILKKQKEKMPWGKLVCAVAAKLLRIVREALQNT

SEQ ID NO: 514707 - protein, 339 aa, unidentified
MHQQINPNLNLATYIGIDAHPSEHTALAMNRFEEEKGKLRFDNTRAGIAQFLSWLGTVDTEINNVIIGIEGGTSTRHALVSQLVAAYPNVYEVNPLYTRQRRVFGTKGVKSDPVDAKLIAGVLTRNIQDLSKISTRQLAPSMHCLQKTVGFYEEIAAHGTRLKNQLHQLKREHDLGTDRDEKHVLGLIIKSKTTELKNMQKQQKLLETQLLKLLEGQGKNLPTFPGIGTISAAKIVAYTGGIERFPTIDKFLSYAGIAPVERSSGRSKRHIQNMRGNRNLNSALYMVALNQLTHNPKAKVYFEKKVNEGKTKKHALRCVMKRTACFIYGMLKSGEAYRG

SEQ ID NO: 514708 - protein, 354 aa, unidentified
MSQTPNTAIAVIGIDIGKNSFHVVGHDARGAIVLRQKWSRGQVEARLANIPPCLIGMEACVGAHHLSRKLASLGHNARLMPAKYVRPYSKGQKNDFNDAEAIAEAVQRPTMKFVATKTAEQLDLQALHRVRERLVSQRTGIINQIRAFMLERGIAVRQGIGFLRTELPTILATRTDALSPRMLRVIEELAGDWRRLDQRIDGLSGEIEALARQDQACSRLMTVPGIGPIISSAMVAAIGTGDVFSKGRDFGAWLGLVPKQISTGDRTILGKISRRGNRYLRVLFVQAAWVVLVRIKNWERYGLKSWIEAAKRRLHHNVLAIALANKLARIAWAVLAKGRAFELTRTDDAGVRPA

SEQ ID NO: 514709 - protein, 357 aa, unidentified
MGKSIIDPSSVTRVGLDMAKRVFRIHAVDATGFVVIARSVNRRTLLKFFDTLPRCVVAMEACSCAHHWGRQLLELGFAVRLIPPAHVKPYVRRSKNDAADAAAICEAAGRPGQRFVPVRSVENQAALMRHRARELMVGQRTAALNALRGHLSEIGVVAAQGVQNAYALKDMAAEGFDANGEIVVPDCVRLALAPLVRQIDALDEAIEVIDRELEASARTDETAKRLMTIPGVGPVTAMALLATIQDFAAFSSGREFAAFLGLTPREHSTGGKPRLGRITKMGDRYLRKLLVQGACSALGHRKGHNDALRRWASGMLERKTVKYKFKLTAVALANKLARIVYALATQGGHYDDRPVAA

SEQ ID NO: 514710 - protein, 414 aa, unidentified
MTEEEIISWFAGVDWGSERHQVCLLDARGTTVGEREFPHSGEGLAELGDWLLSMASAASTVAVAIEVPHGPVVDALIDRGFVVYAINPKQLDRLRDRFSVAGAKDDRRDTYVQADSLRTDRRLFRRLQVADPRLIELRAWSRLAEELRAERVRLSNRVRHQLWRYYPQMLKLTDDLAAPWFLELWAIASTPAKASRLRKSTVERLLKRHRIRRIDAETVLRILQEPAIKVAEGLAEAASIHMRSLIARLRIVNRELHEAERKLDEICTAVSEIEQTSGESFQRRDVAILRSMPGIGRINLGTLLSEASGPLSRRDYQGLRTLSGAAPVTKRSGKSLIVVRRYAAHVRLRDTVYHWARVATQRDPKCRVRYTALRKRGHSHGRALRGIADRLLALAGVLLQRQMLFDPYFGRPTT

SEQ ID NO: 514711 - protein, 404 aa, unidentified
METQTVSHMGLDCHKNFSRVTARDQQGRVAWRGRLEHADRQELRRVLASWPKVPVVLEGTFGWGWMSDELRLAGQDPHLANCRKVAAWRDARGMAKSNKLDADLLSELWPERQRWWEIWLAPPEVRDQREWLRYRMTLVRWQTGLKNRVHATLHRHGIVQPHSDLFGKRGLAFLQELARDGGQLRDSTRGTLSGYLRMLAQVRQQIAAVTRELRRQVRRSPAGELWRSLPGVSFVLAYTILAEAGPITRFKDGRHLSSYGLLAPRADDSGDEDPTAKPVGRHVGHLGRVTLKWAFIAAARGAVARSGYFRAIFDRRTDDGARDRQRGYIAVARELSRVGYSCLKNQRRFVEQRPQRPERPEPMPRAAEPDRPAAAAAPTNRPSRPDVRRARSPLGRRRERECVS

SEQ ID NO: 514712 - protein, 354 aa, unidentified
MKRTGKYAALDVHQTTTTASVREEGGRVIARAILPTEELAIVEFFRGMRGAVRVAFEEGTQAQWLHDLLEPVVDRVVVCDRRGKSRGGNKGDQVDADELSELLRQGALRAVYHGSQDRATLKELARTYQNVVEDATRVMLRLKALFRARAIQVQGPSVYHPKNRAEWLGKLRERGVRYRAEALYAELDVLRELRPKVKAAMVAEARRDPAWSVLRSIPYLGPVRVAQLMATMRTPWRFRTKRNLWAYSGLAVVTASSSDYVIEGGRAVRKRRAPMTRGLNRNHNRVLKDVFKGAATAATGRPGPLKDLYQGMIARGMREELARVTLTRKLAALTLRLWKTGERYDPTKLTKQAH

SEQ ID NO: 514713 - protein, 361 aa, unidentified
MRIIGCDLHARQQTLAMLETTTGEVVNVTLMHEGNEVRDFYSQLPRPVLVGIEATGSMQWFLNLMEELGIECRVGHPATIRAAEPRKQKLDRRDAELILRLLAENRFPAIWLPRKELLDLRALLLHRHQWVRIRTRIQNALQAIALANGLRRGPGLWSYDGQAKIAFLPLPPHASYRRSALQTLYRKMKEEIENLTKQVAEQAEQRSGARLLMTHPGVGPVTALATEVFLGDPGRFVDGKALASYVGIIPREYSSGGTQRFGGVTKQGSPLLRFLWCEAGAHAVRRDPALQRFYRRKLVQKGLGKARVAVARKLGIRLWIMLRDEIDYEEFCRRGQKQQSGAACAGMPETGYGANRRRAIG

SEQ ID NO: 514714 - protein, 343 aa, unidentified
MQAVKTIGLDIAKSGFQVHGVDADGQVVFRRQLKRRNVLAFFQKVPSCLVGMEACATSHHWSRELQALGHTVRLMPPAYVKPYVKRQKNDATDAEAICEAVTRANMRFVATKTPEQQSGLMLHRTRHLFIRQQTALINAIRAHLAEFGIVAAVGRNGLEQLLNVVADAGDKRLPEVARTCLMALGSQLQALKAKLLELDRMITAWHRSNETSKRLDAIPGVGHVLATALVASIADPEVFRSGRDFSAWIGLVPKQHSSGGKDRLGSISKQGDRYLRSLFTAGALAVIRYAKIYGTKHRPWLTALLARRPTKVAAIALANKLARMAWAMMSRGERYKEPVALAA

SEQ ID NO: 514715 - protein, 403 aa, unidentified
MGNCAGLDWAAEKHDVRIADEHGRTLCERVIDHSEAGIAELVDLLLKQQVERLAIERPDGLLVGRLVAAGIVVLAIHPNQVKAARDRFRPAGGKSDRFDAMVLCELARTDHHRFPALAPSSDDTVALKALCRAREDLVATRVEVANRLRAELDRFWPGANKVFADIDSPIALAFLDRYPSPQDTRGLGPKRLQAFLDRNRYSGRRTTTQLLQRIHTAPQASCGQAETEARRQIVLALTKTLHPIVDQIRDLTSQIAGAVRNHPDGQIFLSLFRDPKSSVTAAGLLAEIGDNRTRYPHPDTLAADAGMAPVAVESGKRRHATFRRGCDHRLRTHMATLADSTRHWHPWANHVYTQARNRGCDHPHAIRILGRAWTRILWTCWQNNTPYNPELHGNLNQLQTTRG

SEQ ID NO: 514716 - protein, 353 aa, unidentified
MLTIGVDAHTRVHAAAALDDAGREVGRWRGPNSPDGWRDLLRWACALGEPRQWGVEGAWNYGRGLAQHLVAADEVVYEVNPRWTAKGRRGARRPGKSDALDARAVALTVVREAPGLPLVQQDDETAVLDLLVTEREAAVAEATRLRNQVHAHLQQLDPEYRTRVPNLQTQAGLAAIGSYAVPEDAAALDQERAAAIRRLTQRLRLALDQAEELADRIRERADARFSPLTRLCGVNLLTAGALAGILGPGRRWRTDAQLAAHAGVAPLEASSAGVTRHRLNRGGNRRLNAILYRIALTQARHSPEGRAYLDRRVAEGKTSREAFRALKRFLVRAIWRLWQECLDAETDVPAVAA

SEQ ID NO: 514717 - protein, 352 aa, unidentified
MTKSAANARKTYAGLDVSLKETAICIVDDGGKIVFERMVPTDPQMIAKYLHKHGPGLERFGLESGSTSAWLWREFRQLGLPVICLDSRHAHRVLSMKRNKNDRNDARGLADLVRMGWYREARVRSIDAQFVRSLLLSRQQLLQARRNIENQIRGALKTLGVMTGPSKGRGFMPRVIDLRADNDWLGPILDPLLAAHASIAKQLKVVSASVLNAAREDADVRRMMTVPGIGAMTALAFKSAVDDPKRFTSSTKVGPYLGLTPRQYQSGESEWIGGIGKTNDPLLRSYLYEAAGVLMTRVRRSCPLKVWALRLAKRIGWKRASIAVARKLAVILHAIWRDGTVFEWQTAEASAA

SEQ ID NO: 514718 - protein, 491 aa, unidentified
MKFSGSGARERERERERERERERERERERLDEAGAGPAALMPTGTAKGNSASANGTAAIAVAKRARSDIPRVNGRARQRSMRNEVADLSPEGFPSGTPTRSRGAIKSGAKERPTMRKVALDLGAKKTTYCEVADGQVVQRATVTSVESLRTLLGPEQPAAVVAIEACREAWYVYDLLTSWGNEVLLVDTTRSKQLGIGRHGRKTDRIDAEVLARAVERGGIPLAHVLSPHRRELRRQLGVRRALVETRAKLVTTMRGLVREHGEKLPSCATEHLLVNARKARLPEALRQLIDPLLKTLEVVDSQLNTVEAELGTLCAQEPIIAHLCTAPGVGPIVAASFVAVVDDAQRFHRAHQLESYLGLVPSEDSSGGRRRVGAISKKGNSYLRALLVQAAWNVLRKSERADPLRQWGEAVAERRGKRIAVVAIARRLAGILFAMWRHGTVYDPLALGRKTARGLRSQAEDIKFRAEALERVAHKRSCRLLKQEVKQPR

SEQ ID NO: 514719 - protein, 405 aa, unidentified
MYETHVGIDWASAEHEVCVLAENGDRLARFAVVHSEEGLDDLVARLGGYGDRARVGVAIERPDGLVVDRLLEAGHPVVAVKPAAVKAYRSAETPSGAKSDRADAETIAEYLRLKGARLEPLRPYSAETRALRQTSRTRVRLVRRRVRATNQLTETLQTSWPGALAAFADLDTDIAMRFLARYPTPEAAAHLGPKRMQRFLDTAGYSGHGWRRSAEQLLRQLRNAPAGAGSGPLTDSCEAAVTTQVQAVVGLREGIRNLDRTIKSQLDEHPDAEIFLSLPHSGTINAAQMLAEWGDVRPAYPTPDSVSALAGMSPVTRQSGKHQVVLFRWACNKWFRQALTVYADNSRHGSEWAHDVYQRARARGCDHPHAVRILGRAWIRVIWRCWINHTPYDPSRHGSLLAMTS

SEQ ID NO: 514720 - protein, 323 aa, unidentified
MTTIYLGLDISKDKIDAVTAQTPHITVPNDEAGYRALLDYLHGHQINPSQIHACCESTNIYYLGIAQYLYGHHIKISVVNPIAIKAYAKMQLRRVKTDKQDAKLIADYCRIEQPQAWQPESDGKRQLKVIHRRIEQLMAICVQEQNRLQVADECVRPSIEQLIDTLQAQMDQCRRQMQQVIDNTQDLRQKQQRLETIPGVGRSTAQILLSVLIDLDKFQTAKHLISYLGLSPVIRDSGKYSGLQRVSKMGNRSVRTSLYMPARAACTRSKLWRGWFDYQVGRGKHPKQVYVMMMCKILRYAYICLKTDKPFDAELHQKALKNG

SEQ ID NO: 514721 - protein, 347 aa, unidentified
MDTIGVDLHKRETQLCIGQADGTITEQRIVTSRERFTTVLGHRPPARILVEASTESEWVACHLESLGHEVIVADPNYAPMYATRSRRVKTDKRDARTLMEACRAGTYRPAHRLSAARRHVRAQLAVRDAVVRTRTRYVALAKALVRRDGLRVPSSAAERVGAHLAALAVSPPLAAELAPLLTLLPPLNATIAAADQRLAALEHTDPSVALLMTAPGIGAVTASALVATIDDVQRFASAHQFEAYLGLVPGERSSGELRRIGPITKAGNRRARWLLVEAAWRILRSKDAAGAPLRAWARPIVVRRGARIAVVAVARRLAGILYAMWRDGAPYDAGKIRRPRVRQSPAA

SEQ ID NO: 514722 - protein, 411 aa, unidentified
MDVMHDRCAGLDVHKDLIVACVRISTGNRVATEIQHFGTTTRALIDLAEWLESHAVETVAMEATGVYWRPVWHILADQFDLLLANPARIKNVPGRKTDVNDAAWIAQLLSHGLIERSFVPPPTIQEARDLTRTRKQLRREAVGHSQRIQKLLEDAGIKVASVLTDIQGVSGRLMLEALINGVTDPDELAALALGKAKNKKAALREAFRGRVTDHHRFMLRQHLSMIHSIENTISLIDDRLEVVLLPFREDIQRLCTIPGVSTLAAQVIIAEIGADMSQFHTAANLRSWARICPRNDESAGKKRSKAIQKGAVWLKTVLVQGAWAASRSKGTYTSAQFRRIRSRGGAKKAAIAVASSMLTAAYFIIRDKVGYKELGAEYFTQRGKESPAQRYVRGLKELGYDVQITPTALPA

SEQ ID NO: 514723 - protein, 356 aa, unidentified
MNNSNRVDFTGQHIYIGLDVHKKSWSVSIFSQHCEHKTFTQPPEVDKLSSYLRRHFPGASYHSVYEAGYCGFWIHDQLKEQGIDSTVVNPADVPTKNKERRGKRDPVDCRKLARSLRSGELVGIYIPSRSQLEDRSLIRTRMRMVRKQTRCKNQIKSMLLFYGIHLPEELLNSHWSRRFIRWLETIRMQKASGDMALKIHLEELKHLRQIIASLNRAVLALARTEQYRVPVSLLKTVPGISTLTAMTLLTELSDIARFPSLDEMSCYVGLIPDTHSSGEKERVGEITQRRHRHLRGLLIEASWVAIRKDPVMLMAFSQYCKRMPKTRAIVKIARKLLNRIRYVLKNQKEYVLAVIE

SEQ ID NO: 514724 - protein, 313 aa, unidentified
MCEQRMVGIDVAKATLDVAVRPSGEQHSAPNDSEGIAALVNWVGMLEPTVIVVEATGGYEAALVAALGVAGRPVAVVNPRQVRAFATAAGYLAKTDRLDAPVLAHFAAALRPTPRPLPDAQAQELAALLERRRQVVAMRTAEQNRLGATRVERVRARIQAHLAWLDADLQEVDDDLRRSRRASPLWRARDDLLQGVPGVGPVVALTLVADLPEVGRLSHAQIAALVGVAPPSRASGTLRGRRTVWGGRAAVRAALSRGTLRATRCNPVIQGFYVRLLAAGKAKKVALVACRHQLLTILNAMVRHGATWRAQAA

SEQ ID NO: 514725 - protein, 411 aa, unidentified
MHNRQNYLYVGVDLHKEHHTAVIINCWQEKLGEIQFENKPSAFSKFLLEVETYVSDGLSVVFGLEDVGGYGRALAKYLVDHEQVVKEVNPALSFLERKSQVMIQKNDSWDAECVARILINKLNQLPDAKPNDLFWSIQQLVSRRNALVKAQSALKNQLHIQLNRHYPSYKKFFSELDGKTALAFWEQYPSPSCLEGMNIKRLTAFLLDVSNNTCSVRKASEILRLVKEDGQTMKEYQEMRNFLVRSIVREIEFKKKEMKYIERELKQLVNLLDYQLETMPGIELVTASALIAEIGDARRFPNANKLARFAGIAPVYFGSGGKGKTHKSKQGNRALHALFYNLAVQQVQVAKGSKLPRNPVFHAYYQKKLKEGKTKGQALVCIMRRLVNIVYGMMKYKTAYELPVVEEKEEV

SEQ ID NO: 514726 - protein, 325 aa, unidentified
MQIYTIDVSKEHLDIFSKSEDGKIFQKRIKNSFNSICRLLSALEPKDLICAEFTGVYTNLLWHLSAMYGIKIALASGFDIKHSLGNRKGKSDKLDAERIWEYASRFSDKLNFVLPDSEMLQELKMLFNLRNQLVKSLKTLHTSHTMIKLNPYLSIAENSIRAQTEAFIKGQIKQTENQLFELIESKSEFSRNFELVTSITGIGKVTALELIISTGNFKRINSARKAAAYAGVCPYPNQSGNIAKKSRIHFRANKKLKSLLHICAKTICIHNKEFKLYRERKMLEGKHFYLVMNNVSNKLLRTVYAVVDSQKPFDPNLITIDPRFR

SEQ ID NO: 514727 - protein, 370 aa, unidentified
MRKGTLYVGLDTDKKHIDVAVAEPLPDGEVRYWGQMANTPASVDRLVKKLGQGGRELVVCYEAGPCGYGLYRQLAGKRGVTCSVVAPSMTPRRPGERVKTNRRDALKLAKLLRAQELTAVWVPDAAHEAMRDLVRARSTSVAVLTRCRQHISSFLLRQGIGYLGKPWSKKHRGWLDTLQFELDAHRLMFAELLLALDQAQARRDRLTDHIRELVPDWSLAWLVAALQALRGYDLINAAIIAAEVGDPRRFANPRQLMGFLGLNVSEYSTGDTVRRGQLTKTGNKRARKALIEAAWTYARSAAAKPKPIAQDRPAAVQQIADKARHRLARRFRHLVGRGKLRQVAVAAIARESLGFIWAIAHAAAPSCTPG

SEQ ID NO: 514728 - protein, 392 aa, unidentified
MIYAGVDVAKANHVIGAVGDDGQPLCKSMEFKNSDAGFERCSAWLEGLAEEPSDVLVGMEATGHYWMALFARLAAEGYSVCVINPMEVKAVRKLKGKSRVKNDRVDALLIAETLRIGEYVETKLASDEVQSLRTLTRYRQAIKEEAAQVKIRLTCVMDSYFPEYAGVFSDMFGSASLAVLEKSPMPSELLRRKAPSLASDISKAARRQIGQAKASELKAAAKSSVGITLGLDAASFEVRSMVSQVRFLEERASEVEERIEELLMGIEPLVLTIPGVSLATGAQIVAEVGDVSRFRSAAALVSYAGLNSSVSQSGQFDSGGGPITKQGDPYLRRAVWLAANRARQHDPALKAFYDKKRAEGKRHRVAVTAVARKLCHIVYAVMRDQVPYDPNR

SEQ ID NO: 514729 - protein, 343 aa, unidentified
MTVYVGMDVHRKRSQVAIVDDAGVQQRNRNLANDPAKLIPVLGALPPGTPVAFEAAYGWGWLVDLLEELELEPHLVHPSRCKAIASARLKNDKVDAATLAQLLRADLLPEAWIAPQATRDLRALLRHRASLVRMGTACKNRVHAVLADRGIPDHSSLWTGPGRAWLADLELPATPRGIIQDCCGLLDALATPIGRLEREIAGLAKPDPRVQALMVLPGVGQLTAMTLVAEIGDIARFPTARKLCAWAGLTPQVRNSDRKVRHGHITKQGSPWVRGILQEAAQTAKRHPMFAPAYAQLARRRGTHIATTAIARRLLARSFHILTQLETAPAPEKASTGRARVSA

SEQ ID NO: 514730 - protein, 367 aa, unidentified
MDSITFVGLDVHADSITAAIVHGQSQEVEVIELSSDLMKIRRLFRRLSDKGPVRACYEASGAGFVLQRVLSNDGFHCDVIAPSLIPRRPGDRRKTDRLDAIMLARLYRSGHLTPVHVPTEDHETLRRLLRLRTTYHSYCTATMHRISGILRNHGFVFTQGKSTWTKKHRQWLAALRQSLEGPLQTTLAIELEHLEYLEAQQHAMDAQLEGFARSDQFRLQTEALCCLRGVKTLTALTLLCEVDDVRRFASPRTLMAYFGLVPSEHSSGNKEHRGSITKAGNTHVRRLLVEAAWNNRHRAGADLILNRRRQGQPPTVVAIALKAQHRLYKKFWHLDQRKHRHVAITAVARELCGFVWAILYQLQPTMN

SEQ ID NO: 514731 - protein, 354 aa, unidentified
MSNQSNATVATMGIDIGKNSFHVVGLDQRGAIVLRQKWSRGQVEARLANMPPCLIGMEACVGAHHLSRKLQSLGHDARLMPAKYVRPYAKGQKNDFRDGETIAEAVQRPTMKFVATKTAEQLDLQALHRVRERLVSQRTGIINQIRAFLLERGVAVRQGPRFLRTELPNILANRSDVLSPRMMRIIEELAGDWHRLDERIEGLSTDIKALADDDPACERLMTVPGIGPIISSAMVAAIGNGAAFSKGRDFGAWLGLVPRQMSTGDRTILGKISKQGNRYLRVLFVQAAWVVLVRPKSWERHGLKSWIEAAKKRMHHNVLAIALANKLARIAWAVLNKEHNFDCTRTNAMMSRAA

SEQ ID NO: 514732 - protein, 346 aa, unidentified
MEHIGIDVHKKESQICILGEDGQVVVERRVRTEGDRLAAVLGGKAKSRVLIEASTESEWVARCIEALGHEVIVADPNFAAMYATRSRRVKTDRRDARTLAEACRLGAYRPAHRLGEERRHLKAQLAVREALVETRTRYISLIGAVLRRQGLRIPSGDAEFFIKRVARVNLSGKQRSEVGPLLAVLVHVNEQIRFLDGVLERLALQDKQMERLRTVPSVGPVTAAAFVATVDTASRFKKAHQLEAYLGLVPSEMSSAEKQHRGRITKVGDTRVRRLLVQVAISMLRLKNPNTAALRAWAIGVGQRRGRRVAAVALARRLAGILYAMMRDETTYKPWPVAQPAHQEAA

SEQ ID NO: 514733 - protein, 436 aa, unidentified
MRGCRCSMIMGFTKPIEHFNLQRKKVITMNTLYVGIDVSSKSNVVYLMLPNGDKHSNFSVANSHEGSTLLVKKIYSALTSHSLDTVLIGLEATSVYGDNLVYFLREDATLAPFNRKIHVLNPKQVKKFHDTYNDLPKNDYVDSFVIADCLRFGRINKEVYMGDYRYKALQNLTRARFFAVQNLVKEKQRFMNVLFKKYSTMTQEKVFSDAFSTTALAVYDEFESAEALANMDLHELTDFIIEKGKNRFPDPVAVAKAIQKAARSSYRLPKTVNDSVNQVLSISITSMKALESQIKEFDKAIKALMELLPNVLISIPGIGPVYSAGIMAEIGDINRFDNQASLAKYAGLAWKQHQSGGFEAEVTRLIPLGNRFLKYYLCEAAFSLVRCDKEYSDFYHLKYKEVNRCQHKRALALTARKFVRLVFRLLKDNRLYCPAK

SEQ ID NO: 514734 - protein, 320 aa, unidentified
MSEDYDGRQYVGMDLHRRRSVLVRMTEAGERLETVRIVNDREQLAAVMARAGEDPEVVLEATYGWYWAVDALAELGGCVHLAHPLGVKGFSYRRVKNDERDAADLADLLRMKRLPEAWIAPPATRELRELVRHRAKLVHLRTSLRCQVHAVLANHGVCVPVSDLFGVQGSMLLERAALSAAGRARVDSLLRLIDSFDTQIDQVAKTTARQLANHSGYTAVQTLPGVGPILAAVFVTEIGDITRFPAPAKLASWAGLTPRHYESDTTVHRGRISKQGSGWSAGPRSRPSSESANTLTSAATATASPRAAAATSATSPPPVN

SEQ ID NO: 514735 - protein, 368 aa, unidentified
MSTIHKYVGLDVHKDTISIAVAEEGRSEPRSLKKIPSCGTQLLRILKRLGPLSMIVCAYEAGPTGYWLQRFLTKKGVRCQVIAPSEVPIKPGRHVKTDRIDALALAKFLRSGDLTPITIPNEEIEAMRDLSRTRSDAKLVEKDAKKRLGAFLLRHKWINPFKTNWTGMHLDWVRKQKFGHEAQNIVLREYLSALEQTSARVKRLAESLATLSETCTLRPQIKALRACRGIDTITAAGLMFELVDLKRFPSAPHRMSDLGLVPSEDSSGQKRRQGGITKAGNGEVRRLLVEAAHNNCRPPKVTFRLRKRQEGVSPEVIDIAWNAQERLYRKRLALFNRGKPKTCIVIAMARELAGFIWAIGQETRLVTN

SEQ ID NO: 514736 - protein, 342 aa, unidentified
MNKVAIAAIDLGKHSFHLHAQDDRGHELCRKKFNRVTLIRYLANLESCTVVMEACGGAHFMAQEVAKLGHTPKLIAPHLVRPYVKSNKNDFADAEAICEAAIRPTMRFVPHKTQAQQALAMSNSIRESFIKERTAAVNRIHAALLEVGVSLAAGFKAIRELPTLLEVGSFSERIKKNLMLLHGHFNYLDGQVKTLDKDMECQAAEDDLATRLMTMPCVGPITSTVLAAELGDGKQFKCGRGYAASIGLVPKQHSTGGKTVLLGISKRGDRNQRRLLIQCARVYLIQLERQKGALADWVRQLLASHHHSNLVVCALANKLARIAWAIAAHHTEFDAGPSTMNA

SEQ ID NO: 514737 - protein, 332 aa, unidentified
MSIIGCDLHTRYQVIAMLDFETGEISTRRLEHEGEEARRFYAGLGKPALIGIEATGYTQWFERLVAELGHELWVGDPAEIRARAVRRQKTDTRDAEHMLDLLVNHRFPRVWVPTPEERDYRQLLKHRDKLVKMQTSVRNQLHFLAMSQGVCRKRRLWSTRGRRELEALQLGRWASIRRQELLALLDGLGPRIEEMDRAVKAEALRRPEAVRLMEQQGVGPVTALAFVLTVGPVERFPSSRKLVSYLGLNPREDSSGGHQRLGHISKQGNEMLRWLLVEAGHTAARLDPELGRVYQRLKFRRGGRVAKVAIARRLAVRLYWRLRNGNAGSHVQ

SEQ ID NO: 514738 - protein, 307 aa, unidentified
MTVCIGIDVSKHALEWSGGAEGRIQHTRNEPRPIAQLVRRLAELEAERIVVESTGGYERKLVLKLAEAGLPVVVVNPRRVRRFGEGMGILAKTDAIDARLLALFGEKVEPPIRPILQGTERLLADLVARRRQLIAMVVAEKNRRDTAAEPVRRTIDALLRTLDQHIRDLDRKIEKALLEDSERAELSELLQTVPGVGPGVARTLLIDLPELGHLGRREIASLVGVAPFAKDSGTIRGSRRIRGGCAAVRTALYLAAMTASRFNPVLRDLYERLRQAGKPPKLAFVAVARKLLTILNAIAREKTAWQA

SEQ ID NO: 514739 - protein, 349 aa, unidentified
MAIATIGIDLGKNSCSLAGLDGTGAVVLRRRFSRARLVAFLAGQPPCVVAMEACCGAHHLGRVFATQGHEVRLMSPEYVQPYVKAQKNDDRDAEAIAEAATRPTMRFVALKSEAQLDQQTLHRARSRLVNGRTRLMNQLRAILLERGITVAKGRRALGLALGDLLGDERSGQSSGQSSGLSLRMRMLLGAMREEWAELDMRIAALDREFVETARNSAPARRLATIPGIGALNATALTAAVGEAEDFASARDLAAWLGLVPRQTTTGGKARLGGITKRGNVYLRTLLIHGARAALPGLSRGETPLGAWLRGLLERAHPNVVVVALAAKLARIAWAVLRSGADYDRRAADA

SEQ ID NO: 514740 - protein, 484 aa, unidentified
MAKRKMSTFERLSTGQMNRAQRRELGRRVVANDPGLTIVHPNAGGIDVGNASHFVAVPPDRDGNPVREFGCWTAALNEMAEWLESCRVDTVAMQATGVYWIALYDVLEQHGIRVVLVNARHTKNVPGRKTDVQECQWLMKLHTYGLMRDSFRLQQDMEFVRTIWRVRDRHVKEAGRAVQHMQKALTKMNIQLANVISDISGDSGQAIITAVVKGERDPYKLADLADYRVKASREEVARSLEGNWRSDVLFELQQAVDSYHFAHRQMQECDDKLSLYLATLPGRMLEIPAPSNGSLETAVQKRKKARKPRDNEPRMDMKGELKRICGVDLTSIDGINVMTAFTVISEIGTDMSGFKDENHFASWLGLTPSKDISAGKTVRRGKKKVNNRVAVALRTAATTLLESDSYLGARYRHLRRQLPTFASAVKAMAHYLALLVYRMFTKGEAWVDRGAAQFERRRTEREMVSLNSRARANGFKLIPIAEAS

SEQ ID NO: 514741 - protein, 355 aa, unidentified
MLYTGLDLHRSFSYITTMNDKGEIIGQKKLPSNGEIAEFLKEFDDTMEVAIEASPSWYWLYDNLEGEGFDVKLSHPLKTKAIASAKVKTDKVDSVTLAHLLRSDLLPLSYVPEKPVRLNRELLRYRASLVKVQTGLKNKIHTILAKNNVSHDYTDLFGKEGMAFLHSLSLSENYKIALEGYLTVLETVRGEIKRASRKVQQLAEEDQGAVLLMTIPGVGYYSALMIKSEMGDVKRFPSAKQLCSYAGLVPSTYASGNTSYHGHITKQGSRWLRWILIEAAIHAVKRPGPLRRFYFKIERKKGGKVAKVATARKLLEWIYHMMRDNKSFKEVEGLAELQGEGKPVKKPGLYFRPSI

SEQ ID NO: 514742 - protein, 315 aa, unidentified
MSENKVEMFVGIDVSKSTLEVRIEPPGEAFQVDNDEKGIKELCTRLSELAPTLIVMEATGGLEMRAAGELAAQGLCLAVVNPRQVRDFAKASGQLAKTDRIDTHVLCGFGRAIRPVARPIKDALVQELDDLVSRRRQLVEMRVQETLRLHGASKVQAKSLKAHIGWLDKRIKDIETDLGARLRSSDAWRVKDDLLLSIPGVGEITSRSVLSRCPEIGKLTRREIAKLAGLAPLNNDSGKYRGERHIWGGRADVRSVLYMATVSAIRCNPVIKQFAAKLKLAGKAPKVVIVACMRKLLTIMNAMIKSNTPWNPKTA

SEQ ID NO: 514743 - protein, 440 aa, unidentified
MRVMYERCCGLDIHKSSIAACALITEKGKPQEETRRFGTMTGDLRELAGWLQQKGIRHVAMESTGVYWKPVWNILEPAGFELLLANAQEVKVVPGRKTDQKDSQWIADLHKHGLLRKSFVPPRAIRDLRDLTRTRAILTQEHTAVCNRIQKVLEDANIKLGSVASDVFGVSGRAILRALMKEEKDPEVLAELSKGTLRKKIPQLRRALEGQITAHHRSLLTGHWNRMEFLERQIADLETQIAQRMKPTPEEMALTIQNAAEGAPLPLSPREEAIQLWMEIPGVGWTAACSMVAELGVNMDQFPSAAHVASWAGLCPGNNESAGKRLSGKTRKGNVWLRRTMCEVAWAASHTKDSYFAAQFRRIASRRGNKRALVALAHSILVTAYHILKHKRHYMELGGDFFDVINRDKVRNRLVQRLTKLGFEVKLKPKDAVETTSATN

SEQ ID NO: 514744 - protein, 429 aa, unidentified
MHFKKVSRVLCPSSHKENRMEPKLVVASIDVHKKMLAVVVVDEDHPHQALEQRKFGTNGGELKHLAAWLASHGVNLVVMESTALYWRPVWLALEGQYILHLAQAQSNAAPRGRKSDYADALRLARRFLAAELRLSFVPDAEQRTWRCLSRGKHQKRRRRVQIQNQIEALLEESQIKLSSVITDLLGVTGYRILKALSEGETDPAKLAAMAAHNLRASQEQLAEAVSGPMQSRHRTVLAMQLEELDLLDKHIAELSRQLGDALRLHQDAVLRLCEMPGLREDAAWQIIAELGPAATAFETAEQMASWIGVCPGRKESAGASKSNRSPKGNRTMRRVLNQVAWSAVRTKDSFFRELYHRLIPRLGVHKAIWAIAHRMAKVAWKILHDKVRYIERGPLALDPAAMKRRVTRLARQMRRLGYTIEVKPVVATT

SEQ ID NO: 514745 - protein, 359 aa, unidentified
MKILAIDLGKDKSVFVEYITGSTDPKQHTYGTIPTDPQHMHDLLAKTRPDRLVIEACPSAGWVHDLAAAMDIQTQVANTNDERWQWRRAKKKSDRVDALKCAQMSEMGCLPTVHMPNPKVRQWRSLIEYRHGLVDRRTAIKNSIRSIFHRQGERLPSGQKAFGIAGIAQLKKEARPLNQCSALELWRGQLQVELEALESVQKQVLEVEAKLADLAKENQRVQLLKSAPCVGPRLSELVVAVLDEPGRFKNAKQVGAYAGLTPRQWQSGKSVREGHISGFGHPLLRELLVEISWLGVRYNTWMKSVYENVRRGSDKRKKVAIVAVARRLLIRLWAMLRDGTKWKELRTQINHAAPQAVFV

SEQ ID NO: 514746 - protein, 345 aa, unidentified
MKKNIIGIDFSKETFDATLLDCRNSELSEAVQSAVHEKFTNNKEGFQAFVKWIKSSVKKITPDELLLCGEKTGKYSLPLSNFLYAKGYSIWIDSGLRIKRSLGISRGKSDKADSLKIALYAYRYQDMAVCYVPLSKNVSRLKELFLYRQHLVSQVKAMDVRKNVTDDFKKELGDVKFIVDSAAKIIQQIKATIKKCEEKMQELIEEDDELKTTHDSITSIKGISLINATAFIAYTNNFKDFGGNAKKIATYWGVAAFAQESGTSVHKVARVSKIASKMLKSLLTQAARITVRWEPKFRQYFEQLISRGKHQGVALNNVKNKLIHVITALAVSKEKYNREYEYIKR

SEQ ID NO: 514747 - protein, 363 aa, unidentified
MTSMTTNSTAVTGGVDTHGQTHHAAALDSLGRQLGDREFPTTPAGYRALVNWLQTYGHLERVGVEGTGTYGAGLTRQLRAAGVTVVEVDRPDRKARRAQGKSDPLDAYSAARAALARKATGVPKTQDGRVEAIRILRVARSSAVKARSQATNQLKALLVTAPAELREQLRTLSNTKLIATCARLRPTGDIADPAHATKTALRRLARRHQYLSEEISAADTELRTLVTAAAPRLIALPGVGTAVAGQILITAGDNPDRLHSEAAFAHLCGVAPIPASSGRTHRHRLNRGGDRRANNALYIVVLGRLRYDSRTRAYAARRTTEGLSKPEIIRCLKRYVAREIFTILTARTAGDQPHTAHAMSTAA

SEQ ID NO: 514748 - protein, 438 aa, unidentified
MSNKVFFNLNDLFISVGIDVGADFSWMSIALPNQQFVGKPYKILHNSIASLTTAVSKIKEAEELYSLESRIFLESTGIYHYPLFCYLRDKGFNCSVINPIITKNSTNINIRKVHNDRFDSKKAALVGLKPDLKVSLMPSDLALNCRNLCREYYDLMDNRSAYVNKLQGELRMVFPQYLGIFSKVTINTSLTLLETYTSPSAFLKADRQEIIDIIRSTARFGLTYAQNKYNAIIQAATDANQFGYIIDSNIKRIRLYISFIRKYDEEINNILESLHELADANEDADFVKQIHLIETFKGAGFLSAVSIMGEIGDFSAFSKPKQLFAYFGLDPAVKQSGKFEGTKVQMSKRGSAIARRVIHTLTLQSISISRNGEAKNPVLREYYLKKCDSKPKLVAMGAVSHKVCNMIFAILRDNKPFKIIAPQEHIKQYNAAKCDIAA

SEQ ID NO: 514749 - protein, 342 aa, unidentified
MQVTTIGLDIAKNVFQVHGIDAAEKVVVRKQLRRSQVLAFFEALPPCLIGMEACATAHYWARELTKLGHRVRLMPAKDVKAYVKRNKNDAADAEAICEAVRRPTMRFVQTKSAEQQGRLMLHRVRDLLMRQRTQVINALRAHLAELGITAAQGTAGLKELLKIIASDADERLPVDAHASFVVLAAELQAMQTLVGSLEKRIMAQHRGNEASKRLETISGIGFIGATAIAATVTDPTAFRSGRDFAAWIGLVPRQDSTGGKQKLGPISKQGDRYLRRILVVGAHAVLRYAKQNPEKYPWLTQLLARRPFRVVAVALANKMARMAWALLAHGGTYRAPALAAAA

SEQ ID NO: 514750 - protein, 323 aa, unidentified
MTSTVLGIDISKRDFHVSLLKEGRATKPKKFTNNTQGFESLHNWLQQKNVVELHACMEATSIYGEALAEFLYGEGFQVSIVNPARIKGFAKSELLRTKTDSVDAALIARFCAAMKPSLWTPTAPEVKELQALLRRLESVTEMMTSEQNRLETATPTVAALTQSHLDYLKQQQQLIKKLISDHFDQYPHLKQQRELLTSIPGIGDLTASILLAEIGDVSDYDNARQLAAYAGLTPCERSSGTSVKGKTRLSCTGNVRLRKALYLPAVVAMRYNPLLKAMSDRLLGRGKVKMQVIGALMRKLVHLAFGILKSQKPFDPNYLTATP

SEQ ID NO: 514751 - protein, 476 aa, unidentified
MAKRTGPASGRRKTARNAERRKRAKKEVRAVLGLPVLHADTAGIDIGATEIYVAVPADRDEEPVRCFEAYTGDLRGIAEWLGKCEVKRVAMESTGVYWIPLWQILADAGFEVCLVNARHFKNVPGKKTDVEDCQWLQFLHSVGLLRGSYRPEQAICGVRTLLRYRLELIRFAAEHIQHMQKALEQMNVKLSHVISDLMGVSGLAIVDAILSGERDLRKLAQLRDPRVQASEETIMKSLEGDYRPEHLITLQHSLDLYRHYQKKIGELDQKMETFMSELPDRIDIRKYPMPPRRKKSRAHKAHNTPAFDLRTHCYRILGVDLTAIDGIDEITAHTVVTEVGPDLSAFPSEAEFAAWLRLCPNHGISGGKILSRATRKGKSRLAVALRNAAATLYSSQSPLGEYFRRMKARMGPAQAITAAAHKLARIIYHMITTGEAFDPEILARQDEKQQQKKEAKLRRQAKECGFELVRMQAAQA

SEQ ID NO: 514752 - protein, 364 aa, unidentified
MQKVTTHVGLDVHSERIVFATLEGLSREPSIRDIPNDPKIIRRTFKRLAAEAYDLRCCYEAGPCGFELFRQLTDMGIACEVIAPSLIPVKAGERIKTDRRDAAKLARLYRAGELTTITVPTQDQEAVRDLVRAREDVRKDLTSARHRLGKFLIRHGRVFHDGTNWTQKFWVWLRRQQFERECERLTFEHYIVEVEHLSTRREQLDREIERVARTDPYAASVGKLACLRGVSTLSAMALLAEIGDFRRFEHPRQLMAFVGLVPSEYSSGGKEKRGGITKTGNSHVRRILVEAGWSYRHRPAFGPRARMAAKDQPPAVVEFSKRAQLRLHHRYSRLVGKGKKSQVAVTAVARELCGFVWGLMTMAA

SEQ ID NO: 514753 - protein, 360 aa, unidentified
MVSQRTSVGLDVHARSVVACGLDRETGEVVERRLTPDHHDILSWINGLPGPVSVTYEAGPTGFCLARALAVAGIECQVAAPSKLIRPAGDRVKTDARDAAHLARLLHLGQITAVAVPTADQEAARDLVRAREDCRGDLMAARHRLSKLLLRQGIVYYDGAAWTNRHELWLRKQRFDNRALQLTYDAAFDAMSACIDRRERLEAAIDAMAADSEFTPVVRRLGCIRGIATLTAFGLATEIGDWRRLTGRTIGAYLGLVPSEFSSGGSRVQGEVTKTGNKHVRRLLVEAAWHHRSPYRPGQVLRRRWDLASPAARARGQAANRRLHYRWTGFDQRRKRSVVANIAVARELAGWCWSLAVLDE

SEQ ID NO: 514754 - protein, 339 aa, unidentified
MELYCGMDLHSSNTVIGIVDEQRNHVIDRKLPNDPELIRSFLKPYKSDLKGIVVESTYNWYWLADLLQEETYQVHLSHPVANQQYKGLKHSNDKHEAFWLAELLNLGILKEGYIYPRQVRSLRDVLRKRAHLVRVRTALIVSLQHLVHRNCGVKVKTGDIKRLTADLISPCLNKDEALLLAGQTSKEAINCLTRQIDKIEVWALKRLRREGVFTRLVSLPGVGDILGMTILMETGPISRFREVGNFASYCRKVSSQWTSNDKVKGRGNIRNGNRYLAWAFSEAAEHARRTNEACRRFYDRKLRQTNTKVAHNALAHKLARAAYYIIKDHVSYQEGKMFS

SEQ ID NO: 514755 - protein, 430 aa, unidentified
MNLKPIAGIDVAKYFSEMVIISPTNEIIARLTIRHNNPSDFDRAIEILKKVEEDFAARPIIVMEATGHYHKILSRFFTSNGWDVSIINPIQSNSIKNAGVRKVKNDKTDALWIALTFRLTDSTVVQPSSEILDCLKNLCRQYYNLSDELTSYKYRLTSVVDQIMLNFKEVFPDICSKTSLAILENYPTPTDILGADSEKLISIIQLTSKKSYQWAKEKYELLVAKAKQFQPFSISDLATVTMLKVYINMVLNLQQNIDKIFEAINQLVQQSSQSQPSLMENINLLQSIPGIGFLSAATILAEIGDFEKFSKPNKLVAFFGVDPSVNQSGQFVGTKNKMSKRGSKILRRILFTIALANIRTKRNSKPCNPVLFEYYQKKCQQKPKKVALGAVMRKIICIIFAVMRDKKPFELRTPEEHIQKYFNKTAVCSA

SEQ ID NO: 514756 - protein, 339 aa, unidentified
MTIVIGVDAHKKSHTLVAVDATGRKLAQKTIATTSEDHALAVQWARIAFGDDLVWAVEDCRTLTARLERDLLTSGHKVIRVPPHLMSRSRASSRERGKSDPIDALAVARVTQREPDLPIASHDPISIELRLLIDRREDLVAQRTATINRLVWRIHLLDPLHQTPANWNVQKAHKILGEWLATHHGLVAELARDELEDVVRLSGEILALRRRIEKNVRPIAPRLIALQGCGELTAARIIAEVANIKRFRSEAAFARYAGLAPIPHTSGSATVRLRPSRHGNRRLNSAIHRIAITQTVHGGLGQDYFRRRVAEGDNRQRALHALKRRLARVVFSCLQAQAT

SEQ ID NO: 514757 - protein, 394 aa, unidentified
MKLVGIDVGKNSHHFCVMDKETGEFNVTPSSFSNNKEGFDFLINSLKPYSKKSILLGMEDTGHYHVALLKFLLSNGYTVALINPKTTDLTRKMEGGITKNDKLDTITICDVLDTPERKKQYRITKVDRFDLYEQRQLTRHHHNLKEELNIYCNRLQKSIDLVFPEFNTLFGSKYGVVYMNLLKTFGSAEAIASTDIRTIRKCFEIKGRGGRISLTAEKLKECAKNSIGISSEVETIQIKHLVSQIMLIKEQIAEIDKKIEELSITNNSPILSIPGISHFSGTSILAELGDIGNYSKPSQIIKFAGVAPYHYESSQYNAQHTAITKKGSKYLRKTLYQVILPVINNNPVFKKYYRLKISQGKGHRCAQGHCIRKLLRVIYHLLETGQSFDPALLR

SEQ ID NO: 514758 - protein, 341 aa, unidentified
MAVAGGLDLHRGQLTFDYVDTGTGESWRGRICPADRESLRGWLRRFHGVPDVGFAVEGCTGWRYVVEELQRAGITPHLAEPAETAGLRGSKRRAKTDWADARHLRDLLLDGRIPESWIPPAHVLEARALVRLYKDLLEERTSWQQRVHATLFHQGIPVVPKLGTADGQQRLDAAELSAAGRLAVQAGLRQIERLSQEMASLRRELTRLSSRQPGCRALRRAHYGIGGLLSVAVWAELGDCRRFSSSDDAVRHTGLDITIYDSDGKRARGHVARQGPPVLRWALYEAALYASRPASPDYAYFCEVRDRIDGQRALLSVARKLARRCYHTLRDLGEDALAPAA

SEQ ID NO: 514759 - protein, 331 aa, unidentified
MQSGVLTRALSLPDGGFMSKAIVGVDVSKGWLDIARADGSEVVRIANTQAAIAAWVLEARVDGLQLVAFEPTGGYERDLRDVLRAHGVVFVRVHPNQVVAFRKSRRIKAKTDRIDARLIAQFAAEELLRRGLPIAIAGDEALRELTARRRQLVDTLQAEKCRLAIARSAVVRASLTASISGLQASLEAIQVALLSHITANPELAQQHALLQTLKGIGPVSAMTLIAELPELGRLSGKQIAALIGLAPQTHESGKSTHRAATGKGRGDIRRVLFNAARCAIRHNHIMRDFYRRLVEQNKRAGKVALVGVMRKMLVTLNAIARDQQPWKHHAA

SEQ ID NO: 514760 - protein, 345 aa, unidentified
MFKIFRNNCCGLDVHKTWIFACIGITDSLKRTEYKQARFSSFSKGLQELYDWLSKYNCTDVCMESTGKYWIPVFNVLEKNNIWVTLSHPKYTKPQKGNKTDRKDARWICDLYMCGMVKPSFIPPADIRELRDLVRYRFKLTCMITGEKNRAHNCLTVSNFKLDDVFSDIFGKSSRSITEQILQHPGETFDVAPFVDGRCKTPIGEIQAAVDGAISKEQAVKLRQCLNHIDELEMHKVEIEREIFRFSDKYESVLYLIRTIPGFDKNPLTAIQVLSEIGGDMSVFPTAKNLVSWAGCCPRNDRSNHKIKFTRISRAGSYFKPVLVQIANARSNLRNILNLPLGIDV

SEQ ID NO: 514761 - protein, 364 aa, unidentified
MNKCRLNTELSSHEETRSQFNGCTGVIKLGIDVHQQFYVVVLQEGGSNPKPPQRFAKEAFLHWAAKLKSQGGEVHAVYEACGFGFGLQRKLSALGIQCYVVCPQKLDERNRRVKTDGLDAKALCLKLDRFVQGNGHALALVRVPSEREEQLRAIHRQREQLIKATKQLEAQGRSLMVNHGMEPVKRWWKPRTFAALQMPAWIKELLGNSQPILLALQQKVRALTLQLQSSAALNQPRGLGAMTSVIIDREIGDWKRFDNRRQVASYTGLCPGEYSSGNTRLQSCVTKHGNPRLRAALVELAWRLVRFQPNYRPILKWKEILHRGALATGAARKKAIVAVARQLAVDLWRIRTGQVSPETLGLIN

SEQ ID NO: 514762 - protein, 385 aa, unidentified
MFYVGIDIAKNKHDLACIDETGEIVITNFRFTNSYQGFKDLRLKLEQLSSITQDVQIALESTGHYNYNIVAFLRELGYNVFAYNPFIIKQFANSQSLRKTKTDSKDALLIARKLRSDVTPEYYQTDKVMDELKELTRYQNRLIHSRSKCKNLYVRLLDIIFPELHGIVKNLHNQFVYELLTNYPSSQKIARAHFSSLLKIKRLTADKAHQIQEAAKQTIGNASPALSLELVQLIESIRHYDKQINQVQEEINLLMVELNSPITSIPGIGNRLGAIILAEIKNIHNFKNPNQLQAFAGLDPAIYQSGQMDKTEHMVKRGSSYLRYALYKAAKLISIYSPHFKAYLKLKISQGKHYNVAVTLVAKKLIRIIYHLLKNNQTFDEAKLR

SEQ ID NO: 514763 - protein, 340 aa, unidentified
MKLYSAIDLHSSSNHLAVMNEDMKRVLVKKLANNTQLILDTLAPHREAITGVVVESTYNWYWLVDALMEAGYQVHLANPSAIQRYKGLKYTDDTHDACWLARLLSLNILPEGYIYPKQDRPVRDLLRKRGHLVRLRTSLLLSLQNIITRSRNVKVASKDLKKLTEDCVSAHMCGHDALELCGTVSKETIDVLTRQIQRIESSVLKTLKPTVSYRDLITMPGVGPVLALTIALETGPISRFATVGCYASYCRKVASIWLSNDKRKGTGNRKNGNRYLAWAFSEAAEHARQHHRASRRFYDRKRSQSNLWVAHNALAHKLSRAAYYIMRDNVPFAEHKLYCS

SEQ ID NO: 514764 - protein, 363 aa, unidentified
MEEEKRRYVGIDLGKREYTMAIIGKNGKMSIHQGKTSIQGRQGLYRLLEKNDKVALEAGNLAFILAREMTEQEGCEVRVLNSAKLPLIWDAPTKTDKEDAMKLAHLIEERRDEKLPIVPLPSEKELERRSRVASYRRSVYGKSRMINALHAMFVHQGHTTVVKKDLSTAERRRTAIEVLRGEEREEAAYLLQHIDLYEMRIKVLKSKIQQEAKTDENMVRLQSIAGVGPIVAYAYVSYVGDGSRFSTGSQVSNYLGFVPRLEYSGTIQRQGHISKRGNGYLRGLLVQAAWAAVRSKSGGALRERYKQKTSFQGSSKKKTIVSIGRRMAELMYSVLRNKTTYEPRPWKGTQNETAMLVEQAKSA

SEQ ID NO: 514765 - protein, 348 aa, unidentified
MNYYAGIDVSVECSSVCIVDASGKIVREARVETTPEAIIGWLGSFGHPIERIGVEAGPLSQWLHRAMSEAGLAVELLETRHVRNALKTMTVKSDRKDARGIAQLMRTGWFRPVHCKSMEAQEVRAILGARKLVQSKLLDVENSLRGTLRNFGLKVGHTTTRSFAGRIQELVAGHPSLEVIGTSLLSVRDVLLRELNGFEKRVRAMARTDARTRLLMSVPAVGPIIALTYASAIDDPSRFKSSKQVGPHFGLTPKRYQSGETDRSGRISKVGDAAVREALYQAAHVMLTKPVRGCTALKSWAMRIAKRAGMKKAKVALARKLAVIMHRMLADNVAFNPAPQAASSAMAA

SEQ ID NO: 514766 - protein, 344 aa, unidentified
MNCYAGIDVSLRSCAVCIVDGRGKVLFEQELPCEVEDITKCLNGFAHDIERVGFEAGTLSQHLYFGLTAANFDVVCMEARQVNAALSAMRNKTDKNDARGIAQVLRTGWFSPVHMKSREAHGQRTLLSTRKALLKKTMDLANEVRGLLKIFGIRLPKTVKHGGFDDVVRPMIEMDDVLAHALVPLLDARLVLYQHYLELDRRVKRAATHDKVCMRMMTVPGVGPIAALSFKAAVDDPTRFKRSRTVAAHFGLTPRRYQSGEHDNPGRISKAGDRDVRATLYAAANALLMRTMAGSQIKSWGMRLMRTKGRRRAVVAVARKLAVLLHRMWIDGTEFRQDQVGGKV

SEQ ID NO: 514767 - protein, 321 aa, unidentified
MNPVPTTPCYVGVDVSSQRLDVFILAARKRYHVANNTDGCEKLVILIGRHQPSCIVLEGTGGLEKLAALHLSKAGLPVAVVNPRQVRDFAKAIGKLAKTDRIDAEVLARFAEATKIEPRFVPDEERMELEELAARRSQLLVMLNMEQNRLLRVLAASIRASIQTNIEHLKRQLKQIDDEINRKIEASPIWRTQDNLLQSVKGIGPTTSAALIASLPELGLLNRRQIASLVGVAPFNMDSGKLHGKRSIRGGRADIRKSLYMATLVACRWNPTIKAFADRLLQAGKRKKVAIIACMRKLLIMLNAMMKQEYAKQNLNLTRAA

SEQ ID NO: 514768 - protein, 374 aa, unidentified
MEESTVFVGLDVHKDSISVALVTVEGLAVEIGQFANTEAAVGQLVRRLARKHGRLVLAYEAGPCGYGLYRQLTSMGHACVVAAPSLIPRRPGDRIKTDRRDALTLARMLRMGELTAVWVPDPAHEAIRDLVRCREDFKQAERRCRQRLCGFLLRHGRYYAKSKWTQEHRRWLMSQSFDEPALAKVFGHYHHAILEAEERVAQLEREMAESLDSWSLAPLVRGLMAMRGVRLVTAMTLAAELGDLSRFARAGDLMSFVGLVASEHSSGQSRRQGGITKSGNRHVRRVLVESAWSYRHKPCWSAALRARARDASEAVRAIAWKAQKRLCSRYHRLTSRGKAAQTAITAVAREEVGFIWAIGRQVMQEQRALAEANV

SEQ ID NO: 514769 - protein, 397 aa, unidentified
MYIVGIDIAKRKHEAAVIDGEGAVIIKPFSFTNNCSGYNRLLAMLTKAKLPLDEVSFAMEATGHYWLALFTRLQKEGFRVQVINPVQTNSIRSFYIRQAKTDPRDALLIAEVIRFGHFSESTLHPENIYELRELCRGRHAIVSMQADVKRKVVALLDQVFPEYETAFANMFGDTSMAILQTCPTPKELSEMRLEELCHLIEVSSHKRFRMAKAQELQELARNSFGFAMAGDVFSTMIRLYAKHLDFLKQQVREMDRKIAEIMETLDTPITTITGIGLTLGAYILSEIGDISRFSSAAKLAAYAGIDPTMRQSGEYNGVRNRMSKRGSPYLRHAIWLAASSAVLHDPALKLYFQKKRDEGKPYMASVGHACRKMVSIIYAVMRDNKAYTPYIPNEISV

SEQ ID NO: 514770 - protein, 362 aa, unidentified
MSSIALERTDVIVGVDTHKDEHVAVVIDGLGGRLGEYYLSVTNGGYTELLAWAKTFGRVHVFGVEGTGSYGMGLARFLRRHAQTVIEVSRPPRAGQRRLDGKSDPIDAEQAARHVLAGQATATPKVSDGAVEAIRLTRIARNSAVKAHTQAIVTLKATLVTASDELRAKLEPLSNYKLMTACVGLDSDGDPSDPDVAMRHVLYSLAGRWLDLHEEIKTHTKRLKKLTTATAPRLLDAFGIGPDIAGELLVAAGDNTDRIRSEAAFAKLCGACPIPAGSGKTGGRHRLNRGGNRQANAALFRVVIVRMRWHPPTIAYVERRTTEGLSKKEIIRCLKRYVAREVYNLLPPPRDHGESLSPACNL

SEQ ID NO: 514771 - protein, 410 aa, unidentified
MTSGKENEELLPHHTIVIKTEWEIGTHYRLDFPRQNQTEVIMTFFIGVDLHKTQFTVHVRTEEESESLDQIKQYPTTAAGYAEFLARIAAYKATGSDVKIGVESTGNTRFFKNQVEKAGAEVTVINTLKFKVINESAKKTDKHDASTISEFLSKDMLPESYLCGKETENLRRLLKSRERLVRSTVGQKNEIHALLVSLGLSDELRSLQSKKGRRKVLDTLESNNDYVLEAQSVKLMFEIIERIEESVKSIEKQLVELTKEDEMVNRLLTIRGCGKITAWTIRAYTEDISRFASAKKYAAFCGLVPWVQDSNETIHHGKITKRGPQELRVSFVQLVMGIRRCKDTSEWRMMQRYEYMKKNKGSGKSIVAAARKMAEIVWAMLSDKQDFDSAKMIGRYKPMTLADEALSAMN

SEQ ID NO: 514772 - protein, 317 aa, unidentified
MTQEQVVVGIDIAKEKIDAAIRLGGEGCFATSTEGRRQLLAWVKEHEVDKAVMEASGGYEKSWARLLRGVGVEVAIVDPKRVRHFAKSAGQQAKNDPIDARMIAWFGEAFSDRLGKPDDAEREELDQLVTARRGIARLKDRINSWGEHEQPKAVQKVYHALLKEMARQQAKLEALIATKIEKTERFAQRAEIIESVPGLADTAAAGLIAFLPELGLVDRQAASALLGAAPFDDDSGKRRGQRHIQGGRRKLRCLLYVPTLGAATQHNPVLKAHYQRLIARGKPHKVALIACMRKLIGILNTMLARGEKWDPAKHAIA

SEQ ID NO: 514773 - protein, 423 aa, unidentified
MEKTAARKRKQVPEGYLIIGVDPHKKRHAAVAITQDFTTRDKFKFDNTREGLETVLRRARIEMVKSGCRGVMFAIETGGHYWRNIAYFLDEQGIPFRFINQFTLKRRREGKDLNRRKNDYRDSEVAAQLLCTGEFTETKVPQGVYAELRTAHSAYRRLVKERTRITNLVKGLLDGLFPEFTQVFIDPCALTALSVLSTCIIPKVIAGMTEDEFVATIEAKHKGRLMRKKLRVLHYSARTSIGINAGARSVSSEISFLVEKLELIRQHIRLIERPLVSLVDETEEGKYLLSIRGLNYIAVAGLLAELGCFKAYRSAKQMIKMAGSNPTESESAGKRGTHTPMSKQGRPVLRYCAWTSVIPMLRFNPDFRAWAKQRRERPAHANPLNGREVVGAALNRLLRLAFAMVKSQTYYQVSKPELTLVAV

SEQ ID NO: 514774 - protein, 349 aa, unidentified
MSEIATIGLDIAKNVFQVHAVDRTGKIILRKALRRSQIQGFFSTLQPCLIGLEACATAHHWARTLMAFGHDVRLIPPAYVKPYLRRQKNDAADAAAICEAVTRPSMRFVPVKSPQQQSTLMLHGARDLLIGQRTALINALRGHFAELGIVVAQGARNTRQLIALIHDNASPDLPVTARIALQPLAAMLIGIEAQIAKLDKAILAAHRSDPVSTRLAGIPGIGPIVASCLSASIPDASLFQGSREFAAYLGLVPRQHSTGGKARLGSISKMGNRHLRKLLVIGAHAALYSMKSGKTRTAMADWARSLLAKKPFKVVAVALANKMARIAWAVMARSTAYEPGRKGVAASAA

SEQ ID NO: 514775 - protein, 359 aa, unidentified
MNHTAATNNTASIAWLGLDAHSKNCVLGHLDDQGRELQWWRFPTQPQQLIAHIQAIPAADKRLMLEESNLARWLGELLRPHVQQLVVCDARRNRLISHDPHKHDQRDAFAQARLLRLNEYKPVWQPTEPQRVLFKRSAKAYELAVQRQTRLKLQLKACFQHWGLFPTGSTVFSQAGRAPWLKQLPYDALRAQTLLLYELLDQALASQTQFRRLLVQTGRPFPEVARLRTVPGIGLVGAHLFVAYLQDPKRFTTFSQLTRYCRLGIRDRSSDDKPLGYQQLDRQGSGTLKAISYRAFLQAAKRRSGPVWDFYELSLRHTGSTTHARLNTQRKILLALWTLWLTGKEFEPAKFSRSQPIDV

SEQ ID NO: 514776 - protein, 423 aa, unidentified
MGYQRRKGASAVDVIHPRCAGLDISKRDAKVCVRINGAGRRKTTETVATFGATTRQIMAMRDHLAAQKVTCVVMEATGDYWKPFYYLLEDLTGVEVMLVNARHVKNLPGRKTDVADATWLAQLGAHGLVRGSFVPPEPIRQLRDLTRTRTAVTRERTREIQRLEKLLEDAGIKLSSVAADLNGASSRAMLDALLAGETDPATMADLAKKQLRRKIPQLTEALYGRFNAHHAFLTRMHLDLIDQHTAAIEALTERIEVVMKPFRRFRDLICTIPGIGGYTADVVVAETGADMTKFPTAQHLASWAGTTPGNNESAGKIKSRRTRPGNPYLQGALGTAAMSISHTRDTYLAAKYRRITARRGPLRANVAVQRALLVAIWNIATTNTAYHDPGGDYFTRLNPQKARSNAVRQLEAMGYHVTLEQAS

SEQ ID NO: 514777 - protein, 414 aa, unidentified
MDVLHERCAGLDISKKDAKVCIRTPSSKRRGSFTTETTTWGSTTNAVLDLRDHLLAARVTLVVIEATSDYWKPFHYVLSEGLNVILVNARQVKNLPGRKTDVSDAAWLAQLGAHGLVRPSFVPPEPVRELRDLTRARTTATRERSRVVQRLEKLLEDTGIKLSAVASDIMGVSGRAMLEALIRGEGDPQTLADLAKRRLRNKIPELTEALTGRFREHHAFLTRLHLDQYDQLTTMIDQLSGRIEEAMAPFHGALDLLDTIPGINQAVAEVIIAETGGDMNRFATAKHLASWAGVCPGHHESAGRTKNTKVRPGNPYLKGALGLAAFGAVRTKDTYLAARYKRLTARRGPLRALVAVEHSIITAIWHMLSDHVGYQELGGTYFTQRDPERATRRAITALNQLGYTVTLNPRETAV

SEQ ID NO: 514778 - protein, 424 aa, unidentified
MSWLTLDVLLLARLLLKLAVGPVLERKGDITMIYVGLDIAAEKHDCCIMTEERQVLKQFVFRNDAEGFEFLKKTLTKLAPTEEIKIGLENTGVYGSNLVQFLRRNGYKTYTFNPLLINKSIQATTLRKTKTDKADAKFLAQYLTWDNSQPDHDVSYHISELKSLSRLRFSLVQQRSKCKTQAKGVLAQVFPELTQVFSDVFGTTARTILSLCPSAQRIAAYPVPQLADLLRTTSRGQLGLEKAELLHALAVHSVGNSSIALELQLQIYLEQITQLSFHICRCEAALRTILAQMDSPITTIPGIGTVLGATILGEIGDIFRFSSPAKLLSFAGLEPSITCSGKSVSAPGRMVKHGSHYLRWAFGQAARCIILRDQTFAAYASKKRAEGKHFNVVCSHVAKKLVRLVFALLKNHSSFIPNYSSLAA

SEQ ID NO: 514779 - protein, 344 aa, unidentified
MKYVGVDLHKQIIVLCVVMVVSGQRQVLARRKFACRDVAALDEFFASLGRFQLAVEATSAYQWLLERVERIADRIVLVHPRKMRIIAESRRKTDRLDAQILAEFLAAGELPEAWRPTPRVREHRTLVRQLNHHRRRTSSLKCRLRNIMARYNADVPHLFTAAGRSHMAQSPLSPADRFVADQLWEMLDFQHRQRLAIHRQLTQFAAQAPIAEREARAVLESVPCVGPVTIEVVLSELGDVRRFDAQNDIVQYAGLAPGVRESAGHRHSQGITKEGSPLLRWTLIQLAWRLVNKTRRWGFVYENLKRRCGSKKAIVAVARRVLCVLASILRSGQRYNMATEVFAA

SEQ ID NO: 514780 - protein, 409 aa, unidentified
MQVVYPRCAGLDVHKKDVYACALVVDENGQKRQQIRKFSTVTVELLKLADWLQSHAVTHVAMEATGVYWRPIWAILEGQFELLLVNPHHVKAMPGRKTDAKDCEWLAALLQHGLVRGSFVPPTEIQDLRDLTRYRIELTQSQNRVANRIQKVLEQANIKLSSVASDTLGVSGQLMIQAIIDGEEDPERLADFAKRKLRQRIPELQVALSGRIRPHHRFMLREHFDEWKTLSERIQRVEQEIDRAIAPFEQAVMRWKTIPGIDRVTACCLVAELGVNMAQYPSAQHLASWAGICPGHNESGGKRMSGKIREGNRWLRRALCQAAWAATRKKNSYLSAQFKRLSSRRGVKRALIAVAHSILIIAYTMMKNAQDYKEVGGDYFERLNHTQLQRHLIRRLQRLGLTVTVQLAT

SEQ ID NO: 514781 - protein, 369 aa, unidentified
MADRITYVGLDVHKESIVVAVAVGGLRGEVREYGRIANTAAALDRLMRKLSGEGVGLRFCYEAGPCGYGIQRHLSAHGHECMVVAPSLIPKRAGDRVKTDRRDAASLARLHRAGELTAVWVPDAGHEAMRDLVRARLDAVHALRRARQQLSGFLLRQGCHYRRPAWTKLHRRWLAGLKFELAVHHIVLEDYVQAVEAAAARRDRLTAQIEAMLPDWSLAPVVAALQTMRGMALVNAATLIAELGDLSRFANPRQLMAYLGLVPSEHSSGASIRRGGITKAGNAAARRLLIEAAWSYRFPARLSRELLLRQESQPKLIRDIAWKGQLRLCARYRRLARTGKPANIVTTAIARELAGFVWAIARQVTVTTD

SEQ ID NO: 514782 - protein, 319 aa, unidentified
MAAVLGIDISKAKFTVALRTPEGKTRRKTCPNTSAGFEELARWLTRQHVTQVHACLEATGTYGEALATWLYDAGHQVSVVNPAVIHAYARVQLARSKTDALDAELIAQFTVTQQPPRWAPPAPEIRALQALIRRLDALHGMHTQETNRLETAAVPDVRASIEAVLSNLATQIAHVKQLIRDHIDRHPGLRLQRALLTSIPGIGEATAAVLIAEVFDKPFSSARQAAAFAGLVPRLSESGTLRGRPRLSKIGPGRVRKALYFPAIAALRFNPTIRAVRARLAAAGKPTMVIIGAAMRHLIHLAYGVLKSKQVYRATYGHP

SEQ ID NO: 514783 - protein, 351 aa, unidentified
MRAVFGIDVSKASSEVAILVNGEKVHGYTMSNDALGFARLLGDLKTVHKPEIIFEATGVYSRRLQAFLDEHGYAYTRLNPLEAKKQLDSLRVRKTDQIDAEKLAQSQFVLNRKPTYVQEEVYQNLRTLSLFYQNLTEDIVRAKNRLHKVLQVTFPELETILSTPSGQQYWNLVIDFPCKDFVLELSKDELSESIRQSTSKRISDKRVAYLVEKLTALANQSYCAVKKTSPMLEEVRYYGKELLRLSEQRQTVLDQMVELAQPLPEYDILLSIPGIAETTATSIIGELGDIRRFQSTNQINAFIGIDLRHYESGNFLAKEHITKRGNPYARKILFKCIHSQSHQSLPYRLLL

SEQ ID NO: 514784 - protein, 353 aa, unidentified
MAIVAERYEFVIGVDTHAATHTFALTVAATGVVQHTTVLPASPAGLDRAVAWINRNTRQAATLIVVDGAGSYGAILTARLTAVGLTVAEAPDLPAGRRRRNGKSDTLDATAIAQAARILDELQLNWPRASGHRTVLRVLTAARDQMTAERTRAVNALTALLRTVDLGIDARRALPATTIATIAGWRTRHEDPTLVICRTEAVRLAQRIRALDTDLAANHQALDQAVTAQAPQLLKLAGVGPVVAATALLAWSHPGRMRSEAAFAALAGVSPLPASSGNTVRHRLNRGGDRRLNRALYTVALVRMGCDPATPRLRQPPHAQGHTKREIMRNLKRYISRKIYRTLNTTNPAPATP

SEQ ID NO: 514785 - protein, 344 aa, unidentified
MEHFAGLDVSVKATSVCIVDDAGRIVREVKVASEPEALLPVLTNPGYCFKRIGLEAGPLSQWLYSALAEAGLPMICVETRHMRAVLKAQINKTDRNDARGMAQIMRAGLYRPVHVKTLRSQKLRMLLTHRKLLQSKAIAIENDLRGTLRNFGLKVGIVGQLKFEASRIKELVENLPDLAALVEPLLVVRRVLREQLGILHRRLRAIVRDDAVCRRLMTVPGVGPVVALTFRATVDVPARFRNSKAVGAVFGLTPSKHQSGESDRTGGISRCGDEMMRVMLYEAAQILLVRSAKWSWLKVWAMKIARHRGMKKAIVALARRLAVVMHRIWVDGTTFHWTRDAVAA

SEQ ID NO: 514786 - protein, 366 aa, unidentified
MKKNSTITTKRTKIFSEKQLTIGMDLGDRFTYYCILDQAGEVVVEQKVATTKQAIQQVFSRIPRSRVALETGAHSPWVSRLLAELGHEVIVAHARNVRLIGESSRKDDRLDARKLAQLARLDPRLLSPVQHRNAEAQIHLTVIRARAALVGARTALVNAARGLAKSYGERLRKCGTQQVSEGLAAGLSAELRAALEPLLAEVASLNQRIAEYDRRIEHLATQVHPEVALLKQIKGVGTLIALTYVLTVADPHRFRRSRDVGCYLGLRPGRRNSGSSQPQMHISKEGDRYLRTLMVQGAHYILGPFGQDSDLRRWGLKLCERGGSNAKKRAVVAVARKLSVLLHKLWVSGEVYEPLHNHRAVESAVA

SEQ ID NO: 514787 - protein, 516 aa, unidentified
MSKTSKKTLRFTPRSPPCEDGKCKARRKPTNADDTELELNVARYGIGFDVHKHTIVTHVQAQLQNASTVEVKQHTFRNSVQGLNELTSFLKNYTPVSHYLMECTGVYHLPLVHKLREAFPERREKIVPMNPLMVHWRITDLGVKSDRADAKDMAMLSFYDSLISPSYVGSAYFYNLRDTMRSYHKAKTQLTRLKNRITRRLDSVNQKFPFDLGKEWCLQLLDFYVSSEGSLRDAYNALLKRKRSEGKSTRVLENHAIDLVDCGSIVLPDELRFLVRLDLSRFLSEDVAQSMLIKEAEAQVLKDEDLRSNYVKLLEVPGIGNATALTVLLELGDYHRFTRWQSLVKYCGVIPTVDQSGEHRSKGHVNKYTNGYLRGALSQAASSLVNRCDRSHDLGRFAYKQRHVRKLPYKKALMKVAQKLARIVYSILLDGITYDWNYEKTTRMREKRKRQLRKKKTLLKSAKVRALKRNIQDFLISNYEYMNSTSRYHLVNGCERMIRRAEHLTKETQGGENEKK

SEQ ID NO: 514788 - protein, 341 aa, unidentified
MGQVNTIGLDIAKRVFQAHGADASGRVVFRKRLVRAKVLAFFAAQPPCTVAMEACAGAHHWARELGKLGHTVRLIPPAYVKPYVKRQKNDRADAEAICEAAQRPSMRFVPVKSEEQQANGVVFRARDLLVRQRTQCINALRGHLSEYGYVFPQGITHAEAVIAHVEDPDSSVPESARAVLKVLIGTFQALEAQIQALEAEITQRAKADPVARRLMTIPGIGPIAATAITALVPAPEGFRAGRDFAAWLGLTPLQKSTGGKQKLGAISKMGERTIRRLLILGASAVVRWAGQRGTPAGSWLARMLARKPKMLVTVALANKTARIVWALLVKGGVYRAPALAA

SEQ ID NO: 514789 - protein, 370 aa, unidentified
MLDTTTFIGLDVHARSIKAVSLDVMTGEVRAATFGYDAGAVAEWVRSVDPRARCVYESGVTGFDLQKRLSGLGVDCVVGAVSKMIKPSADRRRKNDRNDAEFLARMLSVGNVVEVWVPDDECEAARDLTRALEDARDDLSRSKQRLSKFLLRHGLVFDERTPTGRRKGNWTRAHWSWIESIRFAERADNDVLAYYVDAVRRAAEEKARLEGLVEAEARKPRWRRRVDSLRCLKGVDTATAADLVFEAGEFSRFRNARSFAAWVGLTPSEHSSGESDRRGAITKAGNKHLRKALVEAAWHYLTCSARPKEPARGQAPDPGARRHAAKGVRRLVERRGTLLARGVHNNKANVATARELACWVWAVGLMAEEA

SEQ ID NO: 514790 - protein, 366 aa, unidentified
MPSLAHADAIYLGLDVHKDSISVGVLNPGAERVDVERIFADEESVRRLVGRFPDRRLLRVCYEAGPTGYDVARLLSSMGVRCEVIAPSMIPKAPGDRVKTDSRDCRRLARLHRAGELTAIRVPTMSEEAVRDLCRGRSDMVEDLTRARNRLTKFLLRHSRVWRGGANWTIKHDAWLAAQHFDEPAMQTTFEHYLAVLAERSAQLAAIDADLVTWADTEPFRDPVARLAAYRGVSRLGALCLQAEVCDWRRFSRASALMGFVGLVPSEYSSGASTHRGHITKAGNTHLRHQLVEAAWSYQHRPYVGPRIAKRHDGLPPEVVARAWAAQLRLCGRFRHLAAHKNTKSVVAAAVARELAGFLWAEMTAN

SEQ ID NO: 514791 - protein, 413 aa, unidentified
MQDVKELNEMLIPIDVSKYFHKATIVGPRGEVLEDPFEIDIYQEGLQKLLEKVKQNRNGSESKIIFAMEPTSYYHEMLLEQLGKLGHEIQLINPNATARVRRLDYDHIKTDDIDLKVLSRAVELGKGRVVEPKDQDIQRLRYITRQRLRRGKFIKRLKTQVHYHLDAIWPGFVNRYDRPKGLVWNIWESKMAWAIMQVCPNPKKIAKMLPKQLIELFRRHKVSGIGPFRAKKIIAHAQSVVHRACYFPEIRNNLRQDLQLLHHLNTIVSDLENKAVKALPQEAALLTSIKGISPFFAAAFVAEIESITKFATPKQLIKYTGLSISIKKSGMYESSHNHFNKVGNRHLRFVVMMMARSVARCHPDFKAWFERFKKRGMKDRSAIGCVATKLLKTIHNILTKRVEYSSVEFNKRK

SEQ ID NO: 514792 - protein, 343 aa, unidentified
MVHYIGLDVSLKRTSICVVNQVGSVVREGVVESEPEAIAAFVRSKAPGAVRVGLETGPTATWLWTELKRLGLPVICIDARHARAVLKMQINKSDRNDAAGIARIMQTGWFKEVRVKDLDSHSVRALLASRALLVKIKRDLENQIRGLLKNVGLVIGRAKFNVFTMRTEELIADRPQMIAVVGPLLKARQAIEQQTDDLDRKVLKLARYDAQVRSFMTVPGVGPITALCFKATIDDPTRFKRSRSVGAYVGLTTRRHASGEVDWTGRISKCGDAMLRSYLFEAAGVLLTRVPRWSALKAWGMRLAKRNGLRKATVAVARKLAVILHRMWIDGTEFNWSKKEVAA

SEQ ID NO: 514793 - protein, 343 aa, unidentified
MKLHVVGIDLGKTVFHLVGLDSTGKVVIRKKCSRTQLLAFTANLQVQLIGMESCSGSHFLGRALREQGHEVRLMPAQYVKPYVQTNKSDFLDAEAIAEAVQRPRMRFVPIKTEEQLDLQALHRVRERWVMRRTAVVNQIRSLLLERGLTLPKGRSYVDRQLPRILEDGELRLSGCFRVLLAQLKLELEQLTARIEEMDRVIQKTAKENEACQRLTEIPGVGPVTATALIAAVGNASAFQKGRNLAAWMGIVPGEYSTGGKQKLLGISKRGNKYLRTLFIPGARSVVQQRHKQAPGLSSWLAQLLARAHQNVVIVALANKLVRMAWAVLYKKECYRAPVLAVAT

SEQ ID NO: 514794 - protein, 431 aa, unidentified
MNSSLNNDPTQNLYAAFIAIDWADQKHTFSLQVAGQAKKETGTLEQKPEIIGPWVAKLRERFGGRPIAVAVEQSRGALIHALLAYDFLVLYPIHPTTVAKFREAFKFSGAKSDPLDTDQILEILTKHLELLKPLNPDTQETRLLGRLVADRRNAVELRTSHIQALLASLKEYFPQAIELVSGNLTSRLAGDLLKKWPTLESFQQAKPSTIKRFYYGHNVRSPEVIETALKLAISAQPLTTDSAIIESSRRVSEMHSQMIQALNPVIDAYDQRIEKVFHDHPEFPLFSQLPGAGPVMAPRLSAFFGTDRSRYAKAQNVQTFCGISPVTKSSGKTRVVYFRRACPQFQRQSFHEFARLSVASCQWARNYVDYYTGKGKKYNTVIRALAFKWIRILFRCWKDRTPYDDNKYMGILKQRGSIFATLHLEQKNENC

SEQ ID NO: 514795 - protein, 375 aa, unidentified
MRKKVRFLGLDVHAETIAVAVAEPDGEVHSLGTIPNRVESIRKLVKKLGSVEQLQACYEAGPTGYVLYWQLAELGVKCEVIAPTLVPVKAGNRVKTDRRDAEKLARSYRSDDLTAVWVPDEGSEALRDLVRAREAAKQDQLRARNRLSKFLLRSGQRPAPGVKPWTQIYMAWIRQIHFAQMAQESTRLDYLYEVEHMGERVVRLEQAIAEAVKLASPELQEVIKGLQALRGIAPISAVTLAAELGQISRFEGARQLMGYSGAVPSEDSSGKRTQRGSITKTGNAHLRRIVVEAAWSYRLRPSVGPALRKRQEGVPEEIKEIAWKAQHRLHKRYCKLAAARKDQRKIITAMGRELLGFIWAIGIKAETAARQEIAV

SEQ ID NO: 514796 - protein, 366 aa, unidentified
MFTERTSVGLDVHARSVAAAAIDSVTGELVQATLTPDYGDVRGWLDRLAGPVAVAYEAGPTGFGLYRHLQAAGVRCEVAAPSKLQRPAGDRVKTDAKDAIHLARLLRLDEITSVAIPTIAQEAARDLVRAREDCRGDLMRARHRLSKLLLRHGIVYYDGKAWTGKHDIWLRHDALRRLPSDAATRLTFDADYDAVLTVKARRDRLDTAIEEAAADCEFTAIVRRLGCLRGIGTLTAFALAVEIGDWTRFTGNTIGSFVGLVPSEHSSGGSRSQGSITRTGNGHARRLLVEAAWHHRPRYTVGKVLRARWDLAPAAARARGNDGNRRLHQRWVQFTDRRKRSTVADVAIARELAGWCWSLAVLDTST

SEQ ID NO: 514797 - protein, 348 aa, unidentified
MSHYVGLDISMKETVICIVNDKGVSVHKGRSKTDPEKIAYHLKQTKLKIEKIGLESGSLSHWLVDKLRAFDLPAICIDSRKMATLLSVRVNKTDDNDAQGIAEAMRCDLYKEVSQKSQQAVEIGTLMQCRRTLVQQRVQLINSVRGFLKTYGVRLGSCGGKEFPEKVRAVLPGALMIARGGIDSLVNCYEKLNVEIQALDKRIEALAREDEDVKRLMTVPGVGIVTAMSFKIEIDDPHRFKKSRDVGAYFGMTPRQYSSGETKRQGHISKCGSSEVRSLLTEAGLVCLTRSKKWSRVKAWGLKVMRKHGAKKAAVAVGRKLAVIMHRMLLDKKDFIHGEEKKQQVKAA

SEQ ID NO: 514798 - protein, 420 aa, unidentified
MLEETEDHEQLIERVAALDIGKGELVCCIRVPGEGTRRRQEVTTYSTMTRSLQLLAERLLELDVTRVVMEATSDYWKPPFYLLEAHGLEVWLVNAKDVKHLPGRPKTDKLDAVWLCKVAERQMIRPSFVPPPPIRRLRDLTRYRIDLVGARTAEKSRVEKLLEDAGIKLSVVASDIFGVSGREMMAALVAGQRDPKALAALARARLKSKIPQLEEAFTGFFTDHHAFLLAKMLSRIDTIEADIADLDTKIEEQISPFAQAVAQLVDIPGVDATTASVIIAEIGVDMSRFPTAGHLASWAKFAPGVKESAGKKKGTASTGHGNRYLARALGQAALSASRTDTFLGQRYRRLARRRGKKKAIVAVGRSTLIIIWHLLANPETRFTDLGPAFYDSRVSASRQMRNHVTQLEALGYKVTLEPAA

SEQ ID NO: 514799 - protein, 386 aa, unidentified
MQKLNDLSRSLAPLKPDGTLIAVIEMSQSSWLVAGIVPGVERQPLKKLAADEIALLKLLHRWREEAEKAGRKIERIAVAFEAGRDGFWLARWLRTRGIEAHVIHASSVAVSREHRRAKTDRLDTELLKRAFLGWLRGERDHCKMVAIPTSKDEDAKRPSRERESLVEEQTRIVNRMKATLIRLGIRGFNPKLKKAAGRLEDLRTPEDEPIPPNTMAELRRDMDRRRLISDQIRQIEEARLDRLKQMPGDGPHAMLRLLARVVGVGIETADMLVQEVLARNMRDRRAIARYAGLTGSPDESGTKRREKGLARSGNARVRRGMIQLAWRFLLFQKNSALAQWFRTRTENARGTRKLMIVALARKLLIALWRLVREGVVPDGVVLRPAQ

SEQ ID NO: 514800 - protein, 395 aa, unidentified
MYPLSIRVAVDVGSTCHRVAVGLPDGKLLDEFDISHNAGGFKEFFHHIESLEKRHQLPVAVAMEGYNGWARPLDGQILRHGYRLYSVNNLKLARYKEIFPAPAKTDAIDARRILELFRLSEHLPLAKNALHEVAPTPVENDQLKRYTRRRKQLVWERVRVINRLQSDLHAVCPGLMAITGEADNIWFLNFLTCRDKLTKLANLRQSSLLAIPGVGKTYTAQIQAWQAQAQFAPDAEWVGEMILQDAHRILALGKDIKALDLKIAGIAAQSKLAQTIGSIPGFGKTSMAEIAGEVGTLERFKSETALAMYMGMSALDNSSGKKNGVKTPRHVNTRAKAAMMVAVARHIAYVPMSRAYYDKKRAEGKQHNQAIRALGRHLVRVIWSMVKQGRKYEVR

SEQ ID NO: 514801 - protein, 334 aa, unidentified
MNFIGMDIHKQFTVAVAKDKEGNKLAEEKFENSRDNFEKFLKCFLPQETKIVIESTSLWEYIYDMLEEMKYETKLANPTKTRAIAEARIKTDSIDASTLADLLRANLICESYIPSKEIRNLRNIMRQRKTIVKGQTQIKNKIHAVLLMNGIILPYEGLGKKSIEWMIEEIKVTTIRSILVTYIHLLEQYESELQILEEKIKEISSKNPQAVLLTTIYGVAEIRAMEIITEIGDVSRFESANKLCSYAGLIPGIKQSGTTIRFGRLVKQANRNLKDVFIQTSWNLIRPKEGNRFREFYLRLSKKKGKQKAICAVARKLCCVVYAMLRKNQKFMLL

SEQ ID NO: 514802 - protein, 465 aa, unidentified
MGNKQDREDGSNRRKSLDGLPNIRPHVGGLDLASERHWVCAPTVDGAAREVADFGGTTGELLRLGGWLKERRVESVAMESTGVYWIAPHEVLESLGFEVLLVDTRQLARVPGRDKKSDPLDCEWIQRLHSCGLLKGSFRPPEQVCMLRTLVRDKANLVAESGDWLRRMQKSLDQMNVRVHRAVADIDGVTGMAILRAIAGGERDAKKLAKLRDARCRKSEEEIAEELNGHWREDHLFSLQQALRMYDAIQERIAEYDREILRQLAAMEREGMGGEAPPAVSKRSKAKAIRKRGEEPLRAALFRLSGVDLTSIDAIGVETVEVVLSEYGPDLSRFPTEKEFVSHVCLAPHRPTSGGKPVKKKRRNSASSRVAGALRMAALSLRNSATALGAYYRKMARRIGGDVAVFATARKLATLIYRLLRWGQAYVDEGAEAYEKRYEATRLASLKAKAKTFGYELVQSAETPC

SEQ ID NO: 514803 - protein, 397 aa, unidentified
MIYVGIDIAKDKHDCFIKKTNGEYIDTFTVSNNIEGFEILYTNILKFNTESEEIKVGLEATGHYGYNLIAYLLKHNIKVYVINPLHTNLYRKSMSLRLTKTDKIDSCTIVSMLMANLNLKAYTDLNFITDELRSLTRYRYEKVKDRAKFRSTVSKLICILFPELEKMVSTVHSPSIYALLLKYPDAEQISRAHLTKITNILLTKSKGHYEKNTAIQIREAARKSIGINMPVMSLELQHTIILLNEIEEQINEIEEKIKIIMDEIDSPITTIPGINYRMGAMILAEIGDFSRFSSPDKILAYAGMSPTIYQSGQIEQTSYAHMEKRGSKYLRYALFNATKYVCLWDPIFREYLAKKREEGKSYTVAVTHATKKLVRLIYSLEKNHEEYMEKIKKHNIL

SEQ ID NO: 514804 - protein, 390 aa, unidentified
MDVLYQSCAGIDVHQANIVVCILHGPLTSTRPKREMATFDTTTKGLRACHDFLSQFHVEAVGMESTGVYWRPVWHALCDDFELILAQPAHMKAIPGQKTDKKDAHWIAKLTRIGLLPRSFVPNETIQELRELTRQRKHYVESRNRETNRIHKILQSGGIKLTTYIEDIMGLSGRNLLQLLVDGTPITPRIVHQSVYTSLKKKVPQLLEALDGYFSDHHRFMLKQSLEIYDFYQKQIELLEERITVYLSQYEKHVEILDSIPGIDVITASVIISEVGVDMSQFPTSGHLASWAGLCPGNNESAGKKRSTKIRHGNSYLKKCLCQAAFAARNQKGSPLAERYYQIQSRRGSQKATIALAHQLLKIAYILLKEQITYPEFLAQKKTTRDELVA

SEQ ID NO: 514805 - protein, 332 aa, unidentified
MRFVGIDVSHKELAVVIIANGKTTKAKMFSNTPEGHMQLIKYLHKYKEPAQVCLEATGIYHFDLAVELHKADNIEVMVVNPKASKHFAEVLMKRSKTDAVDAGVLATYCQRMDFNVWQCPSHHKLDLRICSRRLVELKKQRTRAKNQLHALESTTSTPDYILEDARQAIRELDARVDTLQLHALSIIQQDSVINEMFELLLSIKGVAEVSAVQILGEIVVLPDDMTARQWVAHAGLDPRQFQSGSSVMKKPRLSKAGNSYLRQALYMPALSASRWEKSVKAHYQHLVEDNGLKKIQALCAVMRKLLHAIHAMFKTRSDFDGSKFCQSIPSQS

SEQ ID NO: 514806 - protein, 372 aa, unidentified
MGEDSIVYVGVDVSKNKHAIAVAEGGRTGEVRYFGEIETTPASVERLVRKLEKRYGRLHVCYEAGPTGYGLHRQITAMGHVCEVVAPSLIPKRAGERVKTDRRDAVTLARLLRAGELTGIWVPDDVHEAMRDLVRALEAASDDLRKKRQQLQPFLLRHGRIFTGRKHWSAAHIRWLAAQKFEPSAQQIVFQDYVDAVRDARERLERFDTHIEELVPAWSMAPLVAAYQAMRGVSILVAATFAVEVGDVRRFDSPRQLMAFLGLVPSERSTGESVKRGGLTLAGNRRARRVLVEGVWSYRHPARVTETIRKRLENLPKAVRDIAWKAQVRLSKRYRRMTTGGKKGPVVIAAIAREMAAFLWAIGREVEPRPIA

SEQ ID NO: 514807 - protein, 386 aa, unidentified
MAESAVRYVALDLHRHYALVAAVDADKEVVLEPRRVRMGDLEDWAAKHLRSTDKVAIEASTNVWATHDILAPLVAEVVVVHPTQFKIIASSSVKTDKRDTLALARVLAAGLLTSVWVPPDHVRELRSLINHRATLISERRDARNRLHGVLQIHNIAQPPGEIFVPAKREWWFSLELPASIQMRVRHDWELIDVLNRQVEEAEEALTRLSVSEEWVEQVPFLVQLPGIAVPSAMTILSAVGDIRRFETADKLVGYAGLGAKVHSSGQQHHTGRISKAGRAELRTTAVESAWIAVQYHPFWKEEYGRLARRIGNQKAIVAIARKLLIAVWNVLTKQAADRHADPQMVARSFYYWGGRHRLATSIGKSRQAFVDYFMEKVQLEPIHLTM

SEQ ID NO: 514808 - protein, 342 aa, unidentified
MGQVATIGLDIAKSTFQVHGVDATGDVVLRRRLTRARVLPFFEKLAPCLVGMEACASSHHWARELRKLGHDVRLMPPSYVKPYVKRQKNDTADAEAICEAVTRPTMRFVEVKTTDQQSVMVLHGTRSMLMRQRIQLSNVIRGHMAEFGVVAPIGREGLLALIDTLHEETDDRVPAEARHCLQMLAAQLRLVNAQILENDRRIRLSARATDVGRRLMGIPGVGPVLASAFVATVPDPHAFRSGRNLAAWIGLVPRQNSSGGKERLGGITKQGNRYLRQLLFVGAMAVIRYAERHGTRRPWLVQLLARRTTKVAAAALANKTARMVWAIMTSGQPYREPELRTA

SEQ ID NO: 514809 - protein, 401 aa, unidentified
MPKQYVGIDIAKSTFAVCVIEESGKVLFQEPRLPQSRPGFERLLQLLEKTPGDALVGMESTSIYQLPLVAFLSEQKIPTVILNPSLVNKFAKLDLRPTKTDKKDARLIAEFLRQRQPSPRSDPGWSEVQLLSRGRERLIVGSSALKVHIHQALAVLFPELEEAGINPFSDGMQRLLQAYPSARRIRQAPTEEVHCAFHAAFRGKGGRNAHFQTEDLLTLAGRSVGITSPAWEDLLVGYFQELCFLEGRRERCEQRLEQAIQQIETQALEIVTSVPGIGETTACTFLAEVGDVRRFGEAGKVVAFAGLDPSIAQSGTMLHEGKISKRGNKRLRRVLYIMAQGVVRYESGLRRYYLRLRERGKAYNVAIIAVANKLVHMLYAMLIKGVSYVPPKAVSEGITDS

SEQ ID NO: 514810 - protein, 335 aa, unidentified
MDAAPVVGIDVSKRKLDIALLVNGKIKSKVFENSPAEYRLLLEWLSKSKASLEEMHVCMEATGVYFEPVACALHAAGIKVSVVNPACIKGFGYSENIRNKNDAIDAGLIARYCASMAPSAWTPAPLEQRQLRAWTVRVQALKDIRQQEINRLEAHSVTGMDEVAANVNEHITWLDTEIRKLEKEIDDHIDRHPGLKHDAELIRSIPGIGATTAAKILGHIGDVRRFKSAKAFAAFLGVTPKQRTSGTSLKGRTMISRTGSSALRAALFMPSLVGRRHNPILKRFAERLLTTGMTKMAVIGAVMHKLTHLIYGVIHADKQFDPNFLSKGLAAQDGI

SEQ ID NO: 514811 - protein, 312 aa, unidentified
MDSIVIGIDVSKDQLDVATPDGARQWPNAPDGHRQLVEQLAKWPLEAIVLEATGGYERPVVAELAAAGLPVVVVNPRQVRDFARATGQLAKTDAIDAKILAQFGQAVHPEQRPLPSEKQLELQQQLARRRQLVGMLTAEKNRSQQATDRLVRKTIDAVVRTLAEQIKQLDDQLQRTIEETPAWREKENLLRSVPGVGPQTALALLANLPELGTCSRQQIAALVGVAPLNRDSGRHRGKRVTWGGRASVRSALYMATLVAVRHNPVICAHYEHLQNVGKRKKVALVACMRKLLCMLNAILREQKPWRNQTANT

SEQ ID NO: 514812 - protein, 350 aa, unidentified
MLIIGCDYHPGFQQIAGVDTKTGEMSERRLSHREEAERFYRDLQGRSLSVRVGMEASGHARWFEHLLTDLQFELWIGDAAEIRTKRVRKQKTDRQDAQLLLKLLMEDRFPRIWVPDAENRDLRQLLWHRHRLVQMRTRIMNQLHVVALNEGVRRKKALWRPAGRSELESLALAPWASRRRQDLLDVLDQLTPKVQELTRALEEEVERRPVTQRLMTHPGVGPLTALAFELVIGIPERFHCGKQIASYVGLVPSEESSGDRRRLGHISKQGNSLLRFLLVEAAQVTVRSQPQWRSKFFHLALRRGRKIAKVAMARKLAVHLYWMWRRSWDYGQFEKLGSHAGAPGNRHGAQ

SEQ ID NO: 514813 - protein, 341 aa, unidentified
MNQTLYCGIDLHSNNAMYVITDEQDRPLFQKRLPNELPTVLAALAPYRPRLKTVAIESTYNWYWLVDSLEDNGYPVVLANPAKMEQYDGIKEANDLTDAAFLAHLARLKILPTGYIYPREDRPVRDLLRRRMLLVRYRTGLKLSLQNMVARQTGQSLGWRGVRTLDEDGRAELLGDNDCLPFVATHQVELIESLNEKIGLFEAKVLARVQLRPAYERLLTLPGVGVILALTIMLETGDIGRFETVGDYTSYCRCVRARHTSNGKKKGENNKRNGNAYLSWAFVEAVHHAIRCCPAAKRFYDRKVAKRNGALATKALAAKWSKAAYYVMTRQEAFDLTRVFG

SEQ ID NO: 514814 - protein, 332 aa, unidentified
MSNCIGIDVSKATINIHISKNNQDLVLDNNLKSFKLLFSKLKKIYKKELENIIFIFEPTGSYSEALRKYCSEKLIKCFIINPKQFSNYAKALGVEVKNDVEDAKVLSQAIHLAKDGQVKVPVYSEDVEHIKELMSFYRFTKKQTTQQKNHLEALKSKDGDKFSIKELQKSIKESKNKELRIIEQVQTLIDSTDEYRIAFENITSIKGVGQIAGIVLLHLFLKYPEANQRQITSLTGLNPIYRQSGTSIQSGYRIAKTGASLYRSVLFMSVFTAVQHDENFKSFYERLKSKGKHTTSIQIAVMKKIILTAHSLYKNNQKYDENFNFLEASKVQ

SEQ ID NO: 514815 - protein, 381 aa, unidentified
MSIVALDIASKAATFCVLGTQGITGQGSLTFDHDGFSSFMSSEQIRDASLFVMESTGGYHLPLYHFLLNHGRKVRIINPLLIKHFHDGQTLRRTKTDALDAVAIARYAQSHMSALEEERMQLDSESKMLARRRARNAEDLAKAKTILKSDLSVAFPELLRFNVFIKTLLEFLSVYGCAKDVLAATEEQLQQALDVQKGRKSDVVTVQKIQELARISIGVSYRAAMVRDSAKAVLACQQRDEELTKALVELENALHKRQMEILTSIPGIGEVTASHFLSEIPDITQFATYQKLIAFAGTDPGIYESGNTSKALKISKRGNPLLRKYLYLMADSCMRHNVVFNAYYHKKREEGFPHRKAMVATMNKLIRTLHALLTKDETYSI

SEQ ID NO: 514816 - protein, 412 aa, unidentified
MEVMVERCAFLDVHRDTVMACARTPDGMGGRREEVSEFRTTTSQLLLLADWLTERGVTLVGMEATGVYWKPVHWALEDAIDEVWVINARHMRNVPGRKTDVADACWGAQLIEHGLVRPSFIPPRPTREQRDLTRYRKSVIEERGRETQRLHKVLEDAGVKLSSVASSVLTKSGREMIDALIAGVRDPTVLAEMAKGRMRSKIPELQDALAGRFNTHHALLCKAMLARIDQADKTIDELTTAIEVLLGPHKAAVTLLAGIPGVSYRTAQVVLAEIGTDMSRFPTPEHLASWAGMCPGNNESAGKHRSARTRHGSKWLRIALVEAGHAAARSKDTYLAAQYARIRGRRGPGRAAVAVGHSILVIAWHLLSTGETYTDLGGDYFAKRRTSTAHQRRLVAQLEALGHKVTLAPAAA

SEQ ID NO: 514817 - protein, 390 aa, unidentified
MQALCPRPHEHAAIRTDLKAIFVSLELSRSTWVITSLSPGGGEKMSKHAVPSGDIPALLARLSQLKEKARARTGQVFPIIVIQEAGLDGFWIHRVLQQEGIESYVVDPASIATSRRRRRAKTDKIDGEALVRALLAYKRGEPRVCAMVQAPTPHEEDRRRISREREVLTAERVQHVNRIKGLLFAQGIGDYEPLHRNRRERLEELITGDGRPLPECLKAQISRELDRLELLIEQIKAVEAERDAVLAQAQASPGVPAPAAQLLTLRGIGPEAAATLCSEGLFRTFSNRKQVAAYAGLAPTPWQSGAVHRDQGVSKAGNPRLRTIMIQIAWLWLRHQPQSALALWYRARIKRTGGRLGKTMIVALARKLLVALWKYATAGVLIEGAVLKPA

SEQ ID NO: 514818 - protein, 401 aa, unidentified
MKEFNAEEVRFETVTAIGVVRQAQALFRYPAYIGLDVHKETIAVAVARAGREEPELRAAIANKPKTVAKLVERLSQEFNGEVLLFCYEAGPCGYVLYRQLLELGHDCQVVAPSLVPRKPGERIKTDRRDAKKLARFLRSGDLTVVWVPDEEQEAMRDLTRARDDFKAQERKARQQLNAYVLRHGHAWPSNKTRWTQTHSNWLESLKFPHDWQQVVLQEYIDAVKATAGRVADITAQMMQVLPQWSLAPVIASLVALRGIDKLAAMVLLAELGDISRFDSPRQLMAFLGLVPSEHSSGGRRRQGAITKTGNSHARRMLVESAWSYRFPARQTPHLKRKAKGASDEAKVIAWRAQKRLCGRYQHLLYAGKNTKQTTVAVARELAGFIWDIACHEMPKVQQAAR

SEQ ID NO: 514819 - protein, 341 aa, unidentified
MKQPITKNHLGIDVSKPWFDVSLMPVIDYVKQPIITKRFDNSTSGMNAFKSWLKTSGVTLDSNSLLVIENTGVYHRLLWSFCSKHNLPLHIGNAAHIKWSLGITRGKNDVIDSVRLCQYCCKQSDELKASPALNPVFMKLKDLMSSRSRLVTQLHSTRNYIKELQCSNDKILLATLEKAHKAAIEGIKKSIVQIEELINKIIQEDPAIYKNYLLIKSVPGIGHLTAVYIICCTNNFAAKVTGKQLASYAGVVPFEHSSGISVKGRNRVHKMANKELKKMLHLCALTAIKYYPEFKDYFNRKKAAGKNGMLVLNAIRNKLILRVVSVVNKQQPYVNNTSIAA

SEQ ID NO: 514820 - protein, 386 aa, unidentified
MGKSSTTLYVGLDVHKDSIDIAVAEAARDGEVRHVGSIGGDLASLDKSLRKLISRGSRLHIVYEAGPCGFVIWRHLNAQGLACEVVAPSSIPRRSGDRIKTDRRDAMMLARLSRSGDLTAVRVPEVADEAVRDLVRAREDAVRECRNARHRLKALLLRNGIGYTGKTAWTAAHLRWLATLKLAHAAQQIGFQEYLHSITEATARIARLEQALRDALPDWTLRPLVQALQALRGVQLIAAMTLVAELQDFLRFANARQLMSYVGLVPGEHSSGPKRRQGSITKAGNSAARRMLVEVAWHYQHSPRVSPIIAKRQHELPKAISDIAWAAQLRLNAKFKRLVARRLIKTKAVVALARELAGFVWAIGREVQTSGWQGLKTEAASEAAAH

SEQ ID NO: 514821 - protein, 374 aa, unidentified
MLIGVDYHPSFQQIAFLVEETAEYSERRLNHSDGEAEKFYRDLRQREVRVRVGMEATGYSRWFERLLAELGFEVWIGDPAEIKTRRVKKQKNDRQDAQLLLKLMMEDRFPRIWVPSPENRDVRQLLWHRHRLVQMRTRVMNQLQALAMNEGYRWKKKLFSEQGRGQLEKLALAPWAGRRRQELLELLDRLNPNIEELTAAAEQEARKRPDALRLMTHPGVGPLTALAYVLIIGTPNRFDRGKQIGNYVGMIPSEDSSGGKQRLGHISKQGNSLLRFLLVEAAQAATRSNADWRRRYLHLAMRRHKSIAKVAMGRRLGVRLYWMWRNGCAYSPSMEFGSYTGTARYRTWCEVTPSTWLGIPLPVKGVRRSNHGRS

SEQ ID NO: 514822 - protein, 341 aa, unidentified
MECYAGIDLHSSNNYIGIIDQNEKKLFGKKMSNDLNQIVTVLQPFKKDLKGVAVESTYNWYWLVDGLQEQGYPMRLANPSAIRQYDGIKHTDDKWDAFWLAEMMRLNILPEGYIYPKATRSVRDLLRRRMLFVRSRTTHIHSLQSMFTRELGAKLSASEFRKLSSENTKDYFDSPNLQLMATNSVETILFLKTVIKKIEKEVLRQVEVRKEFELLKTIIGIGDILALTIMLEVGDIGRFPTVGDYSSYCRCVKSARMSNGKKKGENNKKNGNKYLAWAYVEAANFAHRFCPKAQRFYQRKMAKTNKIVATKALSNKMCKASYFVMRDQTPYEVGRVFPYGD

SEQ ID NO: 514823 - protein, 454 aa, unidentified
MCLEDRPLLEPNAAGIDIGAREIFAAVPPDRDAHPVRVCATFTEDLQQLADWLVSCGITTVAMESTGVYWIPLFDILEARAIKVCLVNARHMKNVPGRRTDWHECQWLQYLHSVGLLRAAFRPEPDVTAVRTIMRHRQELVQMSSQHILHIHKALTQMNLQIHHVIDDITGMTGLAIVDAILAGQRDPGELAKLRNWRIKATEETIRKSLVGNWREEHLFTLRQSRELYRSYQEQISKCDQQIEKLIGGFEPRVDPETKPLPPDRKRYRSDKKRAKRAGRENSGFNLRTEAYKLFGVDVTQIPGLETMAFRLFGEVGRDMSKWPTADHFASWQGLCPDNDISGGRVLWKGTRKLQNQAGQLFRQAAYSLHHSLTPMGDYLRRMKARLGPAAAITATAHKIAVIFYTIVKNQVEYDETIWATRDIKRQQRIEAKLKRQAHQLGYQLVPLETKPAA

SEQ ID NO: 514824 - protein, 428 aa, unidentified
MYEVDSIRVEQFRQLKDEIRGSKEHLIVGIDVAKEKHNAFFGTATGKTLLKRLVFGNNMEGFHKLLTFVEAVKVKHCLSSEVFGLEPTANYHKPLGEYLIKCGLDVVLVSGLAVKNNRELIDGRWDKHDTKDSANVADLVSQGKCLYYDYPCMPLRDLRDLLSLKRRFKKLEHGMRVRIRNHLLAQYFPELDRYFVGAGSQGLAIVRWCLAPSVIAALEYDDFVGLVAPGKKSIGQQKRLSAIWKIAVDSIGCDAGGSLEFEAKMMVEELQQTRESIRLIDAKIEDICLQFPEYSYLLTIPGFGPDISSKVLGAIGNPFRFDTGKQVLKLAGMDLSAKRSGKRSQASIPVLSKKGKADLRYALYQAALIASSKNTNFVIYYTNKLRGREKEKGIKTKMRVKLAAKLLIIAWTLMKKQEPFDPEYLKLK

SEQ ID NO: 514825 - protein, 366 aa, unidentified
MSKDSQVLYVGVDAHQETLSISVLVGDSKDPLPPITIPNRPPLIRRHFRRLLDQGAVVATYEAGSLGFVLYRQLTALGVQCLVAAPSHLPKIPGDHRKTDRLDAQRLALFLRAGQVVEVRPPTPEIEALRTLTHTRDAMREDVVRSRHRVLKLCLSRGVVYRDGQNWTPKHMAWLRSVAFAVEDDRKTLDFLIDELERRADALSQLDQRIELRATQPDVEERVRCLTAFRGVRTLTALCVIAEIGDPRRFRNARQVASYCGLIPSEHSSGAKVRRGPITRSGNSRLRRMIVETVQHFARPFPYRSAVHRRRPLAPPRAQSLAAQADQRLKARYRSLAARKHTNLAKTAVARELIGFLWTALNNEAK

SEQ ID NO: 514826 - protein, 347 aa, unidentified
MPTYCGVDFHSRQQLVVWCDTSDGEIHSIKLDHSEIEKVRAFYASLHGPVIVGLEATGYSQWFEDLLFELKHEVWIGDAAEIRKRARSRQKTDQRDAETILDLLLKNEFPRIYRPDAASRAILQKLRHRHRLVQLRTKAINHLHAIAISAGLSIKSKLMTKDGRRQLKALLLSDTHQRQRDEWLALADHLTPIIQAIEKELIPIAEQEPRVARLMTNPGIGLLTALAIVHTLGPINRFSNARKVTAYIGLDPVEHSSGDRKRIGSISKKGSRLVRFLLVEAAQTAAQRDEDLKRFYYRVMQRRDKPRAKIAVARQLLVRAYILLRDEIDYAEFRRRAVKVDVARVTQ

SEQ ID NO: 514827 - protein, 497 aa, unidentified
MPTKSTIYSRCNPQLLKLFETAGHPAKVLCVALDYAKAQHTALLCNGLGELLKPSFAIDNTPQGAAKLLSEVRACLKPRKIRPEHVFFGGEDYPSYAENFLRHLRQEKFLVVRVNAWEAKQQRDNFQASSDSLDLLGIARCCLNRRGESVRDLPQAYPNLRIATRDRDKLVRMRTAVSNRIHSYVDRLFPGFLSEGKSGLEPFSKASLELMADRFSPAQLSRRPRQALAEWLGRRGVTQPRETADQLKRFAKNVLEPAPEQTLMLQQTLAQLVGLYRDLAQSIARIDREVAHWLARTPGAWLTSIPGFGITLAAGWTAELGPPGQWHSVRQLCSYSGVVPKSKQTGGPQKEPVVGAVQQRCNKRLKNVVLQAVGKVIRYGPEELRRTAQELEARGAHTEFALAKRLVRLAKYLALTGTVYRPKTMMDPATPKAALAAHYQTVWEKLLPKWRDKADLREVFAPQQPLGQWRKMAQELYALELRLPQQKAPQKSSALAP

SEQ ID NO: 514828 - protein, 370 aa, unidentified
MLDTTTFIGLDVHARSIKAVSLDVMTGEVRAATFGYDAGAVAEWVRSVDPGARCVYESGVTGFDLQKRLSGLGVDCVVGAVSKMIKPSADRRRKNDRNDAEFLARMLSVGNVVEVWVPDDECEAARDLTRALEDARDDLSRSKQRLSKFLLRHGLAFDERTPTGRRKGNWTRAHWSWIESIRFAERADNDVLAYYVDAVRRAAEEKARLEGLVEAEARKPRWRKRVDSLRCLKGVDTASAADLVFEAGEFSRFRNARSFAAWVGLTPSEHSSGESDRRGAITKAGNKHLRKTLVEAAWHYLTCSGRPKDLAKGQAPDRGARRHAAKGVRRLVERREALLARGVHGNKANVATARELACWVWAVGLMAEEA

SEQ ID NO: 514829 - protein, 343 aa, unidentified
MTKITTIGLDLAKNVFQLHGVDGSGAVVLKRQLRRAEVEKFFAKLPPCLVGMEACGSAHHWARVIGRYGHEVRLMPPAYVKPYVKRNKNDGRDAEGVCEAVGRPTMRFVAVKSVEQQATLAVHSTRALLVRQRTMAANALRAALSELGIVAAQGYEGLRKLIARLEEPNEDIPEVMRAALLVLAKHWQVLDADERVLEQQIAKQARCNQDARRLMEVPSVGPIIASTVLAKVPDAKLFRSGRDFAAWLGLTGKAHGTGGKHRPGRISKQGDRVLRTLLISGASAHLRQQKTRGVTDPWLCDLLARRPYKVAMVAFAAKTARIIWAMLVKGEPYCDRASAPAAA

SEQ ID NO: 514830 - protein, 488 aa, unidentified
MHPRWLLGHRPARLTLLTSSMSFARPGSSQGVPTVNRAVRQRAPISERRGCHVLAPKVGCLPTGFSSEEAVVKCAPIFLPDQPANGLTAGIDWARDDHALAIVDARGKQIYRDTVEHSDAGLRALLKLLANHGVGEVAIERPDGPVIDALLDGGLTVVVISPNQVKNLRGRYGSAGNKDDRFDAFVLADTLRTDRARLRPLTPDSPATVALRRACRARKDRVAHRVALANQLREHLRRVFPGAVGLFADIDSPISLSFLSRFDCQDRADWLSPKRLAGWLASVGYCGRTDPAVLHARLTDAPRGATGDHGTAESRVTQAYLAVLASLTDQIKALSIQIDEQLALHTDAHIFTSLPRAGRIRAARLLAEIGDCRARFPTPESLACLAGVAPSTRQSGKIRSVGFRWSCDKQLRDAVTDFAGDSRRANPWAADLYDRAIARGHDHPHAVRILARAWIYVIWHCWQDNTAYNPDQHGALQRLIQSRNHAAA

SEQ ID NO: 514831 - protein, 370 aa, unidentified
MRHSSTLYVGLDVHKDAIAVAYVAKAHDAEVTFLGTLGPRQADMDQLVRKLQSKATPLVLVYEAGPCGSWLYRYLTKQGQVCWVVAPSLLPKKAGDRVNTDRRDAVQLARLMRSGDLTPVYVPTVEDEAIRDLSRAREDVLRDLKAAKFRLNAFLRRHDIRYTGSATWDPAHLRWLSEVVCPTPAQQIVFQEYVRAVNEHTERLGRLEQELQDQAKAWRLHPVVEALQALRGVQFTVAVTTVAERGDLTRFDNPRQLMKFLGLIPSAYSSGERRRQGSITIAGNTHARRTLVEGAWAYRYPAKVSRHLQLRLETQPKTIQDIRWKAQVRLCKRYRRLIARGKHANQVVVAIARELVGLMWAIAKQVSVTL

SEQ ID NO: 514832 - protein, 483 aa, unidentified
MKKRKTSSKKKASVGSNFIKMPVINSHAAGIDIGSKENYVCVEQNKVRKFGVTMCDFEEIDLFLKEYGITSVALESTGFYWKNIYVFLVSKGYEVIVVNGRFLKNVKGKKTDVVDSRWIQLLHSVGLLSGSFQPDDFSESLRVYTRHRQKLTEELNRYGSIMNKNLVLLNIQSKTIFSDITGKSSLRVIKAIIDGERDPEKLAAEISTFVRASKEDQLKALRGNWRDEYVYELRQAYNSYTHFKKQISDVDNQIEKTLAVYLEENKEKKHFKTNYKAPKKQTVQKNSPNLDVLGYANAFYEGVDLSSIDGFGPVNVLSLLSELGDGIKKFPKGKHFVSWLGFSPNNKVTGGKVIQSKTRRHRNPLAQAFLKAANSIGRSDCQLGHFFRSIAYRRGWLVAKVATARKLALIVHKMLTEKVAYDYKISEEKQEKLRNNRIKKIQKTIKNLKITESELKKFRFNYRLLPHFLATITIVVWDFYFQL

SEQ ID NO: 514833 - protein, 325 aa, unidentified
MSDPLHSIGIDVCKRFLDIHVCPTGKCWRVPNSIVGLLSVQSQFPEPDSVKRVVPESTGGYEREAALWLSQAGYPVGVINARQGRNFARAMNQQAKTDKVDAQVLALFGDKITPAVRPLASEAQQQLDDLVTRRRQLVDILTAERNRMALLRGKAQANVEGHIEWLTEQIKELDGEIEAQIQACQAWRHTQELVLSVSGVGKVMASTLVSALPELGKLSHKQIAALVGVAPFNDDSGQMRGKRRVSGGRANVRQLLFMSAMVAVRYNPVLKEFYSRLLQRGKEKKVALVAYMHKLLTTLNAIVKQGKAWVSPIAEAETEKVALSA

SEQ ID NO: 514834 - protein, 339 aa, unidentified
MSKLLKNFVGIDISKTYFDAAIVKAEDHSKIIHRQFSQTQEGFLKLSEWLYENNIAVREETLFCMEYTGLYNSGLVNYLVACNAQLWVEMPLRIKKAGGFERGSDDKTAAVKIAWYALRYHDQMKLWQPVDSSIEKIKNLIAQRDRIVNVITQLNVPVNELKEAGCVAEAKNIERLQRPALTALQKTKTSIETLILKTVEADEHLNKKIQQVQSINGIGPVTAVALLAYTKGFTAFSNAKQLACYCGIVPFKKISGTSVRFKSTVSPYANKKLKKLLHLCALSAIKNDTELKLYFERKVAEGKNKMSVINAVRNKLVHRVFAVIRDERLFEENYNRKCA

SEQ ID NO: 514835 - protein, 343 aa, unidentified
MKIYALGIDLGKTVFHLVGLDSSGQVVVRKRCSRTQLLAFTGNLQVQLIGMEACSGAHFLGKALRAQGHDVRLMPAQYVKPYVKTNKSDYIDAEAIAEAVQRPRMRFVPIKTEEQLDLQALHRVRERWVMRRTAVVNQIRSLLLERGLTLPKGRSYLGQLLPRILEDAELKLSGAFRVLLAQLKLELEQLAARIEQMDMVIQQEARENESCQRLTTIPGVGPVTATALIAAVGNGSAFGKGRDLSAWMGIVPGEYSTGGKQKLLGISKRGNKYLRRLFVQGARSVLQHRDKQAPGLSCWLAQLLARTHQNVVVVALANKLVRIAWAVLCKNENYRAPVLAATT

SEQ ID NO: 514836 - protein, 438 aa, unidentified
MATLSASPAEPTCAFAAIDWGSQNHSWCVVPAAGGSPQSGKFNNTPEAVELWVAGLRCRFPQGTIAVAIEQKRGSVIYMLSKYDHLVLYPVPPSMSASYRHAFTPSGAKDDPDDADLLLDLLRHHRDRLQPLSQDTQETRLLRFLVEQRRHLVQQRVRFVQQLTDTVQQYFPQLRTWFGSVDSELVEALLHRWPTLTHLQRSHPGTLSRFFKQHRCRKEELISETIYAALPATTDQVVIEACSRKTAALFQLRHAAAEAIAALEKRIAAVTADHPDAPIFASFPGAGAATVPRLIAAFGTRRDAWHSAADLQKFSGIAPVHMRSGKSCYVGIRRACPKFLRQTFHEFAGQSIPFSDWAKTYYRLHLRPDKANHHAVVRSLAFRWIRILYRCWKDRQPYDERILLAAQSRRCSPLSGKLGLPVQLVAEAGFKKLTIHNS

SEQ ID NO: 514837 - protein, 412 aa, unidentified
MEVLHPHCAGLDVHKDTVVACVRHMVEGVVKREVRTFKTTTKDLMGLSEWLSAEECTHIAMEATGIYWKPVWHILADGASALVLANAAHIKNVPGRKTDVNDATWIADLMAHGLIRGSFVPDEPTQDMRDFLRSRKQFVRERTSHIQRLQKTLEDANIKLDSVISDIIGLSGRRMIEALIEGETDPRALAALAHRRIKASPAELEAALRGRITKHHRFMLRLHLDHLDAVDAAIARIDQEVDANVEPFRKAIKILSSIPGLNALSAEGVVAEIGIDMARFPTAGHLISWAGLCPKNDESAGKRRSTRMRKGDRWLKTTLIQCAWAAARTKGSYLQAQFHRLRSRRGAKKAIGAVAASILTAAYHMLKNGTFYEDPGADHFDKRAKTKQTQRLITRLQNLGFAVQITPVESAA

SEQ ID NO: 514838 - protein, 351 aa, unidentified
MIIIGVDYHPSFQTIAFLMEETGEYGEQELNHSDGEAERFYRELKERGVSVRVGMEATGHARWFERLLAELGFELWIGDPAEIKTKRVRKQKTDREDARLLLKLLLENRFPKIWVPSPENRDLRQLLWHRHRLVQMRTRIMNQLQAVAMNEGYRWKKKLFSEKGRALLEKLSLAPWASRRRKELLELLDQLDPKIVELTAAVEQEAKKRPEVLLLRSHPGVGPITGLAYVLIIGTPERFPCGKQIGSYTGLIPCEDSSAGRQRLGHISKQGNTLLRFLLVEASQAAARRNPDWRRRYAHLMMRREKRIAKVAMARKLAVRLYWMWRNNWQYSQLVEFGSNAGKLGIVHGVK

SEQ ID NO: 514839 - protein, 372 aa, unidentified
MLHAGLDLSRKKVDVHVLDEAGKTVAVTAVAPEGWALQDLVRRFAGTGEEVTAVIESMNGAHFVHDTLELAGWDVLIADAARARALAPLAAKTDRIDAWVLAELGRRDLVPAIWLPDIATRSAREVCRFRQHLVGHRTALKNRIHATLIAHGHPVAMRDLFGKAGRAYLAELAVPEPWNTTLAQSLELIGETEERIKACERDLLARALHDPYVPLLVTVPGIGLILGSIIAAELGDIGRFASAKKFVGYTGLCPFVRQSGGRDDRGPLASERSAPAPLGAHRGHHPRLLAPAVPGPLPAHKEAPRQASWPFGRQGRARPHPRHRDLAHAQQEQAIRPGRSRSCSGRLTTLPEMDRRSIPIQPCPPNEEAIER

SEQ ID NO: 514840 - protein, 371 aa, unidentified
MAKRTTICAGIDTGKRKLDVALNDSTERLQLDNSPDGYKALLDWLRRHRVKRIGIEASGGYEQPVVVELRRKRFVVVVFQPAQVRAYAKFHGRHAKNDKIDAVLIAACTAAVKKIHAAPDARLLPFAEHLTMIEQIGEDLAKLKNRLESCRDERIRKVWKEDIAQLAKRARGEFKALVKAIREHRDLAARLDLIYSVSGSGLPTAVAILIRMPEIGQLSREQAAALAGLAPYDDDSGDRVGVRHIDGGRKRLRRALYAAALPASFRWNRQLIALYQRLTAAGKGHKRALVACARKLLIFVNTVVARGTPWQDEPPAAMAASATADYDGFLVRPQNRFFVPTCRSDDVARRRRQGWPSGYRCDGLRRCQATP

SEQ ID NO: 514841 - protein, 491 aa, unidentified
MGKGSGQGPTGPEFFEEGTKMIYSVGIDLHQGQHRARCLDDRAQSCDGFSFQTTPEGLAVLEERVFRDGANPTIVLEPAGLPWKMVAVYLRSRHPDCRLVKAKTQKVAALRRYLRGPVKSDRLDALTLAKMPFIDPEKLVDIYLPPAEIHALQRLTRQRKRIESDISGRKIRISAIVDGYLPGVRRAFNDAWASPVRAFLRSQLNPYAVAREGEEALHTFLSKACPRSKWSRAETHLVFLACHSVADVCELSRSAGTVNEEFFTDLQDEIARELRLMESEEAESESLARRIMELYRKLHPSDNLTSIPGVGEHTAPIFLSAVGDPARFHSQSAFANWEGVVPGARQSSDVEAKGLRMTKAGPSIMRMGLYQAGDIGRRWDPQLAAVYYREMVYHGKNHRQAMGAVMSHLGARVFTVLKEDRPYELRDTEGNLISKDDARRLILDKYQVPEEIRRERRRRNPKASNTVGVPRKDREMATYRTNEAAKAPQPV

SEQ ID NO: 514842 - protein, 346 aa, unidentified
MTIVESTRAVIGGVDTHLDVHVAAAVDAVGGVLGVESFPTNEQGYRRLIEWLRGLGTVMLVGVEGTGSYGAGLTRHLQKAGLQVVEVDRPNRQARHRAGKSDPLDAIAAARAALSGTANGAPKSRTGNVEAIRVLMVARRSAVEERITTLNQLRHLCITAPEPIRRRFSGLTPAALAKRAAALKPRRRDPLRYSTLLAIRTLGRRVLYLRDETKELNAVLRPLIQTTAPGLLGVFGVGYDTAAKLLVAAGDNPQRLRSEAAWAHLCGVAPLPASSGKTVRHRLNRGGDRQANSALYHVMITRLSHHEPTKAYVARRLADGKTLGETGRMLKRYIAREVYKQLPRPA

SEQ ID NO: 514843 - protein, 345 aa, unidentified
METMYYIGLDVHKKTIDYCVKDGSGRIYGAGSIRATRLDLDMWMKTLPRPWTAAMEATIFTAWIYDHLKPHAAAVKVAHPLMLRAIAVAKKKNDRIDAKKIADCLRCDFLPECYMASTEIRERRRTLRYRNLLVRQAVQMKNKIAVLLMEAGVSYNKQKLHKVGYFRELLATNQDIDEGLKPLLRLCRETVVRLGKTESALVRSLERDSLLVERVERLMTIPAVGPITALTWALEVGDVQRFSSIKKAISYCGLCGAEKSSANITMRTPLSKQRNKHLQTVLIEAAKMAPRNSPELAMVYEQEKQKGNANRATLAVARKMVAYLVAVDRRQKGFLVVENKNRTAA

SEQ ID NO: 514844 - protein, 343 aa, unidentified
MVHYVGLDVSLKQTSICVVSDTGSVVREGVTDSDPEAIVAFVRSKAPDAARVGLESGPTATWLWTELKRLGLPVICIDARHSKAVLKMQINKCDRNDAVGIARIMQTGWFKEVRVKNLGCHAVKALLTSRALLVKIKRDLENQIRGLLKNLGLVIGRAKFNGFAARAAELIANRPELVAVVSPLLKAREAIEKQIDDLDRKVLKLARQDALIRRFMTVPGIGPITALCFKATIDDPTRFKRSRSVGAYIGLTTRRHASGEVDWSGRISKCGDAMLRSYLFEAAGVLLTRVPKWSAIKAWGMRLAKRNGLRKAKVAVARKLAVVLHRMWIDNAEFTWSNKEAAA

SEQ ID NO: 514845 - protein, 353 aa, unidentified
MKYVGLDWAYRKAQWCALAPGGEVAGEGRIAADRDGLARLVLELGDEVKACLEMMSGALWVRDQLVTCGWQVEVADARKVKTVAPLAAKTDKVDARLLAELSRRELVPALWLPSLDERALRERLRRRMHLVRLRTSAKARIAGLQTQWGVRVSLQRLRQPDGVTLLERAGVPEVWRRSVGECLSVIDFLDERIAPLDAELRPFAHADPRAVLLDTIPGVAELLALTIAAEIGEVSRFSSPARLVSYGRLAPRVHQSGQGRPRSGPLSKSGSRLLGWAAVEAAQQAWRETNPWHDLYADVARRSGNSNSAKAAVARKILIAAWHMLSRNQPFKPAPRRTSGTSVPASSRLALAA

SEQ ID NO: 514846 - protein, 404 aa, unidentified
MNKLYVGIDVGSRGNATYLMTPDGSKHCAFTVENNTGGARLLTDKVISAMESLGLDAVNIGMEATGVYGNHLVHFLRENGRLGRYQREIHVLNPKQVKKFKESYPDLPKNDPVDAFVVADCLRFGRIKSEVYMDDYRYEALKTLTRARFYAVQNLTREKNRFANYLFLKCSGLAQDSDTKNTSATVLALMERYETADDLAFANLDELTAFIDETGRNFANPVDKAKEIQRAARDSYRLPVRVNSSVNQAMSVSIATMRSMDKQIKVLEKAIEQQFKIIPNTLTSIPGIGKIYSAGIIAEIGEINRFHSQASVAKFAGLVWNSNESGEFVGEDTHMIKSGNRFLRYYLLEAANSVRRCDPEFRRYYDLKFHEVNKHQHKRALALTARKLVRLIFRLLKDNRLYIR

SEQ ID NO: 514847 - protein, 346 aa, unidentified
MNQIIRIGMDTSKHFFQLHGVDTAEQPVLRRKLRRKEMLAFFAKQPPTVIGMEACGASHYWARVLCELGHEVKLIAPQHVKPYIKRNKNDGRDAEGLCEAMSRPTMQFVPAKTAEQQAALMLAGMRERLVGQRTQLSNAIRGYAAEFGLIAAKGLDKIEPLLADIAADEALPVLARELFAMHGREYAQLQAELKNIDARLKAWHRANADSRRLAQIPGIGPIVATALIMKVPDPRLFPSGRHFAAWIGLTPKDHSTAGKTRLGKITRAGDERLRSVLVAGATAVIQQAKHRRGHPLPWLLALLKRKPPKLAAVALANKIARIAWKLMTTGESYDGMRMPGASAFAA

SEQ ID NO: 514848 - protein, 319 aa, unidentified
MAQNDLVVAGVDVAKDKVDVCIRSLLLRRTFASTAEGRRELASWLRRQKLGKAVMEASGGYEREWAKVLRNAKIEVRIVDPKRVRSFAQSAGRLAKNDTIDAEMIAWFAETFDEARSQVYDAAREQLHQVVNARRALKDMQARLETQGEHAVPAAVQRMHARILKTIAIELVKIDAAISAMIRATPSFTELAEIIESVPGLGRTTAAELIAAMPELGQANNKIVAALLGAAPYDDDSGRRRGGRHIKGGRRRTRNVFYMACLGAATQHNPVLKAFYDRLVAKGKEKKVALIACMRKLICILNVMIMRRQKWDASRYALS

SEQ ID NO: 514849 - protein, 348 aa, unidentified
MRFYNQRHKFYCGIDLHARKMYLCIIDAQGKTKLHQNLDTDPALLFDAVFPYLEDVVIGVECMFAWYWIADFCSQHMIPFVLGHALYMKAIHGGKTKNDKIDSYKIAKLLMGGNMPVAYPYPAKMRATRDLLRRRTYMVRQRGLLLAHIQNTNTQYNLPSFEGKKISRKFNHQAVAGRFDDPSTNLAIQADLTMIDAFNRLIKPLEGQIERIACQHDPNNLYLLKTVPGVGQILALTILYEAHDINRFKTVQRFCSYARLIRPEKESDGKWAGKSNKKIGNAHLKWAIRTAAMISLRESEPAKKFVDRLSRKYNKGKALGIYTHKLGRAIYFMLKNKKVFDMKQFFSQ

SEQ ID NO: 514850 - protein, 341 aa, unidentified
MSNANAYIGVDLHKLTCFITVMDETGKIKKQTEISTDTDKVAKFFSRHRDARVAVESTMNWVPFYENLESLGCSVVLSNPLATKAIAAARIKNDRVDSRVLADLLRTNFLPTAYIQPRAIRDLKELVRQRILFVEMRTRLKNRIHSVLFKNNLKHNFSNLYGVAGMQWLADLELREVYRQELDWCLAGLKALNRLIEEMETVIQKKAKLDYDCQLLMTIPGISYFSALTIKSEIGDIARFRSAKKLCSYAGLIPSTYASADKVRHGRITKRGSRWLRKILIDSITSGSRSQYKLSYFYRKLKMSKGTGKAKVATARKLCHIIFAMLTDKQPFREFTPVKQR

SEQ ID NO: 514851 - protein, 361 aa, unidentified
MTKIKQKKLETISYEGQTIHVGLDVHKKNWSVSLYLNDSFIRTFHQESNGQALLQHLQSHYPGGHYKACYEAGFCGFSIQRELSLLGIDCSVVNAADIPQTNKGMLSKTDAADSRRIGEAFAKQLVKPIYIPKQEIEADRNLIRYRKHVQDDLRAKKHKIKSSLFTMGLKIPLEHDKPYWTNNFITWLKALSIADSGNKLTIDLLIDDVLVLRKRLFTTNKEIRLLSQSERYKSTYTLLTSAPGIGLITAMTMITEIGDINRFDSFTKFNSFIGLCPSEFSSGERIHKGKMTKRNHKTIRALIIESAWIAKRNDPALTLKYHELLKTKTAKRAIVIIARKLLSRLFTVWKTKIEYEKGVLK

SEQ ID NO: 514852 - protein, 390 aa, unidentified
MEARTVNNLLPAASHDDAVGCLVAIELSKKSWIVAVNTPLSDKISRHTLKAGDGKELLDLCERIRTRVARETKRRVEIVSCYEAGYDGFWLHRLLEAHGIRNYVIDPASLQVDRRARRAKTDHVDVERLLRSLMAYLRGEPKVWSVVCVPSVAEEDDRRLNRERGRLINERIQHVNRIKGLLAIHGIYDYQPLRRDRMLRLERLRTAADGQTLPPRLKAEILRELQRLELILGMIKTIEAERDAIASPKTETEHTNAKKIQDLAKIKSIGPEFATTLIGEVLYRSFDNRKQLASYVGLTPAHFQSGAMCRDQGISKAGNGKARTVMIELAWLWLRHQPDSPLSVWFRERVGKLKGRIRRITIVAVARKLLIALWRYLETGLVPKGAILKA

SEQ ID NO: 514853 - protein, 450 aa, unidentified
MERYATRVGIDLARRSNHKAVIVCDDRSGADTRQKAFSFSHDLEGFEAFCARVMKQTGKASLEGVTVNMEPTSGVWESVACFLKNRGAEVYFTRPDVVSQLRKVHSRFAKTDRIDADTLTRIPVSLPDRLIAIVDVAPRIRALRSLSAQRQRLVEDMVRWKSRFIAKAEMAWAPLFVHLDNEARDCVLVRAFFKKFCDPREVVRYGQKRFETWCRKTAHGNTSPDLFDTLWQGSAKAAALWEEMERSGAMAVDWELFGNLLAQDLRLIENLEAEVDLLDAQIKTARTQVPECDLIEQLPGVGKVISVTLAGILMPVDRFANTKKCGGYTGFTSRHKASAGREIQGLKITKNGNRRLKRDLALAADTAMLNDPELAAFAIRLLTAGKHYNKVRVAVGRKIAVRAYSLLKRSATGQADVAYIWRDLQGRTITKQQAKSITNELWTVYKAGRQ

SEQ ID NO: 514854 - protein, 287 aa, unidentified
MYYIGLDVHKKTISYCVKDASGLVHREGKVGATRWELDDWMNTLPQPWTVAMEATIFTGWIYDHLLPHAQQVKVAHPLMLRAIAAAKKKNDRIDAGKIADCLRCDFLPECHMACTAIRDRRRTLRYRHLLVRQMVQMKNRISGLLMETGVSHNKRRLHKVGYFRELLTSNEEVNESIRPLLRVSRDSIVRLQKTEYALVSSLQRDPLLAERVKRLRTVPGVGPITALTWALEMGEVSRFPSIRQGISYCGLCGDEKSSADKVTRTPLSKQRNKHIQRVLVEAGGRTC

SEQ ID NO: 514855 - protein, 472 aa, unidentified
MNTKAYLGIDVSKGYADFLLLDQDKNVLEEPFQLDDNTSGWATLAQIIDGWLSKGVEDLYCAVESTGGYEDNWFRTLKKMTSSQRIKVARLNPKGVKSVSEAALKRTITDAVSAENIAVYLISFPEKVYYESPNHNEEFKEARQNLSFHKLLVKQHVQLSNQLEKLLYQHFSEMMIYCRNGMPNWLLRLLVKYPSAKQVKRAGEKMLSRIEGISSDKAIGILKKTRNSDQKVSELTKQVIIQTAKEILSKKELCKKQMDFLSDTYKDNEQIKLVNSITGIGVNSAIKIMLEIEDISRFNSAKQLCSYFGVHPVFKESGDGKWGGRMSKKGRSEVRATLFMCALSAIRHDDNLKNLYARFRAKGMNHYQAMGVIMHKMLRIVFGVLKNQQPYDTAIDTQNIENAKQKMEETKALEKKEKLEKRRKSERFKTKDTDAPISRIAAKKRKKQETSQSSTLEENAGSIPAQIKVLNC

SEQ ID NO: 514856 - protein, 348 aa, unidentified
MPKVGAAGVRFLGEIASSPVRVERLVGKLASRYDKLHFCYEAGPTGYGLYRQIRELGHDCTVVAPSLIPKRPGERIKTNRRDAVTLARLLRAGELTAVWVPDAVHEAVRDLVRARAAAAQDLRGKRQQLLSFLLRHGRIFSGRQHWTLAHRRWLAEQSFAHPAQQVVFQDAVEAIAEALARLQRLEQQLVAIVPSWSMAPVVEAYQAMRGASFLVAVTFAAEIGDVRRFDNPRQLMAFLGLVPGERSTGETIRRAGLTLAGNRHARRVLVEAAWSYRHPARVSPTLRARLEGLPKPVRDTAWKAQVRLCARYRRLSAAGKKLPVVIAAIAREMAAFLWAIARHVAPAV

SEQ ID NO: 514857 - protein, 339 aa, unidentified
MQVTTVGLDLAKNIFQVHGVSENGEVAFNQALRRAQLLAFFEKLPPCLVGMEACGSSHYWARELSKLGHDVRLIPAMYVKPYVKRGKSDAVDAAAICEAVTRPTMRFVAIKSEEQQGVLFLHRARDLIVRQRTQLSNMLRGLLAEFGIVIAQGIGSAVKFAKGVLDGDKPGIPEVAIDVLGNLSNQLVALHLRVRWYEMRMRLQARQDPHVMLLRTIPGVGPVTASAIVATAGDASQFRNGREFAAWLGLTPLNRSSGGKERLGRISKMGDQYIRRLLVTGMTSRLRQMKTHPERVDPWAQALLDRKPVRLATVAMANKTARVIWAVLTKNEYYRAHTA

SEQ ID NO: 514858 - protein, 348 aa, unidentified
MRYYAGLDVSLAETSACVVDEEGKIIREAKVASEPEALAAWLGALGLPLARVGLETGALAGWLCEEMTELGVPNVVCMDARHARAAMVAMTHKTDRNDARGLAQMLRTGWFRQVHVKARRTMELRTLLTSRKTLVLKIGDVENQIRGSLCLFGIKLGTAKRRTFSERVRELTADLPRVAAILDVLLQAHAAMLLSLDRLNRMVLEIAREHAVCRRLMTVPGVGAVVGLTFIAAIEDPVRFAKSRSVGAILGLVPRKHQSGEIDRNGRITKTGDTEARAALFEAAHVMLHRVKKWSGLKAWATKVAQRQGNKRATVALARKMAVVMHRMWVDGTTFRFSAVEAPTTATA

SEQ ID NO: 514859 - protein, 466 aa, unidentified
MRTIGLDLAVRAAHKAVVLDERGHFCTPIITVHTQPSELDHLLIRAREGAPSDEVQIVMEPTGMAWFPIAVYYARQGVASYLVNSQEVADLRRYYKRHAKSDRIDARVLARLPLVNPDKLHRLVLPAATAFACQRACKQLDHLATQITAIKNRLQAIDRFAWPGLEEQVFADPFAPAARFFREHWYDPRQVVLAGAELIGQQWEASALNASDGGAWVEPLVALAQQVLTLYGADGQYLDFGQLQAEVQRDQVWLTWLEQQHHTLRLRTVRPLYRAVHPSRNLETLKGVGQDSAAVYASFIGDPRRFSSTRLFRGWTGMVPNSEQSAENEAKGLHLSQAGPDLIKKYAYLDAEIARRYDPQIAAIYYDQMMRKGKHHKQAVCACATHLLDRVLAVLRSDKPYEMRDSDGTAISDQQARAIIVERYSVPQEVRRRTNKRNRRQQADQRAERRARREPGRQPLLEGQLS

SEQ ID NO: 514860 - protein, 358 aa, unidentified
MRFYTQQHKHYCGIDLHARAMYVCILDQHGAKLVHKNLPTTPEAFLRVIAPYRDDVVVGVECIFTWYWLADLCQQEGIAFVLGHALYMKAIHGGKAKNDKIDAHKIAVLLRGGMLPQASVYPAEMRATRDLLRRRCHLVQKRAELLAHIQNTNSQYNLPEIGKRLAYKTNREGVAEHFPDPSVRKTIEVDISLIDHYDKLLGEVELYITRTAKTHDVQTFARLQSVPGIGQILALVILYELQDITRFPRVQDFVSYCRLVKCAKESNGKRLGTSGKKIGNVHLRWAFAEAAVLFLRQSQPGKAYFAKLEHKHGKAKALTVLAHKLGRAVYYLLTREQAFALQRFVTASPLRGETQPTA

SEQ ID NO: 514861 - protein, 383 aa, unidentified
MMIIGCDYHPGFQQIAFVDTESGELQERRLEHREEAEKFYRDLGAQGVKVRVGMEASGHARWFERLLAELQLELWTGDAAAINAKRVRKQKTDRQDAQLILRLMLKDDFPQIWVPSWENRDLRQLLWHRHRMVQARTRIMNQLQAVALNEGLRCKKRLWRDAGREQLESFKLAPWASRRRRDLLALLDRLTPTIAELTAAIEQEVERCPAAQRLQTHPGVGALTALAFVLIIGRAERFQCGKQIACYLGLVPLEDSSGQRRRLGHITKQGNSLLRFLLVEAAQVTVRSDPEWRSKYCHMALRRGRKIAKVAMARKLAVRLYWMMRKEWDYAQLSKFGSYAGKPGHRDGVNKTSQMSGHPAPLHGEFEVVIMIERVTEEMHGSD

SEQ ID NO: 514862 - protein, 361 aa, unidentified
MVLERTSVGLDVHARSVVAGVLDSETGELWSQRLPAASEAVVSWITSLAGPVAVAYEAGPTGFGLARALAAAGVRCVVVAPSKLERPAGDRVKTDRRDAERLARLLHIGELPAVRVPTELEEAARDLVRAREDARSDLMRARHRLSKLLLRQGLVVEGAAWTQAHGRWLASVGRELVQPGLRVAVDEAHGAVLAVQARRDRLDAAIGELAATPTWAPLVGRLGCLRGVGVLTGFGLAVEIGDWQRFTGATVGAWLGLVPSEQSSGGRRSQGPITKTGNSHARRLLVEAAWHHRKPYRPSQQLRARHAGQPAAVRERADRGNHRLHQRWCRLDARGKRSTISVVAVARELAGWCWSLAVLDA

SEQ ID NO: 514863 - protein, 381 aa, unidentified
MTTKATRNAQDTTSEGTLFVAFELSENTWKLGFTTGHGQKPRERAVTARDQKRVLDEIAQTKRRFALPETAPVVSCYEAGREGFWLHRFLEAHGITNHVVDSSAIAVSRRQRRAKSDGLDVRKLLNMLIRYEQGERQVWQVVHVPSVEAEDQRHLHRDLETLKRERASTTARIKGLLSRQGIQVTSLTKLPEQLDAMRLWDGSPMPPGLRQRVLRVYAHHQFLSAQIAEVEAERCALLHDSTDASIDKIRQVMLLKGIGINGSWLLVMEFFGWRECKNRREVGGLAGFTPTPYQSGESAREQGISKSGNRHGRWMTTELAWSWLRFQPESALSVWCRERFGSGGKRLRRMGSVAVARKLLIALWRFLETGGLPEGAVLKEG

SEQ ID NO: 514864 - protein, 462 aa, unidentified
MAERHDDESRTGRARPLEGLPVVRAQVAGIDLGSQRHGVCAPALTGNGREVADFGATTPELQRLLQWLKVRQVESVAMESTGVYWIAPQEVLEAGGLEVLLVDTRQLARVPGRSKKTDPTDGEWIQRLHSCGLLTGAFRPPEQVSMLRTLVRDKANLGAEAGDGVRRMQKSLDQMNVRVHRAVSDLDGVTGLAMVRAIVAGERDARKLAQLRDRRCQKSEAEIAEQLSGHGREDHLFSLRQSLKMYEATPERIAAYEQEILRKLAEMTPGERAGQSAPALKNPHKANSIRKRGEEPRRQAWYRMSGVDATQIDAIGVGTIEVVLSEYGPDLSRFPTEKQFISHATLAPRVARSGGKALKKKKRHSASTRVAAALRMAALALRHSPTALGAYYRSLARRIGGDVAVFATARKLATLIYRLLRWGQPYVDEGAQAFEEPYRQQRIRSLAARAKEFGYQLVLATT

SEQ ID NO: 514865 - protein, 346 aa, unidentified
MDQITRVFIDTSKSVFQLHGVDGAERVVVRRKLRRSEMIGFFSGLAPTVIGLEACGASHHWARVLAGLGHQVKLIAPQHVKPYVKRSKNDARDAEGGCEAMSRPTMGFVPVKTAEEQAGLMLMGVRERLVRVRTQLTNAIRGHAAEFGLVAATGPGKIEPLLARIAADESLPGLARELFAAQAQELEQLGERLGQIEARLVAWHRASPDSRRLAQIPGVGPIGAALLVMKTPDPKGFASARHFAAWIGLTPKDHSTAGRQRLGVITRAGDEALRATLVAGAMAVIQQALRRPDRASPWLVELLRRKAAKEAAVALANKTARIAWKLMVTGEDYAPGRKPAPAAQAA

SEQ ID NO: 514866 - protein, 417 aa, unidentified
MWNKVTSVKSPVEPASSKHTGGIFMICVGIDVAKDKHDCFILSSEGEVLADVFTISNNAEGFDTLLQTIHRCARPEDKIKVGLEATGHYSYNILGFLLDKGLHTFVINPLHTNLYRKSLSLRKTKTDRVDARTIAAMLMSDVDLKSYTDTAYHNEELKSLTRYRFDKVKERAKLKQSVSRLVTILFPELEKLVPTLHMASVYALLSEFPGAKQIARAHLTHLKALLNDASKGRYGRDMATELRDAARCSVGSVMPAKSLELQHTIRLIRELNTEIEDIESAIQTIMGEMQSPITTIPGIGFRMGAMILAEIGDFSRFDSPDKILAYAGMSPSTYQSGQLSLSGTYSHMEKRGSKYLRYALYNATKYVCLWDSTFEAYLAKKRAEGKHYNVALSHAAKKLVRLIYAMEKSRQPYNSVA

SEQ ID NO: 514867 - protein, 389 aa, unidentified
MQTEAAHAKPSTAIQTDLAAIFISLELSRSIWLITSLSPGSGEKLSKHSVRAGDVAALLARFSELKQKAFARTRKSFPIVVIQEAGLDGFWLHRALEQEGVESHVVDPASIATSRRRRRAKTDRIDGEALLRTLLAYKRGEPRVCSMVRAPTPEDEDRRRLCRERKVLIAERVEHVNRIKGLLFSQGISSYEPLRRDRRQRLEDLTTGDGRTLPTHLKIQISRELDRLELLLDQIKLAEAERDGLLAEGQAAAPELPARMLLEFKGIGAECAATLWLEALFRHFNNRRQLASYAGLAPTPWQSGSVDREQGVSKAGNPRLRAILIELAWLWLRHQPQSALALWFKERVKRNGGRMKKTTIVALARKLLVALWKYVTTGVVIEGAVMKPA

SEQ ID NO: 514868 - protein, 338 aa, unidentified
MALYCGIDLHSSNNYVAILNGRFERVAEQRLPNDLETVLRMLGAYRSELEGIAIESTFNWYWLVDGLDEAGYQMHLVNTWAVKQWEGLKYSDDRHDARWLAHLLALGILPEGYIYPKQERSVRDLLRRRAFLVRKRTSFLLAMRGAFECRTGLRTTSGEVKQWTAKDVEFYLDDPVEALGITCLLEPMKALDGQIRIIEKEALGRARLRDEFAPLLSVWGIGKVLALTMMYEVGEIARFRKVGNFASYCRLVKSARLSAGKRKGSGNARNGNPYLSWAFSEAAHFAVRYHPPAKKYFQRKRSKTNGIIAIRALAHKLARASYYVMKDQVDFDPERVFG

SEQ ID NO: 514869 - protein, 414 aa, unidentified
MLKIVYRVCCGMDVHKSFVVACIASTNEYGVTTYKSKRFSTFTGDLRRCAVWLAENNCKDVCMESTGKYWIPIYNILESTCNIVLAHPKYVKTIRGKKTDKRDAKWIADIFKHDLVSGSFIPPADIRQLRDLFRYRWKLTSFTTGEKNRAQNCLTVSNFKLDDVFSDVFGKAASAITARILENPTEKITDVSSFRTKRLKATDEEILAAVDGEMCEEQAEKLRIIRSHMDSLELCKLNLESLILATAEKYLPQLDLVMTVPGIQSFAAIGIISEIGVDMSVFPTSKHLCSWAGLTPQNNESAGKKKTTRISRAGAYIKPLLVQCALCAIRAKRFPEVRSRYLALKKRRGHKKAIIAIARMLLTAIYNMLKKNEPYNPELYRKGDRPPAHREVSVEEAIFILQRQGYLVAAPSTS

SEQ ID NO: 514870 - protein, 451 aa, unidentified
MPTVDSLAAIEAAALAGAAAGTSLEVVIEPTGPAWLPVAVFFTARGHLVFRVSSAKAADLRRFLSRYAKSNGIDADTLARLPLIDPRGLQALRLPGAEQAALDRRVRACDRLTMAAAEHKVRIKDLVRQLMPQSPLTGDLGQADLAVLERFADPRALLAADADTLTALIAGVSRNHQGTARAQQWHCAAAAAVDLYAGHPAMPYTDLAAEVATEVRLLRAIQAELAEHATGREDAYRWADPGRHARSLPGLAEVGAPAITAVTGDATRFPTGAHFKSYLGLTPRASETGNTDRKGQPISKAGSRLARATLVRAANHARKQDPQLAKVYYTQMVDRGADHLKALCVVAARLAERTWTVLHRRMPYVICDTDGTPVTPTQAKTIIAEQWTVPNDVRARRRSRKTQAGKAPHQVLAGHDRSDAPSADKRGDLPHQRSSNQRPAQIKPGLTPDPR

SEQ ID NO: 514871 - protein, 344 aa, unidentified
MKIKLLGIDLAKNVFQLCALNQANKVLYNRTVRRASLSSTIARLEPITIAMEACSSAHYWGRTFEAMGHKVLLVPAQHVTPFVRGGKSDARDALAICEAAQRPGIHLVPIKSIDQQDIQLLHRLRQRQVQHSTALANQIRSLGREYGVIFPAGIKSLISQLPEALEDGSNELSPVARYALADQHRCLIEVRQAMKTFLLQIKQLAGQHPAYVNLLPVLGVGPMIASAYIAAIGNGNQFKCGRQVSAWLGLVPRQYGTGGQIQLRGISKNGDRYLRTLMIHGARAAITRGLKKSPEMTQWVQPIIDRRGFNKAVVALANKMTRICWVIVTTGEAFDVKQAFKPVA

SEQ ID NO: 514872 - protein, 324 aa, unidentified
MSDGMLGIDVSKNTLDVSLSSCNKVRARSFPNSSDGWRHLLDWLINQKVRRVHACLESTGRYSLGVACVLYEIGHVVSIVNPAQIRDFARTKLGRNKTDGVDASHIREYCELFKPQPWAPPSEAHRRLGELQTIRAGVVAGLTEWNNRKNSGMVDAAALSLADATISHFTSQLGAVDEAIAKTIDNDSELRCKRDLLLSISGVGETLAGVVLTELPGPDVLRSSAEVVAYAGLNPRRHQSGTSIDRMTRISKIGNAVLRAALYMPAMSAMRYNPAIVALVTRLKSRGRLKPMQIVVAAMRKLLVLCFGVLKTGKRFDPALAMGC

SEQ ID NO: 514873 - protein, 367 aa, unidentified
MEKSSKVFVGMDVHKESIDVTLAEVGGEVRRLGAIGGDRGSLLKMVRKQQSKGGERVFVYEAGPCGFWVYREITALGERCMVVSPALVPKRAGDHVKTDRRDSERLASLARAGELEAIHVPDIRDEAIRDLVRARDDALIAQRRVRQQLKALLLRNDIRYVGRTSWTGAHRRWLSELKLPEPAQQIAFEEYVDAIAVATSRIERLARAIETEVLTWRFAPVVAALQAMRGIQFVHAVTLIAELGDLTRFASARALMGYLGLVPREDSSGEHRRQGSITKAGNSYARRALVEAAWAYRHPARVTRIIATRQAGIPKAACDIAWRAQLRLSAKYRRLAARHLNPNKIVVALARELSGFVWAIGHSVKPQ

SEQ ID NO: 514874 - protein, 397 aa, unidentified
MIAVGIDISKAKSTVAVIDSDGTVLASPFTMAHTQPEMEAFVTYLKGLGEPTTILMEYTGHYHYPVLKKLQDEGFPVCIVNPYQMKKYGDVEIHKAKTDKKDALRIAAYALEKSYKLVPYSSMEQKYEDLKFLSRQYNQRISYVAKLKVQLIALLDQTMPGITRILPLNSRNPEKCALLLFIKRFKSFDEIQRIGKARFLASYDVLAKKASERSASSKGLSIYELAVDSITTRGEDPYIWLSQNQCVDLLSTTQNAADEMISQMRNIAETIPEYKVLRAMHGVGDRLGPIILAEIGDVHRFHSGKALNSYAGNDAPPYQSGQFESRNRHISKRGSSALRKACYEVMQALKLTKPQDDPVYLFMLKKEQEGKPFNVAKMAGVNKFLRIYYARAMEFYK

SEQ ID NO: 514875 - protein, 349 aa, unidentified
MKFYTKTHNHYCGIDLHAKTMYLCILDKNGQILLHQNMKSRPEDFLAATQPYRDDLVVSAECMFTWYWLADLCQQEGIEFVLGHALYMKAIHGGKAKNDKVDAFKIATLLRGGNLPKAYVYPPAMRATRDLLRRRLHLVRRRGNLLAHIQNTHHQYNLPAPQAKIAYKANREGVAETFTDPDARKSMEVDFLLIEHYDKVIRDLELHLERRAKQHDPQAYHRLRTVPGIGKILALTILYEIHDIGRFDRVQDFLSYTRLVKCDHSSAGKKLGTGGAKIGNVHLKWAFSEAAALFLRNNPEGQKHLRRVAGRHGKAKALSILVAKLGRAVYFMLRQERAFDMRRFLARKN

SEQ ID NO: 514876 - protein, 403 aa, unidentified
MIDTGDIDVFLGLDVGKGEHHATAVTPAGKKAFDKRLPNTEPKLRELFAKLKAKHGTVLVVVDQPASIGALPLAVARDMGCPVAYLPGLTMRRIADLYPGEAKTDAKDAFIIADAARAMPHTLRAIDSEDETIAELEMIVGFDDDLAGEATRVANRLHGLLTQIHPSLERVLGPRLQHPAVLTLLERFGSPAQIRKAGRRRLVTLLRPKAPRMAERLVEDIFAALDEQTVTVPGTEAAALIVPSLAGSLAAVLDQRKLLAARIEELLEAHPLSKVLTSMPGIGVRTGARILIEVGDGSTFATAGHLAAYAGLAPATRSSGSSIRGEQPSRRGNKQLKRAFFLSAFAALADPASRAYYDKKIAQGKHHTQALLCLARRRADVLFAMLRDGTFYEPRPVTAVGGA

SEQ ID NO: 514877 - protein, 366 aa, unidentified
MFVCIINENGVVFQEKYGVLTPELEQMLAKMMEYHVEEVCMESTSIYWMPVWRVLENYVNLKLVNPYFIKQLPGKKSDVKDAEWIATCLLKDLIKGSYVPDDLIQQLRQYDRRISDLNSEIVRKLGKLDAALQRCNIRISNYVATTDGKSYKEVVRLISEGTRDPAELAKVIHGRTVNRVGKDVVLASLTGVISETDVDIIRQLREEVALAEKHKDECQSKMDAICQQYFPQQLKNLQTIPGIKGRSATAIIAEVGTDMSSFEDAAHLVSWCGLKPRNEESAGKIKARSTTHGNRYLRKTLIECAWAASKTQGCYFNKFSYHQVVVRRKNKMKVQVAIARKVLTAVWYVMHDNVAYRDFTPDIAAQ

SEQ ID NO: 514878 - protein, 346 aa, unidentified
MLHAGLDLSRKRLDFCLLDESGERIEVGATPPDADGLRSLARRLARHEQPVQAAIESMNGARFVHDQLELAGWQVEIADALKVKGLAPLACKTDRIDAWVLAELCRRDLVPAIWLPDPSVRAERERARFRLHLVRHRSSLKQRVHAALLAHGKPCPVSDLFGVSGRALLERLALPEPWSGTLAASLQLIDELDRQITTCEVELRRLGADHHYVPLLMTVPGIGWVLAYTIAAEIGDIARFPAPRQLVGYTGLCPRVYQSGNSDRRGPLAKNGPRYLRWALIEATAHACKHPLYRDRYQRTKTRLGRQRGAKVAQVDLARRLADAIWHMLTRDQPFAPAGATDPLAA

SEQ ID NO: 514879 - protein, 362 aa, unidentified
MKIIGCDLHARQQTVAMLDTKTGEVVNMTLKHEGNNVREFYATLPRPVRVGIEATGSMQWFVNLMEELGIECLVGHPAEIRAAEPRKQKHDRRDADLILKLLVENRFPAIWLPSKELQDLRSLLRHRHQWVRMRTRIQNALQSIALANGLRRGSSLWSQAGQHTIASLPLAPHTAYRRSELQALYEKFETEIEKLNQRVEEQASERPGARRLMTHPGVGPVTALATEVFLGDPARFADSKALASYVGMIPREYSSGGRQRLGGLSKQGNPLLRFLWGEAGAHAVRRDPELKRFYRRKLVQKGFGKASVAVARKLGIRLWIMLRDQIEYNEFCRRGQKQQKSSDACAGMPETRYGANSHRPVD

SEQ ID NO: 514880 - protein, 426 aa, unidentified
MLRLRISHKAVTLIGKEENTRPNTGYGCEDMYFLGIDIGKNNHVASMIGEDGKPIFRAFSFPNTTEGGESLLAKLSSHGIASDTLAIGLEATGHYWLAAYSFLRDKGYKLHVINPIQTDGWRKGVEIRRRKTDVIDSVLIAELVRYGDFIEAKLPQEAILSLRNLTRFRSYLVDSISDLKRKVICVLDQVFPEYQSMFSNVFGTTSKEILLQFSSPAELESVSADTLAELLAGLSRKKLGMEKAEELGRAASTSFGVTFCRDSFSFQLRMLIEQIKYIESQVKDTEAEIKRIMGTLCSPITTVPGVGKTLGAVILGEIGDIRKFDHASKLVAFAGIDASVNQSGEFEGSRNRMSKRGSPYLRRALYLASTVAVTGKNPDLALQAFYQKKLAEGKHHSTCIGAVSRKLCYIIFSVLRENRPFEVRIP

SEQ ID NO: 514881 - protein, 345 aa, unidentified
MNKISVIGLDLAKNVFQIHGIDAEGKVVVRKQLRRSQLRQYFARLAPCLIGMEACGGAHYWSRELTRLGHSVRLMAPAFVKPYLKSNKNDRNDAEAICEAVQRPSMRFVAAKTLEQQSVLHLHHARRLLVRQRVALNNHLRGVLLEYGIALPVGIQVLSRRIPELLEDADNDLPILTRHLLAELKAQHDGIEQRISVLSRQIEAWHKTSEASQQLATIPGIGVLTATALAATVGEGQGFRNGRQLAAYLGLVPRQDSSGGRDRLLGISKRGDGYLRQLLIHGARAVIHHVRRRLKTGRPGGNPWVEQLLQRCHVNEVAVALANKMARIAWVVLVRQETYQAPSRA

SEQ ID NO: 514882 - protein, 341 aa, unidentified
MVHVGLDLSRTRLDVHVMDEAGAALAVTTAAPDRDGLTVLADRIGGFGGPVYAAIESMNGARFVHDQLELAGWQVEIADAQKVKGLAPLACKTDKIDAWVLAELCRRDLVPAIWLPTPAVRAERERARWRLHLVRHRTALKNRIHATLLAFGHPCPVSDLFGVGGRELLGRLELPEPWAADTAAALHLIDQLDHQVIECERALRHMGADHHYVPLLMTTPGIGWVLSYTIAAEIGDITRFASPTKLAGYTGLCPRVYQSGGKDQRGPLARNGPKYLRWALIEAAVHAARHPVYAQRYQRTKTRLGRHRGPKVARVDLARRLSEAIWHMLSTNRPFAPAGAA

SEQ ID NO: 514883 - protein, 408 aa, unidentified
MWIVKRPCSLGGKSPHGLVPSCGNELLISWNEAAGLHGDVVATFAPQRHTRSAPQQRTGRPARDNIGLDLHQRETQLCLLTDAGELIEQRIATTGERFTAVLGPRPRSRILLEASTESEWVARHLESLGHEVIIADPGYAPMYATRSRRVKTDRRDARTLAEACRLGAYRAVHRASDAQRQVRAELAVRDALVRTRTRYVAVIKALVRRDGFRLAQGEPERTAAKVAALALPPALAAELGPLLALLAPLNQQIAAADERLTLLATRDPVVQRLTSAPGIGPVTATAFVATLDQVERFATAHRVEAYLGLVPSERSSGERQHRGRITKQGNTRMRWLLVEAAWRILRSPRPEAAALRAWAEQIAVRRGKRVAVVALARRLAGVLYALWRDGSTYRGARPHPAEGSAAAA

SEQ ID NO: 514884 - protein, 369 aa, unidentified
MSQEKMLLFGLELSNKKWVVCFGEGSGTRRVEVAAGDQAGLLREVEKAKKKFGLPEDCRVASGYEAGRDGFWIHRFLWRNGICNRVMDPASIPVERRGRRKKTDKIDARKLLGLVVRRELHGEKRAFSEVRVPDEAAEEQLRLGRERDRLKKESTMHRNRLKSLLVLHGVKSAKVEYCDFTALKDWQGRALPGELVRELNREQERLTVVRRQLKEIEKVQGERLKQPKTAAEKKGATMATLRGLGKQSSWMVAHEYFGWRTFANGKEVGGASGLVGTPYDSGESRKEQGISKAGNRRIRRVMVELAWLWLRHQPNSALSRWFRERFEGQGKRLKRIGIVALARKLLVALWRFVEFGQAPEGAVLGGAIR

SEQ ID NO: 514885 - protein, 370 aa, unidentified
MAKRSMFVGMDVHKESIDVSLAEEGRDGEVRHYGVINGDLEAVAKMVRALRGPQRRLRFVYEAGPCGFGIHRYLTAQGEDCVVVNPSSMPKRSGDRIKTDRRDGDALARLHRAGELTAIYIPTPDDEALRDLVRAREDAVGLSTQAKHRLKAFLLRQGRRYPGRAGWTRPYRRWLADLSFPLAPQHIALQEYRDTIDETERRVERITEQLRQLTPPWRWAPVVDALQALRGVSFVTAVGLVTEMGDIRRFTHPRQLMAYLGLVPSEYSSGPSVRRGGITKAGNPHARRLLAEAAWAYQGVPRIGRQMLYRQEALSPAVRNIAWNAQLRLTGRFRRLVARGKAKPKVATAIARELTGFIWAIAREVPTPPA

SEQ ID NO: 514886 - protein, 433 aa, unidentified
MFGKVVDGGSWWTVGVDCGEERHRFVMVDERGERQSACWVRNRRDKIEDAVAQMVLALPTGVRLRLVTEGVRSLGWVVAQVSNSLGMEVWQVNPKALNHYRDLEGQPRKDDDIDAYLAARMVVFGMEGCRVAVDSQPEERALCRLTRLRRQLNDRRKEVKNRLRSLLVELAPEVVSKGWEGPTHDSKGMRAVLKRWPAFEGLEKARVSTIEKMLVSSTRLGARCGKMSAPLKEMARRVEMAPMELEIVKMDISMAIDELDVLDGSVAKLEKEIRRRVMEHPVGRKLMCMPGEGPVTVGTDIGEVLPVARNVSEGQAATYSGLTPLSRRSGKGGRPSKLARGVNKHALRTNFLSAFAAVSASAIDAAYHQKQKDRHQGHPKSHVKATLALARQRFKIKYKLMTTEAVYDKEILISSHLERQRRVLANQNQSHVA

SEQ ID NO: 514887 - protein, 345 aa, unidentified
MTEAYDGRQVVGMDLHRRRSVLVRMTGDGRKLETVRIENSPAALRSVLARAGKNPRVVIEATYGWYWAVDVLAAAGAEVHLAHPLGVKAFSYRRVKNDERDCADLADLLRLGRLPEAWIAPPPVRALREVTRYRHKLVGQRTSCKDQVHAVLAKAGIPVTRSDIFGRGGGIWLDGLPLPQPYAGKTASLRALIAVLDGEIARLEEQAAAMLAGERGYAAIRQLPGIGPVLGAVIAAEIGDITRFRHPGQLASWAGLTPRHYESDTRVIRGHVSKQGSRMLRWALVEAIQRQPAGTRPRQVKDAIIARRGPEVRGIAKTAAARTMLTQVFYGMRDGHIRRATSQAA

SEQ ID NO: 514888 - protein, 428 aa, unidentified
MTTDRVPCRKFILGGAIMDKIYDSCCGIDVHKKLIVACLRKGNRQEVREFGATTRELLELADWLKTSDCKMVAMESTASYWKPLYNILESSDLNAMVVNARHMKAVPGRKTDVKDAEWIADLLQHGLLQPSYIPDKDQRELRELVRYRKSLVGERTRELNRLQKMLEGANIKLSGTVSDINGKSARSILEYLLTGECIDGAKYDEMYEQKVIAHNLKATKEQIIDDLNGVMTPLQRRMMKELLSHLDELNTHIKNLDDEIDNFMKPEEKQASQAIQDVTGIGNTSAQAIISVIGTDMERFSTDRHISSWAGLCPGDNESAKKRKSGKTRKGNSLLRTTLITCAHAAVKNKKSYFYAQFMRISAHRGKKRAYVAVAHSMLIAIYHILKDGVIFKDLGADYYNQFNKERKINAYLKKFKARGWESPVVAA

SEQ ID NO: 514889 - protein, 428 aa, unidentified
MSYKIAGIDVHKKVLAVVVSDVEIESEYQFERRMFNSNPEQLRSLAAWLVEQEAEEVVMESTAQYWKPVWGALERYWKPVREKREGARRRSGALHLAQALSNRGRRGRKKDFRDAERLVKRLVARELTLSFVPDAEQRLWRTVTRKKYQLRRDRVRLQNQLEALLEEAHIKLSSLVSDLLGVSARRMLKALADGETNPAALAALAHERLRATPEQLCDALGACTDLKPVYRQLLKMALEQLQLLEQQIGQLDQELATLLHPHQHAVQRLAEVPGLGVDSAQQIIAEVGPTAATFPSGEQLSSWVGACPGDEESAGVNYSHRSPKGNRHMRRLLNQAANAAVKVKGSIFEIIYRRCVPRLGHNQAIGLIAHRQCRLIWLILHKGTLYEERGPAVTKRSKYQRTWRMIRQLQQLGYRIESPNLQASQAHA

SEQ ID NO: 514890 - protein, 350 aa, unidentified
MTMVGGFDVHRKQITFDYVDTDTGLVRCGEIRPATRTTLRSWLGEHCPHGDVEMAVEGCTGWRYVVEELAAAGGTARLADPAETAVLRGPKKRAKTDRADARLLRTLLLEGRLPESWIPPAHVLEVRTLGRLYCALMEERRSWRQRIHAQLFHQGCPPITALLTEAGREALIRAELSATGRHYVDTALRRIDELTAEIDPVRTQLVNFARRQTGCRALQARQCGVGWLCAAIMWAEIGDARRFHNSDALVRFAGMDVTVYSSDRKRSPGHLSRQGCPELRWAVFEAAKCAARRGSPDYVYYRRLAAVPDSGKNPTLAVERKILRRSYHTLRELGDAALAIPVRQAKEVAA

SEQ ID NO: 514891 - protein, 343 aa, unidentified
MQVVRIGLDLAKYVFAVHGVDERGKIALRKTLRRDSVVRFFANLPPCMVGMEASNGAHYWARVLTDLGHQVRLISPHFVTPYVKSNKNDRNDAEAICEAISRPSMRFVPPKSTEQLAVQAIHRIRRRLVSDRVKLVNQVRGLLAEHGIVIPRDITQLRRGLAELIARCDDDLSELVRSLMTELREELAELDRRITSYDRRIREIFRNSEPCQRLGKIEGIGPITATALIAAVGDRTCFKNGRQFAAWLGLVPKQRSSGGRARLVGISKRGDRYLRTLMIHGARAALARAGGKQDPRSLWLGKLRNRRHPNVAAVALANKNARIVWAMLAGNAAYQPELSMKTA

SEQ ID NO: 514892 - protein, 355 aa, unidentified
MSQEKYIGMDVHQATISVAVMDASGKLIMECLLETKAATMVEFIQGLHGTLSLTFEEGTSAAWLHDLLKPHVSRLVVCDPRKAALLKDGNKSDRIDARKLAEMLRTNQLKPVYHGEHGIRTLKELGRSYLTITKDVTRSMNRIKALYRSWAVPCGGTSVYAPRHRAEWLAKIVEPGVRIRAERLYQQLDGLQPVRLQARRELLRESHQHAAVQLLRQIPSIGPIRSALLVALLQTPHRFRSKRQLWAYSGFAVETHDSGEYRSVRGKLQRNRERITVRGLNDNHNKDLKNLFKSAAISASTRPGPLQDFYVALVAKGIRPTMARLTLARKIAAISLTMWKKGVSFDSKQLHRQAA

SEQ ID NO: 514893 - protein, 391 aa, unidentified
MICVGIDIAKDKRDCFILSSESEVLADVFTIPNNAEGFDALLQTIRRCTRPADKIKVGLEATGHYSYNILGFLLDCSLPTYVINPLHTNLYRKSLTLRKTKTDRVDARTIATMLMSDVNLKSYTDASYHNEELKSLTRYRFDKARERAKLKCSVSRLVYILFPALEKLVPTLHMTSVCALLSNFPGTKQIASVHLTRLTNLLHEASKGRYGRDKAIEIRNASRNSIGSTMPAKSLELKHTIRLIGELDVEIDEIENEINSIIDEAHSPITTIPGIGNCMGAMILAEVGDFSNFASPDKILAYAGLSPSTYQSGQLSNCYSHMEKRGSRYLRYAIFNATKYVCHWDPSFAAYLAKKRAEGKHYNVAISHAAKKLVRLIYAMEKTRQPYRPAA

SEQ ID NO: 514894 - protein, 361 aa, unidentified
MSSIVYGGLDVHKKSICAHLICPDTGEIVSEELPNERERLLRAVRRWSKLGELRLCYEASGAGFVIQRWLDAAGVRCEVIAPSLIPKAPGDRVKTDKRDARKLATLYRAGLLKAVRVPGQEEETVRALVRLREDLTQDMTRTKNRILKYLATLGFYYLEGKNWTEKHRAWLRGLSLEAIQRLIVDSHLEELDALDKRRQGIDRRIEEIAQSEPYRQKVQRLMSLRGIGLYSAMVLVTEIGDACRFAKAPELMSYFGLVPREDSSADSRRRGAITKAGSSRPRWILTEAAWNQMSKPGNCQRLKKHWESQPSEVVGIAKKAEKRLHEKFWKVLSRKDRKTAVTAVAREMVGFVWAIMTLEVA

SEQ ID NO: 514895 - protein, 294 aa, unidentified
MNITTIGLDIAKSVFHFVGVNKAGKLVKKKMVKRKELVLFLAQIEPCLVVMEACGGANYWAREFEKIGHRVKLIAPQYVVPYRQGNKNDYNDALAIAEAAQRPNMRFVEPKPVEQQDIQMLHRMRERLNKQSTALINQVRGMLAEYGIIITKGKASFRAKLPDILESADNELTAKGRSIFHQLYEEFNDIERRLKSCDVQVQQEMKNNQVCQRLESMPGIGPVTATAFYAAVGEGEDFTNGRHFSAWCGLVPKQHSSGGKNNLLGISKRGNAYLRTLFIHGARAVLYHSEAKGD

SEQ ID NO: 514896 - protein, 402 aa, unidentified
MRSIALDVHRDCCEVAIKEGGEVRPARRLKTSVEELELFARSLASDDQVALEATGPANAIARIVEPHVARVVVANTRRVRAIAEAKLKTDKVDARTLCELLDAGFLPSVWQPDAPTRALRGLLGRRERLVRSRTRAKNALHAALQRNLKGRPPMTDIFGRAGRDWLARLELPGHEHRIVESCLREVDFLSLEIAALESELAKLALNSDEIRRLMSVPGVSLVSAATFVAVVGGVGRFRSPKKLVGYVGLDPKVRQSGEQAARHGRISKQGSSAARQMLCEAAWIAVRTPGPLRAFYERLRARRGAQIALVATARKLCVLFWHLLTRGQDYAFGRPSLTRHKLRRLELMAGDPPRRGQRSGSPASKREQRHERELSEQVEQAYRRLVADRQQQPQTERCGCRT

SEQ ID NO: 514897 - protein, 355 aa, unidentified
MEYFKDIKIFIASKHVFCGIDIHFGHWNLCFVCDGEVVEKTRIPNSYETLNMRLSKYSQARKVSIVYEAGFSGFWLYRRLISDSYDCIITPPSKMLKSDNKVKTDKRDAQSLAFYLSAGLLKVVYVPPADIESDRRVVRRRAQLVKKQTRAKNHIKSFLHLHGLKTPEDIKTHWSNLYLAWLERLIFDYESDKFTLSQLIKNYRRIREDLAEVTRYLRMFSRSEKYQENYNRLTSARGVGLITAMTFLLEIFDFGRFAKEDDFSSYLGMTPSQFSSGDKVRLGHITRQGNSNLRRVLIESAWTVIKHDPHLREKYDRIKARGTNGKKAIVAVARSLAVRLRRCILDETEYVIGVS

SEQ ID NO: 514898 - protein, 356 aa, unidentified
MSQKLNSTIAVIGIDIGKNSFHVVGHDKRGAIVLRQKWSRGQVEARLANMQPCLVGMEACVGAHHLSRKLQVLGHDARLMPAKYVRPYSKGQKNDFRDAEAIAEAVQRPTMKFVGTKTVDQLDLQALHRVRERLVSQRTGVINQIRAFLLERGVAVRQGFRFLRAELPSILAKRTDVLSPRMSHLLEDLAGDWRRLDERIEHLFREIEGLARQDQGCARLMSVPGIGPIIASATVAAIGMGDAFTKGRDFGAWLGLVPKQISTGDRTILGSISKRGNRYLRALFVQAAWVVLVKVGPKHWERYGLKSWIEAAKKRLHHNVLAIALANKLARIAWAVLNKGRAFECTKTYAVAPQAA

SEQ ID NO: 514899 - protein, 335 aa, unidentified
MKKTVIGIDVSKEKLDVSILKETKIQEEAIIENQTKKITAYLKEVQKKNTPEDILICAEYTGQYTYPLSIVCEELGISLWIENPAQIKYRSGVQRGKNDKLDARKIAQYAERFQEEAKLFSMPEKSMVSLKQLISERDMYVSDRAKYQGQLTDQERFMDKADYKKKGKRLHALIQELDQAIKQIEKEIQKIIDSDETLSNQHKLLCSIEGVGERTAVKMIVETNAFKDFTNPRKFCCHAGVAPFSYTSGSSQHSRNKVSNRADKSIKALLHMAALIAATRMHGELHDYYLRKVGEGKNKMSVLNAVRAKLVYRMFAVIKNNQLYQKNYLNPLLKS

SEQ ID NO: 514900 - protein, 437 aa, unidentified
MLPTINPHAAGIDAGSTKFFVATPDGEVTAFESFTLELYRLRDHLLARGVTTVAIEATGIYWLALYAVLEEAGIEVCVVNGAHVKNLPGRKSDVQDCQWLQQLHACGLLRKSFVPCERIRALRSYTRLRDDHIRQSAMHVHLMQKALDQLNVKLHTVISQIQGASGLAVVRAILAGERKPAKLAALCDERILKTKRAAVERSLQGIWKREHLFALAQALAGWEFCERQIAECDAQIAAQLETLTRDLPPPPAPAEPPKSGRHHVPQVPGLHAHLLSLSGGHDAARLPGLTPGNWLKLMSEIGSDLSRWPNEKAFTAWLGLAPGKHQSGKTARRVRRRRPSAAAQIFRLAAHSIAKSRYLALGGFYRRLKARTSAAVAIVATARKLAVLYYHAMRYGLDYVERGLERYEQLYRERQRRFLEKRAAELGLALMPTSPAT

SEQ ID NO: 514901 - protein, 539 aa, unidentified
MASRTKRRGGRRRGQVDGLGKRRGVIGPRVARVGGDRFGIVAVDCGKARSKWLLADFYGQVLAGPTPVEHSRGGLDDAVVQVRRAIREHGLRDQIVAVEQTGRYHKPVLRAFSSAGLESRLVHPLASRRYREASDPGIKTDDKDLGGIWAAATHGLALVEPAADEFWASFQLFTRHRRLLVCKSSALCCQIKEHLDAAMPGYAACFPTLWDHPAALSLALDWPVGQSLSAAEAMRRAGFVGLAEHLRRKKIRFQQRTVQRVIEWSAGAAAPDAGGLWHRRIAMELEADRTAKALQIVGLERQIASRLAATPYVLLLSLSGVNVVSAGEYAAELGPIEQYAHGRRITGRAGLYPSRYQSEGVDRSDGPLVGSGNRRLRYALLQIADNLMKCNRHFGALATRWAQQGKDPRDNHVRIASRFARISYQMVAGRQVLRHPAMQGRDYVLDKLLRFHVEHGSGPAAMLADLRAAGGQLPAGERAAEAAPLAEQLAQVRRRQRAFGSEAQARRGPRPLAEALALMLAELGWGQVQSSGSGAAGPT

SEQ ID NO: 514902 - protein, 345 aa, unidentified
MTEAYDGRQVVGMDLHRRRSVLVRMTTDGRKLETARIANSPAALRAVIARAGQNPQVVVEATYGWYWAADVLEAAGAEVHLAHPLGVKAFSYRRVKNDERDCADLADLLRLGRLPEAWIAPPPVRALREVTRYRHKLVGQRASCKDQVHAVLAKCGIPVTRSDIFGRGGGIWLDGLPLPQPYAGKIASLRALIGVLDSEIARLEEQAAGLLAGDRGYAAIRQLPGIGPVLGAVIAAEIGDITRFRTPGQLASWAGLTPRHHESDTRVIRGHVSKQGSRMLRWAVTEAIQRQPAGTRPQQVKDAIITRRGDQARSIAKTAAARQLLTLTFCAMRDGHVRRAISQAA

SEQ ID NO: 514903 - protein, 347 aa, unidentified
MGNDTAIAVDVAKNVFELGISDRPGVLRRKERLQRPQFLPFLAAQPPATVVMEACGSAQFWARRIEQLGHRVVLLPAHLVRPYVRGNKTDRTDVKGILEAYRNEDIRPVPLKTPAHQTVVALHRLRGAWMAERTARLNTIRGLLRELGVFIPVGARKVVPEVWMQLSDADSGIPDAIRPFLAEACEEVRDIERRIALVERQLEALAEQTPTIQRLLTVPGIGLLTATALFALVVDVQRFPSARHLASYLGLTPRERSSGNTRRLGAITKRGDAYLRTLLVHGARSVLARAKQKVDSARRDRLREWAAKVEKSRGHNKAAVALANKMARMVWAVWRHDRDYEPTPVAA

SEQ ID NO: 514904 - protein, 385 aa, unidentified
MGHQTFIPRDYDVFAGLDVDKRSISVTFTDHQGLLKSLRIPNNVEHLVNHVRKHFPNQRVAFAYEAGPTGYGLYDGLVAQEFRCLIASPSMIPKAPGQRVKTNRLDSVGLSENLRGGQLKGIHVPSPLYRELRHLTQLRDTFVNEMVGMKQRIKSLLLMEGVEFPPAPAGSQWSFMVKDKLRKLPCSSTVRFKLDQLLDSLEFNEKQVLKTTREIRRFCQNDPELSQCIKYMMSVSGIGWIVASQLLARIGDWRELRNIRQLGGFLGLVPTEHSTGERTDRGSITRTGDERLRSKMIQASWSAIRKDAELREFFRLICHRHPRREGPRVAIVAVARKLSVRISVVLMQQRPYVVREKVHSAPLTQEETSPQGTTRRQAEPGDKDS

SEQ ID NO: 514905 - protein, 332 aa, unidentified
MENFYFIGVDVSKKKLDFCVMFEGKIVHEEATANHQTAIMSLLRHLEEDYGITSDRMLVCAEHTGQYTFPLACACKSVECKLWLENAAEIKYSSGVQRGKNDKVDARRIAIYAGRFQDKVRYYERPTEDIERLKQLESERTLYVTDLAKYKGQMKDQKDYMPKALYERKMKRLQALMDDLEEAIQAITDEMDEVIASCPVLFRQRELLMSIDGVGRVVATNMIIATEAFTRFDDPRKFNCYAGVAPFSYSSGSSLHSKARVSHRADKVMKRLLHLAAVAVTHRIGGELKKYYERKVAEGKNKMSVINALRAKIVARMFAVIKRNEKYKPILS

SEQ ID NO: 514906 - protein, 352 aa, unidentified
MDDPILAIDLGKFNSVCCWYEPASKAATFRSTRTTRAELEREMRRLPVSCVVIEACSPAGWIRDTCSELGLRCLVANTTGAAWQWKNVKRKTDRDDALKLARLAAIGELPTVSLPSRPVRQWKSLIGLRKRLVGERGRGQNRIRGLLVGQGLAAPVGNKAWTELGLAGLEQLAKPLPECGPEELWRGELTSLIARHRFVEAQIREAESALDALAKRSPAVQLLLSVPGVGVRTAEVIATHLHPERRFQSAEQVSAYAGLVPRQYQSGLSDRRGRITRRGPKLLRAALVECAWCSLRYNGWALALWRRLLANGLTKKKAVVALARKLLIRCWAILKTGQPWRNPLTVVTPLAG

SEQ ID NO: 514907 - protein, 471 aa, unidentified
MNTVVYSTFNHIQGKIGSRWAQLVRETGSENILLVAIDAAKYTPKAIIATFFGDILVKPFDIDSSTSGFNKLKKLVESIKEKNGLSQVVVGIETTGHYYEHLVFKCHLEGYHVRTVNAATTAKEREALLNWSKTDNLDLMAIIQSVIHGRGTSNELPSGNIVQLRKLTRARRELVAERTKTKNLVLMHMDHIFREYQGKTVWVNGKRGFSKPFSDVFGKASRYLMRNHPHPEDILVLGKKGLRELSIRENLKFREETINILIDFAEGSISLSKEQVDADIYLLIQKLDRLEFLDNQIKALEAKIEDLFVVMEGAVILSVQGIGLVTGAELIAEMGDISDFDQAGQLIKLAGTNPIVKQSGGHRPAYYGVSKQGRRPFRNIVYQVGKSLAVNNPEMHQRYLKLKERGKHARQAYIALGNRMIRLAFSMIRNQTFYQTKDEHYVLLEEINKKIRKSNVQKFFETHVSPTVCAS

SEQ ID NO: 514908 - protein, 347 aa, unidentified
MRFYNQQHKYYCGIDLHARKMYVCILDKKGKTRIHKNIKTDPEMLFELIFPYIEDIVIGVECVFCWYWVADLCSEHKVNFVLGHALYMKAIHGGKTKNDKIDSYKIAALLKGGNFPIAYPYPAKMRATRDLLRRRMYIARRCGELVAHIQNTNTQYNLPAFAKKISRKYNREGVAERFEDPAVKKSVEVDLALIDSLNKILAQLEWYIEKTARQHDYQTLYLLRSIPGVGTILGLVILYEIHDIKRFPRVQDFSSYARLIKPVKESNGKWAGKTNKKIGNAHLKWAIKEAAILMLRESGQAKDYLARLQKKYNKGKALGILTHKLGRAIYYMLKNNEAFKMERFFNQ

SEQ ID NO: 514909 - protein, 324 aa, unidentified
MERFVGVDVSKDSLDFAVREGQRVVDHGKQPNNLSGIDALVGQLGDPTLLVMESTGGYERAAAKRLLEAGRRVAIVNPRRVRDFAKAAGILAKTDRVDSEVLAFFGESMRPPVRRLPDEATSRLDGLVTRRRQLVEMITAETNHLGSAHDAVKEDIWETRKALRARLASQDQAIKTSIEGHPDWRRKYRLLQSAPGVGPVVAATLLAELPELGQLTRREIALLAGLAPLADDSGRAKHRRRIWGGRASVRHLLYMAGLAAVKSKHSDLREFYAKLTVSKEPKVAIIACGRKLLVRLNAMIRTGQPWSPNPPRKESTPSPPSPTT

SEQ ID NO: 514910 - protein, 408 aa, unidentified
MLEVKVERCAGIDVGKKFLEVCILIGPVHRKPAEEVRRFGTNVRDLEALRAWLLEKACTEVVMESTGSYWRPVFNILEGDVQVILANPEQVKALRGKKTDRKDCRWLAGLLRHGLVQASFIPPRDIRELRDLTRRWRKLLENGTEERNRVAKVLEDANVKIGNVLTDVFGMSGQAMLEALLENKLSAEQMANLAHRRLRPKIPQIVEALEGHRMSDHHRLLIGQALKHMQFIEDMVEELNQEIQKKLQPYQRQIELACTVPGIARDAAASILAEIGIDMSDRGPFATCHHLASWAGVCPGNNSSGGKRKSGNIRKGNRWLKATLSQTAWAGAAKKNSTFQFRYHRLKTRRGGKRAAIAVAHAQIIALYWVLRNGVPYQQQIRELHQQQRESMIRHHLARLTQLGYSTT

SEQ ID NO: 514911 - protein, 310 aa, unidentified
MEITVGIDVSKAVLDVHVHPAGASFALRNDEAGVADLVRRLGPLVGLVCIGIEASGRYERLAVAELASAGLPVVVLNPAQVRHYAQAIGQRAKTDRIDARLIALFVEAVRPEPRPMPDASTAELEALMTRRRQIVTMLVAERMRRQQAAPGLVRTSIARVVTTLEADLKALDAHIDKTVRGTPVWRDKEDLLASVPGIGKTIARTLLAELPELGRLSPKQIAALAGLAPYTRQSGTWRGRSCIGGGRPAVRAALFMGALVAARHNPTLKAFRDRLVQNGKPKLVAIVATARKLLTILNAIIRDNKPWQTA

SEQ ID NO: 514912 - protein, 342 aa, unidentified
MKYYIGIDLGDKKNSVCVLDKNGTILIESTFENTPEAFREFLKPYKNSAVAIEASTHSLWINKLLVGLGIKVYIANPRKTALISQNNMKTDKVDARLLARLVRSDPELLYPVTTKDMSTQKDLTLIKSRDSLVKARGDLIRHLRGIIKPFGLRFPDDVTPDNIHEKGKDILNNESFPAFKVLLDAIKLLTSKIKILDKQVASLIKKKYPEAKNIQTINGVGPITSLTFVLLMGDPKRFKKSRDVGAYLGLVPRRDQSGEMDKSLHITKTGDNLMRALLVNCSHYILGRFGKDNQLRRHGLKIMGDGSNKIRKKKAVIAVARKLAVLMHSMLVSGEEFKNKVA

SEQ ID NO: 514913 - protein, 409 aa, unidentified
MDVVYARCCGLDVHKETVVACLVVSGERGRARKEVRTFGTMTDDLLALGDWLAEAGCTHVAMESTGVYWKPIWNLLEGQFELLLVNARHVKAVPGRKTDVRDSEWLADLLRHGLLQPSFVPDREQRELRELTRYRASLVQERSREVNRLQKTLEGANIKLGAVASNVVGKSGREILAALVAGRADAGEMADLAKGRLRAKIPELERALVGRFGPHQRFLVARQLGHLDDLDALIAELSAQITERVHPFEAAIVRLDGITGVGRITAEVLVAEIGTDMTRFPTDRHLASWAALCPGNHESAGKRTSGKTRKGNRALRTALVEAAKAAAKSRHTYLGAQYHRLAARRGKNTAAVAVAHSILIIAYHLLKHGSDFHDLGADFFDRRNQDALERRLVRRLEALGNKVTVEKVA

SEQ ID NO: 514914 - protein, 309 aa, unidentified
MKEELVYCGVDIAKSHLDAAIGKEKRRLPNDATGHRQFIKWIKQIEAQVQVICEPSGGYERRLIRALVGAQIKVSLVQANRVRQFARAAGILAKTDMIDARVLCAFGEAMRPQTFSASALEQERLRELESQRRHLTHLLVMEQNRAARVSEVLVRRLNRRLIHQIKKQIEQLDLLIQEHIEASPELSHKASKLTAISGVGERTAALLLAQMPELGQLNRREVAALVGVAPFNRDSGKWRGKRAIFGGRRFVRHGLYMAALVAARHNPILRPFYQRLRVAGKPAKLALTATMRKLLIVLNSALKPQSIYA

SEQ ID NO: 514915 - protein, 341 aa, unidentified
MSMVASVFSYDLNGYLGFGPVGQDKVRKRQMIDTIGIDISKDKLDAYWLSNREHRQFRNDHKGVKALSLWARTIGITRVIFESTGVYHRLLETGLAEHGISFARVNPRQARRFCEGAGQLAKTDRVDAAMLAKMGSLLELEADQPKRETLHDLKQLATARLALIKDRTAAKARLAATTHKLLTLQIKRRLKQIERDLCQVADQIDAIVAADEDLAARAEILKSIPGIAKVTACAILTDMPELGNLTGKQAASLAGLAPISRQSGKWQGKERIQGGRASVRRAVYLPAVVATRFNPDMKAKYEQLVSTGKCKKLAITAIMRKLIVMANALLRDQRKWTQNPA

SEQ ID NO: 514916 - protein, 329 aa, unidentified
MKVTSIMGMDVSKNTLDCHLFNEQKSLSPVSNDVKGFKSIKRWLLKEMKTTKGLLVVMEYTGIYTYSIERFLDQQGIKFVKRPALDIKRSLGIVRGKSDKIDARFISKYGWMRKEELKPMSPLTDAQLDLQQLMSHRDKLVADKASYQAKLKELVTQMKDKVNERMATSMKYVMEVLTQEIKQTETSIKELIASEQSLQTNYDLSSSVIGIGFATAVHLLIATENFTRFDNVRKLICYCGVAPFEHSSGSSIRAKVRVSHLANKKLKSLLTMAAISAIQHDPQLKVKYEQKLKEGKAKMCVLNIIRAKLIERVFAVIKKQKAYELRTAA

SEQ ID NO: 514917 - protein, 335 aa, unidentified
MKNYLFYVGIDISKSKLDVVVLEKQSPNVSNHFIVENNLKGIKEILKNLIKQRIDLTSVLFCCENTGVYTFPLSSHLSDEKLDYWIVPAIEIKRSKGISRGKNDKADAKDIALYSIRNIDKLKLSTLPETAIQQLKLLYTEREKVMKSFKIFEATKENIDFIPKQVYKSISAINNKTVKFLKTTLKAIEKEMKMIISNEIELKKQFELIKSVPGVGDKTAIYMLIATRAFTAFDDARKFACYAGTAPFEYSSGSSIKGRTKVNHMADKKMKSILQMCALVAVKHDPQLKEYYERKKGEGKNAMLVLNNVKCKIIGRVFSVINRQTPYINTYKFAC

SEQ ID NO: 514918 - protein, 348 aa, unidentified
MHIAVLGIDLGKNSCSVAGLDASGRVVLRRRLHRDSVVKLASRLPACVIAMEACCGAHHLGRLVQAYGHVIRLMSPEYVQPYVKAQKNDERDAEAIAEAATRPTMRFVDLKSEDQLDMQTLHRARSRLVGQRTALINQLRAMLLERGIAVAQGRHRLARYLAQALDDGNAEPVPLSLRIRLLIEDMRAQWSELDRRIASFDAEFVAATRSDEAARRLSTIPGIGALNATALVAAVGDARSFARARDLAAWLGLVPRQATTGGRPRLLGITKRGNKYLRTLLIHGARAALPSLATTEGVLGNWLRGLSARAHRNTVIVALANKLARIAWAVLRSTAIYSARISDRPTAV

SEQ ID NO: 514919 - protein, 341 aa, unidentified
MKNLFIGVDFSKEKVDVAIIFADGLTETAARVFNEFKTTVSGYKQLVKWVEQNSYGIDSSLWLFCGENTGDYSKGLCNFLYGKGYDMWLENAKSIKDASGLRRLKSDRADASMIAEYAMRNYDRAIMYEPLSESLAQLRELFLYRQMVIRHRCSFQVRRGEKKLTMEKSPVKTMISQSGRHIVSELNKEVEKIDKRIAELIKSDEELTEVFTIVTSVPGIGTQNAVCLMVYTDNFRRFNYDSRKIACYYGIAPFGKDSGTSVHSDPRVHYMANRQIKAMLTQAALAAVNFNPIMARYYMRLVERGKKKQVALNNVKNKLVHLITAMVRNRQLFTTEYKITA

SEQ ID NO: 514920 - protein, 342 aa, unidentified
MENITTIGLDIAKSVFQVHGVNCSGEAILRRRLKRARMLPFFAKLPPCLVGIEACNNSHYWARELTALGHDVKLMPAQYVKPYVKRGKNDAADAEAICEAVTRPTMRFVAVKSPEQQSLMMLHRVRLMLNRQRTQLSNAIRAHISEFGVVAPVGRLGVDRLLKIVEDESDDRIPDDARLCLQMLAAQLAVVKQQILENDRRVLASARRTELGRRLMEIPGVGPLLASAFVASVADPKAFKTGRDLAAWIGLVPKQNSSGGKERLGGISRAGNRYLRQMLVVGAMAVIRYAQRHGTTRPWLVKLLERRPAKVAAVALANKNARMVWALMTSGERYREPLPLAA

SEQ ID NO: 514921 - protein, 359 aa, unidentified
MRKRLTKKDRFFNDINFTIDDDIYVGIDVHKVDYHIAIWLNNGIALTFVAPADNSAIARELNKLTPGLKQIVYEAGPTGFSLARTLAAASLPVMVIAPSRTPRPPGQESKSDRQDCRKLAEFAAKDMLTEVAIPTEQQEVDRQVSRLRNQLGGKKIRIKQQIKSLLLQHNIKEPDGLVRWTKQSIIQLGDLELCPEMRFTLDVMLDQLNYLQTQIKRVDKQLKEIFNKNNHARQMEILQSHPGVGPITSRQFCAEVFSPERFNKSTQITRYVGLCPLVCQSGQKRKEGRLMKAGQIKLRATLVEAAWAWVRVDPDAKETFRRLLFNTGEKNKAIAAMARRLAIHLWKMLCDDKLYCKAA

SEQ ID NO: 514922 - protein, 339 aa, unidentified
MTTLHVGIDIAKASFVPALHWHGQGRRLDPLTNTPEGFAALAQAVIQAQYQLGADAVHLIMEPTAGYELALAAFALAQGWMVSLPNPRHVREWARGIGRRAKTDPQDALLLARYGADCRPPAWHPLPAEVADVEQMLRRKEDLEQMLRQERNRQGALAQRPGVPAAVPQSLERMIGALEEELAALEEAIKQHLAQHAELRAEARRLRTVPGIGAKNVLWVLVLLYRWQTLTEGQGDAKGLVAYAGLDPQPYDSGTSVHKRPMISRMGNPVLRRRLFLSALGGVRGRNVLRAFYQRLVGRGKAKKAALIAAARKILVWAWAVFRQHTTFDPAKVTRELAV

SEQ ID NO: 514923 - protein, 374 aa, unidentified
MSYVTSIGLDVHARSITAVAFDPATGEVRSKRFGYAPAEVAAWTLAFDSPKAVYESGVTGFHLVRALRGLGVDCIVGAVSKMHKPAADKRKKNDRNDAEFLARQLAARNNKEVWIPDEACEAARDLSRVLEDVREDLTRAKHRLTHLLIRHGYAFDEIGPDGKRKGKWTRAHWEWIRSIELSEAAARDALDFYVSEVRHIEAQKKAIEKEIADYARADRWRGRVEALRRLKGIETMTAFSLVAEAGVFSRFESARAFSSWLGLTPSEHSSGERVSRGGIIKAGNTHLRKQLVESSWHYTRATTKRKRDQRGEEVPLAIENHAARGREAPCREAGSLCKAQSSPGGGQRGHRKRALLLGMGCGLHVGRGSRIETR

SEQ ID NO: 514924 - protein, 392 aa, unidentified
MIYVGIDVAKNKHDCCILGSTGETLYEAFTFANTRQGFAKLWSAIKAVSDKHKVLQIKAGLEATGHYSENLVAFLRTSGIEPVVFNPLQVKLFRTALSLRKTKTDKVDAKCIAGLLMSDDSSPVPVSYQIQELKSLTRHRFRLVSLRSRSKISLSRLVDVLFPELPAACWSSSQKSILALLDELPGAHRIANCRIDRLTNLLHLHSRGRYSREKAEEIKSLAQQSIGRKSEALSFELVQVVEEIQFYQKQIEILDKKLKSLVNDLQSPLLTIPGIGFRLTAIILAEIGDITRFSSPDQLLAFAGLEPSTYQSGKFKADKTPMVKHGSTYLRWALMQAARLAARRCPDFRAYMDRKLAQGKHYFVALGHLAKKLVRVIFHILTVNEPFVSQVA

SEQ ID NO: 514925 - protein, 426 aa, unidentified
MSERDYSKQVAKRQRIGDRTLVVGVDIGCASNAVGFMSKEGKVLGSYPNMQNSREGFEEFVKMTEGLKAKHGLSDVLIGLEPTGHYWRKFAYFAKAKGCEVRFVRTTALKHHREIDESASAKSDQRDALTITNITREGKYIDTVIEDGRMRPLRTLVKVREKIQKRNVSAKNSLHAVLDDYFPELKEIFWSMHSRGLWALLERCPFPADVVVLKVSVLKEIIGRASRRRVEASRKAMAVYQAAKKSIGLKQIGSADRYRLKMCLEEVKRTQLTIKDIEREIKRMLKEIPQAEYLLSIPGIGPLSAAVFLGELGNPSYFQSARQIVKYAGYDPQESDSGYRVSRKFISKKGRWLLRKHLFLMSMRAVVLSRYFQAYYQRKLQAKNRFGQLPRKKEILCAVAIKLIKVIFALLRDQRNFEDTVACSVQ

SEQ ID NO: 514926 - protein, 297 aa, unidentified
MDKLYGGIDLHANNSVIGIVDAADQIVYRKRLPNELATMLGQLAPYQATLQGLVVESTYNWYWLVDGLMEAGYLVHFANPAAMQQYSGLKYTDDASDARWLAHLLRLGLLPTGYIYPKAERGVRDLLRKRSQLVQQKTSNLLSAQAVVTRHTGTTLKGQTLKTLTIAEVEQLLPTTEVALAVNSTLAVLRCVDDQIATLEQAIKAQVALRPTFRQVLTIAGVGQTLALTIMLEAGESQRFPTVGQWASYCRCVGSTKLSNGKRKGRGNTKNSNKYLAGAFVEAANHAVRYYPPIRHF

SEQ ID NO: 514927 - protein, 356 aa, unidentified
MRRETMVYVGLDVHKEFCQACVIDRSGRVLSNERFSSTQEELDEFLDQFKNAKFVLESTGIWEFIYEGVENRGFEAVLAHPLKVRAIAEARVKTDKVDAETLAQLLRANLIPRSWVPSKDMRDLRQLVRQRAYLVRQSTSLKNRMHAELLRRGVRRPDGMLKPFSNKHIDWMRSLNIPTVNSCLCCLESIQAQIEGLNAQLLVEFQRRPDAQLIATIPGIGYYSALLIHAEIDDISRFPNPEKLSAYSGLVPTVSQSASSVHYGGVSKEGSAYLRWVLTEAVYSHTRYNPDSRISEFHARIARRRGKQKATSATARKLIHIIYWMLVRKQPYQSHGSNPGTKPAPYECVKGIGASP

SEQ ID NO: 514928 - protein, 391 aa, unidentified
MRYFGIDIGSDEHVVAAVDSDSAVAVKPFKITESAEGYARLVTALEAAPVALVAFEATGHYWRNLFAALTSRGYAVALLNPLQTHHFAKEALSRTKTDAIDALGIARFAAQKHPVVTRLAESATDELRELVRHRDRLVADFGDRVRQLHRLVDLGFPEFTRHVKGLDSMLASALLAEYPNAQAFAGAAPRRVAKLVYDGVHKVGNELAQALIASAKVSVGAHHGPAYRIQVRHTCQDLDTLRRRIKELDGDISTLLDDHEVGSLLTTIDGIGPTTAARVIAELGDINRFANAAALAAYVGVVPGLKQSGKRQSPRAGLSPIGHARLRTALWMPLLTAVRRNAWLKAFYDRLVSRGKPPKVALIAAMRKLLAAIYAVARDRKPFVPRPENAP

SEQ ID NO: 514929 - protein, 356 aa, unidentified
MNHVSKLDFTGQQIYVGMDVHKKSWSISIYTDQFEHKTFSQPPEVGVLVNYLKRNFPGAAYKSVYEAGFSGFWIHDQLQDEGVQCLVVNPADVPTKDKERAGKTDRVDCRKLARSLRNGEIAGIYVPSRPKAEDRGLLRTRHSMVKKQTRCKNQIRAILFFYGIHIPEEMATGYWSKRFINWIESVRMERASGNLTLKVHLAELLHIRQTIAELNRAIRALAKTDEYRNNVRILKTVPGVSILTAMMLLTELYDITRFKTLDRLCSYVGLIPNTDSSGEKDQKTGMTGRRNAQLRVAVIESAWTAVRKDPALMMAFNELCKHMTKTKAIVRIARKLLNRIRYVLKNQQEYVPAVIQ

SEQ ID NO: 514930 - protein, 444 aa, unidentified
MHYQKVLKMPESIPYLSVGFDVGADFTWMSIMLPNGILIGKPFKIIHSDPQSRELAISKIKEAQEMYSLESRCFLESTGIYHIPLLCFLRDKGFDCAVINPIITKNSTNMNVRKLHNDKFDSKKAAKVGLDASLKASIVPDDAIIDLRNLVRDYYYFKDLQSAIVLKLHAELKVSFPAYLNVFSKVTTQTSLKLLEAYPLAADMLAAPKDELVETIRSTARFGETYALARYDAICTAAKDAAVFGRALPSNALRIRLYIKMYREYQAHLDSILEELHQAVGKLEGTPDYDRISFIQTLHGVGFLSAVVLIAEMGAFDLFSSPKKLYAYFGLDPGVNDSGKFHGDRVHMSKRGSSLARRILHMVAINNLKVDKATKTPVNPVIYDYYTRKCASKKKSVAVGAVMHKICNIIFAMLRDNKPFELITPEEHRERYAAEHPESVNPAA

SEQ ID NO: 514931 - protein, 344 aa, unidentified
MMKITTIGLDLAKNVIQVHGVDKHGKAVLRKRLRRNQVPTFFANLQACLVGMEACGSAHYWARTIEKLGHRVKLIAPQFVKPYVKTNKNDTADAEAICEAVSRPHMRFVPIKNGEQQAVLALHRARQAFVKARTAQANQIRGLLGEYGIIIPQGIGHITKRLPAILENGAHELPGSFRALLDRLGEHLKVLDRQVGELEVQIQSWHRENEASRRLEEIPGIGPITASALVATIGDARSFKNARQLAAWLGLVPRQHSSGGKPVLLGISKRGDTYLRTLLIHGARAVLRVAERKVGHAQSWLGQVLGRRHKNVAAVALANKNARIVWALLAHGRNYQSDYAPSAV

SEQ ID NO: 514932 - protein, 276 aa, unidentified
MMTPALGIDVSKDRLDVEIAACGKPRSKYFANSPDGWRHLIAWLKELKIKRVHACLEATGRYSLGIALALWEAGHIVSIVNPAQIRDLARTKLGRNKTDAVDAGHIREYAEIFKPQPWTPPSPAMQRLGELQTIRAGIVSSLTEWKNRCGSGLADDTALALVKATITHFAAQLAEVDKAIAGTIDNDPDLSAKRDLLLSISGVGEVLAGLVLSELPGTDVLRSSAQAVAYVGLNPRSHRSGSSIDRPTRISKIGNATLRSALYMPALSRLRRFDRL

SEQ ID NO: 514933 - protein, 342 aa, unidentified
MEISTIGLDLAKSDFQVHAIDEAGVVVVRKALRRSQVLPFFAKLPPSLVGMEACGTSHHWAREILKLGHEVRLMPPAYVKPYVKRGKTDANDAEAICEAVTRPTMRFVPVKSPEQQAALALHRTRDLLVKQRTQLVNMIRGVLAEFGIEMARGLHHALALAKRLTDGDAAEVPTLAQRVVSSLALQIGAVQEQLATLDKELVAWHRANDLSQRLATIPGVGVIAATALAASVSEPERFRSGRQFAASLGLTPLQQSSGGKEKMGRISKMGDRYLRKLLVVGMTSLVRRARTAPESVDPRIPAMLERRPARVVTVAAANRTARIAWSIMTRGGSYRKPAPAIA

SEQ ID NO: 514934 - protein, 384 aa, unidentified
MPDVSSNAPGVVRMRAALDVHKRTIVCASQPDDPRAGELRLQEIPNTERALRALIRRLGGAEGLVVCYEAGPCGYEPYRLLSEMGVACDIVAPALVPVAPGARVKTDRRDAKRLLVLHRAGALKFVHPPTPAQEGLRDLVRCREDLVCARRAARHRVAKQLLRHGHIFREGKKSWTKIHQAWVRRQRLADPLAQSALEHMLAHLDALDAQIAVLDHQLDKIAQREPWSDPVRWLSCFRGITTLTALALLAELGDFRRFGTARELMGFLGLTPSEYSSGEQRHRGHITLAGNTHARRLLIEAAWHYQHAPRVSQRIAAVQPHVPPDVAARAHSAQVRLHHRHRSLTGRGKRSTVANVAVARELAGFIWAAMTRQPLRDPEVNAAA

SEQ ID NO: 514935 - protein, 321 aa, unidentified
MQSNNAVIYAGVDVAKATLQLHLQGRQSEFSNAPKGLDQLVAQLRKVPTVHVVCEATGGYERAMVKVLHHGQIPVSVTNPARVRAAAQAQGQRAKSDPIDASGLTDYGQRYQPEPTPPTSATQDQLVALTQWLKQLIHGRALAKTQAEHHQDPFVRRQHAKLMTHLESQIETVEKQIEALLKQDAPLQERVTCLDEIQGVGTRTAWMVLAHMPELGRLNRHEVAALAGLAPWTRESGMMKGRRCIGGGRPEVRLALYMAALSAARCNPVLRTFYKRLRAKGKLPKVALTAVMRRLLIYMNHCIKALLSETATTKAGELKNA

SEQ ID NO: 514936 - protein, 370 aa, unidentified
MRKKILYVGLDVHKKTIDVAITNNRINGKVRSYGKIPGSLDALSKLIKKLQTEETTLQFVYEAGPCGYQIFRYLQSKGISCSVVAPSMIPRRSGDRIKTDRRDAINLVRLFRAGELTSIYVPSAEDEAIRDLIRCRDDVRRFEKKARQRLLAFLLRHGYHYAGKKHWTKGFYNWLGTIKFPHRAQQITLQEYIDATNECSERIKRVTQQLQAQVEEWDRWPMVKAYQALRGVSFIVATTVVAELGDMKRFATPKQLMAYLGLIPSEHSSGTTVRRGPITKTGNSHVRRVLIEAAWTYRMPARVSIVLLRRQQGLPQSVRDISWRAQTRLCARYRRLIARGKSRQTVITAIARELSAFMWAIDKQVNVASA

SEQ ID NO: 514937 - protein, 367 aa, unidentified
MNKFSKYVGLDVHQETIAVTVADTAGEVRYMGEIVNTPEAIAKVVGQLKRGTGRLAFCYEAGPCGYTICRQLRQLKLDCQVVAPSLIPKKPGERVKTDRRDALSLARLHRAGELSPVWIPDEAQEALRDLTRAREDMKHLQRQAKQRLLSFLSRHGHRYTGRSRWTQAHWRWLEGIKFARPEQQIVLQEYIDTVQACGGRVASLDREVETAAHASAVWPVIEALMALRGIGLLAAVTVVAELGDLARFSGAPQLMAYLVPSEHSSGKRERRGGITKTGNGHVRRVLIEAAWTYRHAARKTAILQRRAERTPPEVQEIAWSAQKRLCQRFRNLMARGKLKNQVCTAIARELVGFIWAVGQHVIPLSRA

SEQ ID NO: 514938 - protein, 367 aa, unidentified
MSITLEGTTTAMSIVAETHPFVVGVDTHARKHVYTVLAAATGAVIATEDFPTTVAGINRALAWVARRTEADADTLWVIEGTGSYGAILTGTVAAHSYPVAEAPRMEPTQRYGVGKSDALDSHRIATAALSLPLTALRRPRLNDGIRQAIQILVTARAAMTNDRTRSINALTALVRANELGLDARGKLSKAQIVEVSKWRTRKEDLAILVARAEAIRLAKDIQELDQQLTANERQLEELVQVSHAAPLLEEKGFGPVSAAKCLAAWSHPSRVPSEAQFASLAGVNPIPASSGNTVRHRLNRGGDRSLNSALHMVALSKMTHDQETKSYVTKRRAEGKTDREIRRCLKRYLARRVFRILNTQNQRLQPV

SEQ ID NO: 514939 - protein, 444 aa, unidentified
MLVHKTFPMPKGIPYLSVGFDVGADFSWMSIMLPNATLIGKPSKILHTDSISRELAVAKIKEAQEMYSLESKCFLESTGIYHIPLLYFLRDKGFDCSVINPIITKNSTNLNIRKLHNDKFDSKKAAKIGLDPSLKTSIVPDDDIIDLRNLARDYYYFKDLQSAVVLKLHAELRVSFPGYLHVFSKVTTLTSLKLLDEYPLASDMLAAPKEQIIETIKSTARFGEAYALSKYDAICAAARDASVFGRALPSNALRIKLYIQTYLEYQKHLDSLLEELHKAMDKLKGKPAYDRFCLLQSLRGVGFLSAVVLIAEMGDFDLFSSPRKLYAYFGLDPAVKQSGKFHGDNVHMSKRGSSLARRVLHMVAVNNLKIDKGKKSPVNPVIYDYYIRKCVGKKKKVAVGAVMHKICNIIFAMLRDNKPFEIITPQEHRSRYTAEHPASMKGAA

SEQ ID NO: 514940 - protein, 467 aa, unidentified
MSKGSGNGTTRGDRRRNARRERLRKLLPRDGAVIGIDLAEDKQALAVVDHDVRVLARKTVKVKAFRLGEALDWAVAQAKVKGFKQVAVACEPTGPRWMQVQRLCAERGLPLVCIQPLVSHIAREQQDYTPHKTDESDCVLIGRLAAELHCYVPEELDETWAHLRHLGRRRAQLITAATASVQRIQAFLSVAWPVVTEACAGPFESVTWLAALQVVTSRCGGDPARLAALGLEEFTALVRAAVPAWGGRRGWGKIIGRVFAATGDTEGVVAWSRRGLLRRCADELGDLARTRAQLRAVEADMVMVLGELGLSRLGDIPGLTAVGAAAILAETGDPRRYDSSSSLVKHAGLAPSDNASGAFTGQAHISRRGRPGLRLTAWRAVWPMLQFNPAMAAKYAAMTQAADADAAADAGPQQARAAAAAARARRAKARVACAASLLRWIYSLVVHGTSWDAVVASGAAACQPEAA

SEQ ID NO: 514941 - protein, 337 aa, unidentified
MMYSGIDLHSNNSVIAVIDDGDHIVAQKRLPNDIGKIIGFLARWRDAMAGVVVESTYNWYWLIDGLQDAGFQVHLANTSAIKQYEGLKHGGDETDAQHLAHLLRLGILPRGTILPREHRAVRDLARKRMQLVQSCTAHVLAVENIMARQLGGRMTSNQIKRLTNDTIDSLPLAADVGLAIKANVAVIATLQSQIELLEKRLQECVKPCPQYGLLTSVPGIGQTLATVILLETGPIDRFADVGNFASYARCVDSVHTSNRKKKGEGNVKNGNKYLAWAFVEAANFARRFCPEAKRFHERKKARTNNIVATKALAHKLARASYHILKEGRPFEATRCFA

SEQ ID NO: 514942 - protein, 314 aa, unidentified
MSTEYFVGIDVSKDTLDVCVYPTQDTFRVPNSPDGIDALIKRLKPIELRLIVFEATGGYETLAVSTLAAAGLPVVVVNARQIRDFAKSIGRLAKTDSIDASVIARFASAVKPELRPLKDSPSQELTGLVTRRRQIVDMIVAETNRLKAATRRNQRDIQAHIRWLQKRLKQVDDEIKRNIKNGPLWHTRDQILQSAPGVGPATSAMLISCLPELGQLDRKKIACLTGVAPLNRDSGKYKGRRTIWGGRAQVRAALYMSALSAIRFNPIIRQFYQRLREAGKCFKVAIVACMRKLLAILNAMVRNQTMWRQSEINP

SEQ ID NO: 514943 - protein, 419 aa, unidentified
MSFKIFKFNCCGLDVHKTWIYACIGITDSNNRTEYKQARFSSFSKGLHQLCVWLAKYNCNDVCMESTGKYWIPVFNILEQHKIRVTLSHPKYTKPMKGNKTDRKDAKWICDLYMCGMVKPSFIPPADIRELRDLVRYRFKLTCMITGEKNRAQNCLTVSNLKLDDVFSDVFGKSSRSITEQILQHPGEKFDVSPFVDSRCKTPIEEIQAAVDGNISKEQDVKLRQCLDHIDELQKHISEVEQEILRLSDKYEAALNLIRTVPGFDKNPMTAIQVLSEIGGDMPVFLTAKHLVSWAGCCPRNDKSDRKIKSTRISCTGSYFKPVLVQIANALIKSKKHFEFTTRYKRIKTRRGHKKAIIARCRMILTAIWHILTDLKPYTPEGFLDSRPVNKEKVLTTSQALNLLKQRGYFIKDDPLSVS

SEQ ID NO: 514944 - protein, 406 aa, unidentified
MELVPIHKRVIGLDIHQAQITACAIIEESGGETRIEQRQFGAFKRDRRALAAWAATLDPDEVVMESTGIYWKSPYAALEAEGIRATVVNARHVKQVPGRKTDVGDAQWLATLARAGLLRGSFVPPAKLRELRLIARQRQKLVGLLSSEKNRMHKVLTDAGIRLGVVVSDIHGQSARAMIKGLLAGQPPEEVLKLASRRLKASREELHDALQGELTASHGFVLDELLRHIEELEAGIARFDAHLLGELASEMNALALLQTLPGVDAIGAAMLLVEIGSDMSAFGSPDRLASWVGVCPGNNESAGKRKSGRVRKGNLYVRRLLCEFAHAASRTKSAFQSKFQSLIIRRGYKRAIVALAHKMLRTIFFMLKRGEHYRDSATNYEQLSVQRNASRWIKALTRFGFIPAAA

SEQ ID NO: 514945 - protein, 356 aa, unidentified
MAEGTWVGLDVHARKTVAGVLDGVSGEMRSLRAPTLPAETAAWLGQLPAPVRVAYEAGPTGYGLARACSAAGIACTVAAPSKIQRAPADRVKTDRRDAERLARLLRLGELVAVRVPEPHEEAARDLIRAREDARGELMRARHRLSKLLLRHGLVYDASAWTLAHDAWLRRQRFDSRPLQLALEESYAAAAQAKARRDALDLAIVELAAEPPFAEIVGRLCCLRGIGTLTALALTVELGDWRRFRPQALGPFLGLTPSEDSSGERRRLGAITKTGNTHARRLLVEAAWHQRRPLRESRELARRRQGQPAAVRARADQSARRLHARWHALERRGKRRTVVAVAVARELAGHCWALATM

SEQ ID NO: 514946 - protein, 365 aa, unidentified
MTSMTSPTAPVTVIGGVDTHGQTHHAAVIDQVGRQLGDREFPTTPAGYRALLTWLRGHGQLERVGVEGTGSYGASLARHLRSVGAGVVEVDRPDRKARRAKGKSDPLDAYAAARAALSGTATGTGKTRDGRVEAIRVLRVARSGAVKARTQGTNQLKALLLTAPAELREQLRHLSTTTLIATCARLRPSSELTDPEQATKTALRRLARRHQHLSEEIAEADTELRTLVTAAAPRLLVLPSVGIEVAGQLLTSAGDNPDRLHSEAAFAHLCGVAPVPASSGRTHRHRLNRGGDRAANNALYIVVLGRLRYDSRTRVYADRRTKEGLSKPEIIRCLKRYVAREVFAVLTAPTLEDPVATTTTMSTAA

SEQ ID NO: 514947 - protein, 280 aa, unidentified
MKQSVVYIGIDVAKAHLDVAWAGASRRFPNDQKGRAALVNWIKQSPNAGTVQFICEASGGYEQALLACLAQNELKVTLVQAVRVRQYARAAGILAKTDKIDAKVLAAFGAAMQPKPTQPPSAEQKRLREVEAQRRHLSRVLIAEENRLAQMSSAELRRLSRSLMSKIKKQIETIDARIAALIAQDQALFAKAQKLTAISGVGARTAALLLAQMPELGQLNRRQVAALAGLAPFNHDSGSIRGKRAIFGGRRALRNGLYMAALSAARYNPVELLPTSARQR

SEQ ID NO: 514948 - protein, 367 aa, unidentified
MFKPFTITNNLDGFNELYQKIESVTEDATKVKVGLEATGHYSYNLLGYLIDKGLAAYVINPLHTNLYRKSLSLRQTKTDKVDARTIASMLMSDVNLKSYSDISYHNEELKSLTRYRFDKVKERAKLKSSVSRLVCILFPELEKLVPTLHMASVYSMLSEFPGAKHVASAHLTRLTNLLSEASKGRYSKDTAITFREAARASIGSNMPAKSLELKHTIKLIQELDSEIDEIENEIKVIMDEINSPILSIPGINYRMGAMIIAEIGDFSRFDSPDKILAYAGFSPSTYQSGQLDGAYAHMEKRGSRYLRYALYNAAKYVCHWDPTFAGYLAKKRAEGKHYNVAISHAVKKLVRVIYHLEKTKQQYIKVA

SEQ ID NO: 514949 - protein, 346 aa, unidentified
MKITTIGVDLAKAVFQIHGVDERGKVAVRKQLKRSEMSSYFANLETCLIGMEACGSAHHWARKLEGYGHTVKLISPQFVKPYVKTNKNDRADAEAICEAVSRPNMRYVTVKTVEQQAILSVHRARTGFVKARTAQANQIRGLLAEFGVVIPKGIHSIIKRIPEILEDGENGLPGTMRNLLQRLTENLKEMDRQVDELEKQIQLWHRENEASQRLAEIPGIGPITASAIVATVGKAREFMNGRQLAAWIGLVPRQNSSGGKQTLLGISKRGDTYLRTLLIHGARSVIQYAENKVDESSWLRKLMARRNKNVAAVALANKNARTVWALLAHDRVFRPDYIPAAVAAVA

SEQ ID NO: 514950 - protein, 348 aa, unidentified
MAHFVGLDVSVKETSVCVVDDTGKVLCERKVSTEPDDIAVLLTSVGGDYVRVGIEAGPLSQWLVNGLSDAGLPVICVETRHMKALLQAQQINKSDRNDARGIAQMMRVGLFKPVHVKTLAAQEHRMLLTSRKLVQRKLIDIESDMRGTLRNFGLKVGVVSVIGYEARIRHLVEGLPRLAAIVEPLLTVRRVMRQQFAVLHKMLLDTVRHDPVCKRLMTAPGVGAVVALTYRATVDQPQRFVHSRAVGAHVGLTPRRHQSGEIDYDGGISKSGDTMLRTMLYEAAQVLLTQNRHWSWLKAWGMKVAQRRGMRRAIVAVARRLAVVLHRMWTDGTDFRWGSEPGTAVAAA

SEQ ID NO: 514951 - protein, 342 aa, unidentified
MSEVITVGLDLAKNVFQAHGADALGRVLFRKKLRRDQVLPFFSQQPSCVVAMEACGGAHFWGRELGKLGHEVRLIPPAYVKPFVKRQKNDMADAEAICEAATRPTMRFVPVKSEETQGAAMVFRIRELLIRQRTQAINALRGHLGEFGQIVPQGAGNAARLIAIIEDPDSGLPADAIATLDVLVAALRHLEAEIGKLDAEISRRAKDNEVARRLMTIPGIGPLIATAIATLAPPPELFRKGRDFAAWLGLTPRQHSTGGKQRLGATTKMGERSLRRLMIIGANSVVIKRHVHASARPGTWLGGMLTRKPPMLVRVALANKMARIVWALMAHGDVYKAPAAAA

SEQ ID NO: 514952 - protein, 381 aa, unidentified
MSEITRGTMGAIVRVGVDLAKQVIQVHGVDSGGRRVVGRTLKRDQFGAWAAQLPPGCVVAMEACGSGHHWARRLRAMGLDARLIAAHFVSPYRMEGKSGKNDATDAAAICEAASRPSMRYVPIKSCEQQGVMSLHRVREGFKEERTACINRIRGVLAEFGLVFGKSPKALRAKLADVLEDADNELSGVARLVLQRALEHWRELDEQLRWCDRQVGLHVRGSADARRVAKITGIGELGASALVAGVGEFRQFRGGAQFGAWLGLVPSQNSSGGKASLGGITRRGDEYLRTLLIQGAKSAVMSAAKRNDPSSRWLVQLTARVGWQKACVAMANKNARIVWAVMTREQGFDPQHVSVKPQAKLPAKARGAQHPQATAELAGAAA

SEQ ID NO: 514953 - protein, 418 aa, unidentified
MQTALSNYTAIIGIDWADKKHDVCIHVTATGKQELLQIPHQSEKIDEWARSLHRKHGGPMAVALELSKGPIVAALQKYDFFVLYPVNPSSLVSYRRTFTPSGAKDDPTDAVYILNLLLRHPDQFHPLKPQSIEMRALMTLTEQRRRLMNDRVRLTNRLRNALKQYYPQALEWFDRIDTKLFCDFIKRWPTVVQARRARKATLETFFRAHNMNRKPLLDRRITAIKSAVPLTTDDGVVIPYRLLALTLVEQLETMLACLDSFDEEIAALAPQHPDHELFDGLPGAGPVYTSRLMVAFGEQRERFNNAAEVQKYGGIAPVTERSGQQLWIHWRWQAPTFLRQTFVEWAAQTINKSYWAGLYYYQQRAKGCSYQAAVRALAFKWIRILYRCWKTRTPYDEARYLKALQERGSSLLKTAEAA

SEQ ID NO: 514954 - protein, 410 aa, unidentified
MNDQTHPVERVIGFDAHPDSFTAAVLRGRTPAEAWTEKMFNKVPLGQLQSWTRKHTTPNDLVVLEASGNSFHLVRVLARLGRRALVLESTHLGKLKEAHANNDKISAVRIGKAYLAGTAREVWVPDPKTQERRDWFHAHQKAVRRSTQMRNRLLSYLSDQGVRLKKGTRLVLEPELADQQLRQAATWSPRQWQVIQGMLMELRHAEAQRAHWRSLIAQEVTGDPMLLSLIRLCGVRDLVAFALGAIIGDIQRFTEPRKLVKYIGLNPAFDDSGEGEWKGGIGGHGRKDLRSLLIEAAHAILRCSRNPLAQWGKKLLGRKGSVKLAVAAIARKLTVAIWYLMNGRWTPLSEIDKRLSIKVGKIITHVGTASLRSLGATRQQFRAHICDSLKTTKTYLLDPNKKFIPEPQRP

SEQ ID NO: 514955 - protein, 398 aa, unidentified
MTESSDYESVQVFIGVDVGKDTHHAVAINRSGKRLFDKALPNDENKLRSLISDLKQHGQILLVVDQPATIGALPVAVARSEGVLVGYLPGLAMRRIADLHAGEAKTDARDAAIIAEAARTLPHALRTLKLADEQIAELSMLCGFDDDLAAQTTQASNRIRGLLTQIHPALERVLGSRLDHPAVLDLLQRYPSPEKLASLGEKKLAAQLCKLAPRLGKRLAADIAQALAEQTVVVPGTNAAAVVLPRLALQLITLRKQRDEVALAVEQRVLAHPLYPVLTSMPGVGVRTAARLLTEVACRAFASVAHLAAYAGLAPVTRRSGSSIRGEHPSRRGNKALKRALFLSAFAALRDPLSRAYYTRKMSQGKRHNQALIALARRRCDVLFAMMRDGTFYTPQAS

SEQ ID NO: 514956 - protein, 340 aa, unidentified
MNTTVIGLDIAKQIFHLIGLNATGNQVEKKTLRRAKLLEYFANHSPCVIGIEGCSSSHHWARELRKLGHEVKLLPAQYVRPYVRGNKNDYNDALAIAEASRIPEMREVRTRTIEQQSIQALHRLRRGAVADRTKLCNQVRGLLAEFGIIINLGISALRKKLPEILEDGENELHWIFRDALALKYEQLCQLDTLVNKLTKFIENEAKQHSQIKQLQSIPGFGAIVASTFFSVIGDGKSFRKGRDVSASLGLVPRQHSSGGKNTLLGISKRGDKYLRSLLVHGARAVVIHAHKKDDALSLWVTRLVNTRGKNKATVALANKLARIAWAVTTSGKPYQTNFSI

SEQ ID NO: 514957 - protein, 347 aa, unidentified
MNFYNNMHPYYCGIDLHARLLFVCIIDNTGLILVHKKIKDDPEALLKLLEPYIGDIVVGVECMHCWYWVADFCKDHNIHFILGHALYMKAIHGGKAKNDKIDSYKIAKLIRGGNFPLAYVYHKDMRATRDLLRRRTKIVRHGADLKAHVANTASQYNLPAHNVNLKNVCDREKMRYYFPDPVVQRSINLDMGILDCYQKELKPLEHYIEQMAKQHNPVHLHILQTINGIGRILALTIIYEIGDINRFPSVQKFASYSRLVKCKAESAGKTYGTQGNKIGNAHLKWAFSEAAVLLLRHNHNATKYLEKLQKRMSKAKALSALAHKLGRCVYYMLKKETVFDETRFLKR

SEQ ID NO: 514958 - protein, 309 aa, unidentified
MFPVGIDVSKNTLDLCMLYDGIKGRIKTRNIQNNRHSVENILRWLRLQHCGPEDVHVVMEATGVYHERLATELHDAGFYVSLANPHRSREFARGMGIMTKTDKVDAYMLACYAFLKNPHRWEPPAPEIRYLGALLRRRDVLLGDALREENRLEKYLSTDTPADIISSCRRMAQLLREEVSNIERQIKAHIKASPALRRDYTLLTSIKSVGPQLGMHMLVVLRSHNFVSAEQAAAFLGVVPIEKRSGTSVRRRPRMSKIGPPQLRAKLYMSALCGKIYNKRMRNIYDEGNAVNLLMTILICSHSILVTSG

SEQ ID NO: 514959 - protein, 404 aa, unidentified
MSQFFIGIDVSKKSHRVVILDVNGEKCSKPFSADPSIQGFNKLSSRLSEVGITPDNSILGMEATGIWWENLYSFLKDNKYNTVVINPHQSNKFREALRKKAKTDDIDAFVIAGLLRSNDFVSCFIPENHIQDLRELVKLRYSLSKDLKNYKRQVFSMLCLIFPEFEKTALSNPFGIAAISILKKFPTAKHLAAAKPKHIEAIVRSIKGNNFNNKEIVHLIDTAKISIYSGKSMHARGLSLNILLKQIEQLIKSISEIDNSIDQILNSDSSNDGPGHNLLTIPGVGPKTLAAILSAIGDGKSFASAKQIIGLVGFYPQIYQSGETLKANRISSRGPRYLRWHLYIAAVACLKHNPELKSLYNKKVSQGKTKKQSLICVAKKLGQLMLSMLKSGEDYKPRRVFVNC

SEQ ID NO: 514960 - protein, 415 aa, unidentified
MLKIVYPICCGLDVHRDFVYACIATTVNGVTTYKSHRFSTFTKGLRELLSWLLASNCKDVCMESTGKYWIPVYNILETDCKIVLAHPKYVKAIRGKKTDKKDAKWIADIFKHDLVSGSFIPPADIRQLRDLVRYHAKLTNFTTGEKNRAQNCLTVSNLKLDSVFSDVFGKASSKIISHILANPSEKLSDVSAFRTKGMKATDEEILEAVDGEIYPEQAEKLRIIRDHMSSLDLCKANLQSLILSTAEKYIPEIDLVCTVPGIATFSAISVIGEIGVDLSVFHTSKHLCSWAGLTPQNDQSAGKKKTTRISRAGAYIKPLLVQCALAAVKSKNKHPEVYNRYSALKKRRGHKKATIAIARMLLTAIYNILKKHEPYNAEIYRKSDAPPEHRNVSVEEAIFILQRQGYLISSPVSIE

SEQ ID NO: 514961 - protein, 415 aa, unidentified
MKKHSNSRKKSEARAKSRGPVQRDTKEVLAELVGKLKEKLDPKKAAAASAGDGHPRGELRPNLDRLTVGVDLGDQWSHYCILGLEGETLAEGQLRTTQEDFATFFQGLNAARVVVEVGTHSAWVQEVICGCGHEVLVANPRLMEGSKRRKRKNDRIDANKLARLGRVDPESLYPIQHRSREVRQDLVMLRARDALVAARTEIINTTRGLVKSMGTRLPKCSSRSFAQKGEETVPVEMREALLPLVRLAAALSADIKEYDKKIESLGREKYGHTTLLRQVKGVGPITARAYVLTLENPQRFAKSRDVGPYLGLVPKQEDSGESQPQLGISKAGDTMVRKLLVGSAQYILGPFGPDTDLRRYGLRLCERGGKNAKKRAAVAVARKLAVLLHRLWVSGEVYEPLRPGMSVTMTPAAAA

SEQ ID NO: 514962 - protein, 370 aa, unidentified
MEEDIKFFIGWGVHKETIAMAVAELGRSPARLVGTLVHDVNRLLKQLARYGEPTQVQVVYEAGPTGYGLQRALARRGYQAQVIAPSLIPKRSGDRVKTDRRDSLRLAELARAGELRAVWVPDPADEAIRDLSRVREDAVNARTQARHQLKGFLLRHDVRYAGRTSWSKAYYRWLATLNFGELGAQTAFTDYWQAVSAADERVARLTGALSQAIVGWRFEPVVAALQALRGIDLISAIGLVAEIGDIGRFAHPRQLMAYLGLVPAEASTGERVMRGSITKTGNAHARRLLTEAAWNYRFQPRIGSRAQRRAEDLPQAIRDIAWKAQLRLNGRYRRLQARGVQVNKVCTAVARELAGFVWAIATARPQLPQS

SEQ ID NO: 514963 - protein, 397 aa, unidentified
MVFIMIYVGIDIAKNKHDCVILSDHATCLRPCFSLKNNSQGFALLINAIKEACGGDFNHGEVKAGLEATGHYAHNIVAFLNSNGIDTTIFNPFLVNQYRKSRSLRKTKTDKADAMLIAELLISTAANPATPSYHNQEMKTLCRYRFSLVKQRSKLKADMSRYVDLLFPELGSLGLNPTSSSVMAMLKELPGASYISICNISQLTDILSSSSRGRYGKETAEQVKAMAKESIATANKALSYIMSDTIEQICLLNKRIAKIDGELKNEVEKSGTKLTSIPGIGFCIASVILAEIGDINLFSSADKLQAFAGLDPSTFQSGNFTANHTHMVKRGSAYLRWAIMQGARLCSLNNLKYKQYLDKKIKEGKHYNSALGHLSKKLIRLIFHLLKENEEYDPKVA

SEQ ID NO: 514964 - protein, 424 aa, unidentified
MKSASNTPNTALPNQSITRLPETPPNEVTGGLDWARDDHAVAVLDARGRELIRHSVEHCAAGLRELIDVLRGADCGEVAIERPDGPVVDALLTAGLTVVVISPNQVKNLRGRYGSAGNKDDRFDAYVLADTLRTDRARLRPLIPDTAATVALRRTCRARRDLVAHRVGVANQLRAHLRAVFPGAVGLFAEIDSAISLAFLTRFSTQSQADWLSAARLAAWLGKQGYSGRSDPAVLHARLIAAPRGTTGADAASTAAITRAYVATLTSLLTQIKTLADEIDTQLTAHVDAHIFTHLPRAGRVRAARLLAEIGDCCDRFPTPESLSCLAGVAPSTRQSGKIRAVGFRWACDKQLRDAVCDSRRANPWANDLYQRAIDRGHDHPHAVRILARAWLHIIWRCWQNGVAYDPERHGALQRLTQDQHLAA

SEQ ID NO: 514965 - protein, 328 aa, unidentified
MFFIGIDVSKAKLDCSLLLDVASNKRRAKVVANSKTGIVDLLAWCTKQQVPVHELHAIMEGTGVYHEQAALALSDAGATVSIVNPAQVKDFGRSLGVRTKTDGVDSFVLARYGALLKPKSWTPPAQEARTLQALLSRREAIAQDLQRERNRLEKADAIDTTPPIRQSINDSIDFLEKQLAKLQQDIDNHINNHPNLKDDQDLLISIPAVGPQVSNHLLSVMHNHDFQSAEQLAAYLGLVPVERQSGTSVLGRPRLSKAGPARIRAVLYMAAIVATQHNPHLKALYRRLQERGKSKMSALGAVMRKLAHLCFGVLKTRQPYQADYGIST

SEQ ID NO: 514966 - protein, 457 aa, unidentified
MNSTNISNISDSVRTAVCNREARPGDVVMLNDLAVDAGLSLPQDLPTVQDWAVAADGAICQSLTQAICRGVLNTANAVEAWKMVQQARASEDCRYIGMDLHSTNVVVSVVHNVRDRHGRLVRRKERSQRIDTRDGGVELAKVLAEYCDNNQPHIAVVESTYNIYFVADIFEIKGWNLLIADPCAVSFARLKATNDYTDAEYLADKLCSDSLHVSLLLPHEDRAIRDLVRTRMRVVQDRAREKIIFINMASNQLGHTIEVKIDALAKLVTEAGSDCPELVAIYPNRYVREKAAICLRHIHFLNQEVDRLNAVIYPNTKDIEYVKLLKSIPGCGDVIASTIATEIWDIKRFATVKDFVSYCRLAPTSRLSNGKLKGLGNAKNGNAYLSWAMTELTNLMIRFNKTAAQVYARLLKKYAKLRVKAIRSLAARIARGVYQALKKNEPFDEVLCFGFRASEAA

SEQ ID NO: 514967 - protein, 461 aa, unidentified
MKHKAKSQAHPGMAMVHQNAAAIDIGATMHMAAVGADRASDPVRSFGTFTAELHRLADWFAECGVKTVVMESTSVYWIPIFELLDERGVEVFLVNARDAKHVPGRKTDVSDAQWLQRLHSHGLLRASFRPKGEIVELRAYLRQRERLLDAAASHIQHMQKALTEMNLQLHHAVSDITGATGMRIVRAIIAGERNPTVLASLRDTRCHSSAETIAKALTGHYRAEHLFVLEQALALYDVHQQKVAACDIRIESVLKKLSSLRGRNGNAKSDSLALPRRRSRQSNGPAFDVGQALHSLLGRDLTQIHGIGPYLALKLVSECGDDLSAWPSAKHFTSWLCLAPSNKISGGKILSSRTRRSGSRAAALLRLAAVTIGRSETALGAFYRRLSARIGKAKAVTATARKIAVLFYNALRYGMDYVDPGASYYETRYRERVVKNLHRRAKAFGFVLQPAGISAAEQAVS

SEQ ID NO: 514968 - protein, 355 aa, unidentified
MKNQAIQYLAFDVHQATTVATLRDEHGAIRLRATVPTEASAILGLVRGLGPRVHVAFEEGTQAQWLHDLLVPNAERVVVCNVRGRSETSNKSDRIDADVLSEMLRVGSIKSVYHGASGVLTLKELVRCYTNLVEDSTRVMLRIKALFRARAIPTPGTSVYRARERSKWLARIESRGARMRAESLLRQLDSLLELRPWAKAAMIAEARRQSGWKVLRSMPFFGPVRVALLLAIIATPFRFRTKRQLWPYIGLAVVTRSSADQEFLDGKLRRRRRAPLTRGLNRNHNPTLKNVFKGAANAAAAKPGPLKDFYDACVGRGVREELAKVTLARKLSSIALRLWKKGELWDPDKLTMQTT

SEQ ID NO: 514969 - protein, 358 aa, unidentified
MRIIGCDLHARQQTIAMLDTDTGELEEKTLEHEGDTVREFYSALRGPILVGIEATGSMQWFLELMEELGIECRVGHPAKIRKAETRKQKHDRRDARLLLTLLAENRFPTIWMPSTEQRDLGTLLRHRHQWVRLRSRVQHTLQSMALNHGFRRGHALWSQANQHALRALPLAPHASERRAALLTLYPRLQGSIEELDKEVCEEVQQHPQARRLLTHPGVGPITALATEVFLGDPKRFIDGKALASYIGMIPSEHSSGRRQRLGAMSKQGNTLLRYLWCEAAMHAVERDPELKRFYRRKLVQKGLGKARVAAARKLGIRLWIMMRDQIDYEEFCRRGKARQEGGRVRAGMPAINSGPAQQ

SEQ ID NO: 514970 - protein, 391 aa, unidentified
MIYIGIDVAKDKHDCFITNSDSEVLFKAFTILNNLDGFNDLYQKIESVMDDVTKVKVGLEATGHYSYNLLGYLIDKGLPTYVINPLHTNLYRKSLSLRQTKTDKVDARTIASILMSDVNLKSYSDISYHNEELKSLTRYRFDKVKERAKLKTSVSRLVCILFPELEKLVPTLHMASVYALLSEFPSAKHVATAHLTRLTNLLSESSKGRYGKDTAITFRDSARASIGSNMPAKSLELKHTIKLIQELDSEIDEIENEIKIIMDEINSPILSIPGINYRMGAMIIAEIGDFNRFDSPDKILAYAGFSPSTYQSGQLDGAYAHMEKRGSRYLRYALYNATKYVCHWDPTFAAYLAKKRAEGKHYNVAISHAVKKLVRVIYHLEKTKQQYIKAA

SEQ ID NO: 514971 - protein, 408 aa, unidentified
MSQVIIGMDPHKRSATIEVMTSDETVVGGGRYGTDVAGYRAMLAEARRWPERTWAIEGCQGIGRHIANRLLAAGEHVVDVPPKLSARTRVFATGQGRKTDATDAHSVALAATRMTGLRPVVDDQQLAVLRILADRRRSLGEDHTRMVSQLHQLLPGLIAGGAKKDLSAAQAKALLARVRPRDDAGKARRRVAAELISDLERIYQRKKEADKELSALLAVTGTTLTDLHGIGPSGAARLLAGVGEVTRFPDKAHFASWDGTAPIDASSGDQVRHRLSRGGNRQINRVLHIMAVVQLRNPTEGRAYYDRKVAAGKTPREAMRALKRRLSDIVYHQMITDARAKATGPGGHLGAATGSSAAGLHPSAGTSEKSLPGPATDDLTPGKPAHSPGRSRHSPSAPDRRRRQAQSA

SEQ ID NO: 514972 - protein, 376 aa, unidentified
MKNYSKFVGLDVHKAEISVAIANVDRGEAVYYGKIENTSYAYLKLAKKLSKGGEQVLFCYEAGPCGYEIYRQLTKAGYDCVVIAPSLIPKKAGDRVKTDRRDAVSLARLLRAGELTSIWVPDREQEAMRDLTRAREDMKGMERNSRQRLGGFLLRHGKVYPGKSKWTKTYFRWLETLRFETAAQQIVLQEYIDMVKHTQERVASMEVEIRKALEGWMLKPVVEGLMALRGVDLIAAVTIVAELGDITRFESPRQLMAHLGLVPSENSSGERQKRGGITKTGNSHVRRVLVEASWCYRLPARKTAHLRRKAEKTSNAVQEIAWKAQKRLCSRYWYLINKGKLPVKSCIAVARELVGFIWAIGQEVMGKGNSSVVLNG

SEQ ID NO: 514973 - protein, 346 aa, unidentified
MNSMNYAGLDIHKKSISCCVRQADGTIIQESTLTATRHALDEWMRQLPQPWMAGMEATLFTGWIYDHLVSGGAMVKVAHPAMLQAIASGKKKNDRVDARKIADLLRCNYFPECHMASREIRDRRRVLRYRNLLVRQAVQMKNKVSGLLMEAGVPYNQQKVHQKKYFAELLQTQKKEMPPSMPELLRLSRSTVEALTGMQRQLIRALESDALLAARVERLASIPGVGRVVALTWALEMGDISRFGSVKKAVSYCGLCGAEKSSGGKTERTPISKQRNKHLQTMLIEAAKLAPRWNAELALVYERAKQKGNRNRATLAVARKLVAYLMVVDREERPFDTHLRVAGNAA

SEQ ID NO: 514974 - protein, 316 aa, unidentified
MERKVFVGIDVAKDTLEVATTTGVKVNFLNTAEGHEDVEALLKPLNPALVVMEATGGYEWNLAEHLVRGKLPVVVVNPKRVRDFAKALGILAKTDRIDAGVIVRYATAVQPELRLFKDDKTQKLDALVARRKQLVEMIAAEKNRLPLAKKWVREDIAATIAWLTNSVEKINKQIDELITKHAVWCAREKLLRTVTGIGRVTSMGLICDLPELGSLSRQKIAALVGLVPFNRDSGKARGKREIWGGRSYVRSLLYMAALAAKRSNPLIRPLYERLIAKGKLPKVALVACMRKLLTILNAMVRTNTPFEVRACGSYHS

SEQ ID NO: 514975 - protein, 420 aa, unidentified
MADICEEAAELVARVAALDVGKKELVACVRVPRGDKPGQRRQEVRAFATTTRSLLELRDWLVCQQVSLCVMEATSVYWKPPFYLLEDAVECWVVNARDAKNVPGRPKTDRLDAVWLCKLAERGMLRPSFVPPPWQRELRDLCRYRRTLIQERSREKQRAEKLLEDTQIKLSSVISDIFGKSGRAMLEALIGGQRDPQVLTGLADGRLRASRTVLHEALTGHFRDHHGYLLRMMLDHVDALTAQIEDLTGRIEEAIAPFARQVAQLDEIPGVGKTCAQELIAEIGVDMSRFPTAGHLASWAKFAPLARQSAGRTKPGTTGKGNPWLASALGDAAKGAARTKTFLGSRYHRLARRRGKQRALVAVGNSLLIIAWHLLSDPDARFADLGPDWHDRLAPLRRKRQLIAELERLSGKKVLLQEAA

SEQ ID NO: 514976 - protein, 387 aa, unidentified
MPQLNDLSRSLIPFDQATTLVAVIELSQSSWLIAGTIPGIERQPLKKIAPDETVLLGVLHRWRDEATRKGRAITRIAVAFEAGRDGFWLARWLTGHGIEAHIIHSSSVAVSREHKRAKTDRLDTAMLMRVFLGWLRGERDHCGMVAIPTIEEEDAKRPSRERENLVGERTRIINRLKSDLTRLGIRGFKPQLRKAAQLLESLRTPEDSPIPPNTLDEMRRDQTRLALIREQINAIEQARSARLEQAPQTRPNAMIWMLASIRGVGIETAEMLVQEVLSRNLRDRRAVGRYAGLTGAPDESGSKRREKGLTKSGNARVRRGLIQLAWRFLLFQKDSALAQWFRSRTEGVKGKHKTKMIVALARKLLIALWRMVTTGEVPHGVVLREAA

SEQ ID NO: 514977 - protein, 294 aa, unidentified
MKYIGLDLHKKSIFATVLDGEGNILSKTQIGAKSRDITYYLKRQGKKDELSVAMEASYNWPYYYRAAEEAADTIVLAHPLKTRIIGEAKIKTDKIDSAALAYMLKADMLPAAYVPSRATMENKLLLRSRISLVGIRTQVKNKIHSIVDRNTDSYSYLENMSDIFTKTAIKILRDTKICPTDYRILTGYLDLMDEINKKIKDIESQIDERSIVDKDIELLKTIPGIGTFSAFLIKSEIDNIERFTCKEKLSSYAGLIPSTHASGARLHHGRIVKQGNKFLRWALVEAALTAVRCS

SEQ ID NO: 514978 - protein, 428 aa, unidentified
MKKGSFSKLAAITPDTLLVGVDIAKNVHWARFTDYRGIPLAKALQVLNNKAGFEHILTRIQEIGKQHHLSRVILGLEPTGHYWKPLAHYLTGHEIKVVLINPYHTKKAKELDDNSPTKNDQKDALTIARLLRDGRYCQLYLPQDVYGELRVLSSTRVSLMKRQNAIKNSIRAVLDEYFPELVTVFKYPLGGKACRQILKSCPFPSLILQLGREGVVAQMKKAVKKTIGQKRVEKLFQAAQDSIGVSYGIPSARLRLTLFIEELELLERQLTHIETAMEQALANTGFKEIILSIPGVGITTAASFLANTGDPLRFTHPRQISRMAGYNLIEDSSGEHQSKTIISKRGRKHLRNILYQMARTTVAVNPEMKELYQYLKTRPVNPLKKKQALVVVAKKIITIIHSLLKKQTQYQPELVFNQFRKNQLKQAA

SEQ ID NO: 514979 - protein, 481 aa, unidentified
MGEKKSAPRGKSGHGGKRRGRGVQKALQVVNPDAAGIDIGAESHYVSVPEDRSGEPVRQFGCYTPQLEEMAGWLLECGIKTVVMEATGVYWIPVFRVLESRGLEVLLVNPKHVKHVPGRKSDVADCQWLRQLHTFGLLRGAFVPPQDVAAMRTYWRQRRTLVEAASREILHMQKALTQMNLHLHVVLSDVTGVSGMKILRAIVAGEHDPVQLAGLAGTQVRASREEIAQALSGHYTGEHLFVLGQALELFDVFQAKIRDCDGQLAMHLSRFEGKAGAGAPPSNPKRSRRVSRRKNEPYFDLRAELWRLTGVDFNRIDGIDSLTAFTVLSETGFDVSAFATEHHYASWMGLCPNNSITGGRVKRRHTRRVINRAADALRIAAQSLWRSKSYLGAYYRRLAARMGAPKAITATAHKLACIMYRAVKYGQQYVDKGEQYLEEQHRKRNLKSLVHRAKDLGYMLVHSETGECLPLTNQPLTRCVS

SEQ ID NO: 514980 - protein, 370 aa, unidentified
MKKKVLYVGLDVHKKTTDVAIAPGRSNGKVRSYGKIDSTVDALNKLIKKLEDGDKQLRFVYEAGPCGYQICRHLDAKGIDCSVVAPSLIPRRSGDRIKTDRRDALNLARLFRAGELTSIYVPTVEDEAMRDLVRCRDDMKRFERKARQRLLSFLLRHGYQYSGKRNWTKGFYNWLATVKFTHSAQQVTLQEYIEAANECSERIKRITEQIQVHVEEWSRARFVKAYQALRGVSLIVSTTVAAEIGDMRRFPTPKQLMAYLGLIPSEHSSGKTVRRGPITKTGNSHVRRALIEAAWTYKMQARVSTILVKRQQGLPKSVCDISWKAQTRLCARYRRLFARGKSKQTVVTAIARELSAFIWAIDKEMQVAHE

SEQ ID NO: 514981 - protein, 432 aa, unidentified
MQNTKTAKQNEETIAAYIGLDWADSEHEVTMLVVETGEVESRKIKQESQALAEWVQSLQDRFGGRKVAIAVEQRKGALIYALMCYDFLILYPVNPKTLARFREAFNTSGAKSDPCDSDLLLDLIRLHRDKLRAWVPEDADTRLLQMLVEERRALVDDVTALTNRLKDTLKQYFPQALEWAGKLDSKQGMDFLTRWPTLQSIRKAGAAAVEKFYRQHGVRNKDKIEQRVKAIKESRALTNDRAVVEGSKMKALAVVRQLQAIAKSIAEMEARIEELFEQHPDHEVFSSFPCAKKVLGPRLLAAFGGDRSRYESALELQSFSGIAPVTRSSGKSKTIHKRLACPKFLRQSFHEYAAQSIKKAGWARVYYKEHRNKGVKHHAAVRALAYKWIRIMFRCWQEQEPYNEAKYIASLKRRSSPLVPALPPAPSSPVEV

SEQ ID NO: 514982 - protein, 347 aa, unidentified
MESTTIAVDLAKSVFQIAVSRHPGRVAETHRLSRVQFLAFFAERQPSLVVLEACGTAHYWARQIQALGHRVELLPPHRVRCYVPRNKTDRADAEALLEAQRNEEIRRVPVKSVGQQTLAALHRLRSAWMGDRTARINLVRGLLRELGFPIPVGARHVVVRAEELIQDGSLPEPLRPVLREVCQEVRDFERRVHEVEQQLRVLAAQTPVVERLQSIPGVGLLTATALVALVGDAKRFPTSRHFASYLGLTPREHSSGLRRRLGGINKAGDTYLRTLLICGARSALLGAQHRKNTPPDRLRRWALDLHSLRGHNRAAVALANKLARIVWAVWRHDTPFQSRAGTATVAA

SEQ ID NO: 514983 - protein, 379 aa, unidentified
MSDVSKVYVGLDVHKDSISIGVANAGQQAARFVGKIAHDMPKLLKQLERTGAPADMTIVYEAGPTGYGLQCALVVRGSPCQVIAPSLIPRRVGVRVKTDRRDCLRLAELARAGELKAIWVPQPEDEAIRNLARAREDAVNARTQARHQLKAFLLRAGIGYSGKTAWTKAHARWLATLSFAQANDQIAFTEYCQAVSSADERVQRLKAATSQAIIGWRFEPVVRALQALRGIDEVAAIGLVAEIGDIGRFAHPRQLMGYLGLVPTEASSGERVSKGAITKTGNAHARRLLTEAAWNYRFTPRVGYRAQRRQEGLSEAVRAHAWKAQLRLAARFAKLRARNMQANKICVAVARELAGFVWAIARTAHQPNIQLACNERSIR

SEQ ID NO: 514984 - protein, 431 aa, unidentified
MAMRKREDSPEVFPNAAGIDIGGSSHWVAVPRAASDEPVNAMADWLLACGVDTVALESTGVYWIPVYEILEQRGLTVWLVDARQMKYVPGRKSDVLDCQWLQKLMSLGLLRAAWRPGDEVCVVRAVVRQHEVLLVEQASWVQRMQKALVQMNLQLTEVLSDIMGMTGQAIIRAIVAGERDPKVLARHRHGRVKRSEADIMRALTGNWREEHLFVLEQSLAMYDDIARHLGECDAKLHALLDQRSRHQPDLGPAPRSGSKQRVEFDLQQRLANWAGVDLTRINGLGVGTVMTLLSEIGPDLSRFASVKHFCSWLGLCPGTKISGGKVLSAGTKRSANRARQALKMAAMALSRSDSALGAFYRRLCARMDKPRANTAVAHKLARMVYFMLTRGEAFVDQGQQRYEEQQQQRSVAALKRRAKAFGFRLEPETAV

SEQ ID NO: 514985 - protein, 344 aa, unidentified
MTYYAGLDVSLRSTHICVIDDDGELLAEGKTDSEVVDIIAFLDDLHVEITEAGLEAGTLTQCLTYGLQSAGFEVVCMEARQVKAALSAMRNKTDKNDARGIAQLLRSGWYSRVHVKSIESHQVRALLSSRRAVLAKCIDLEQEIRGLFKVFGIKLPKRLGHGAFDPKVRPLIEADEALSHALLPMLDARLVLYHSFRELDNRTRHMANDDPTCQRLMTAPGVGFVTALTFKAGVDDPTRFKRSRTVAAHFGLTPRRFQSGEIDFDGHISRAGDANVRSTLYVAANSMLTRSSKWSPLKAWGMKLAKSRGHKRAVIAVARKLAVILHRMWIDDTQFQWSTEAARS

SEQ ID NO: 514986 - protein, 333 aa, unidentified
MIYFVGIDVSKSTLDIAVVNSGVLIKEEQISNEKASVTGFLKTLKQSLNLSLEKIVVCMEHTGIYNYRALAVLHKSGIKVCLEPALQIKQSQGMTRGKDDKVDARRIAMYAYKNREQLVFWKPQREVLQKLQILLTTRERLIKVKKQLQVPLQESVSFVDPSIVKSIKTPTLSIIKSITKELKELDFKIRNTVKMDEKIVKQYSYATSVPGVGPIIALNVIIRTDEFQRIREAKQFACYSGVAPFKHQSGSSIRGRTRVSKLANMTMKALLSLGATSAIQHSPEIKLYYERKLAEGKKPMSVINAVRNKLITRIFACVTQERKYEKKYQYTLA

SEQ ID NO: 514987 - protein, 344 aa, unidentified
MWHVGLDVHWRTSTVCILDCGGREVKTATIRGGWEKMLSWLDREVKERYAVCYEASCGYGALHDRLRGRAARVVVAHPGQVRLIFRAKRKSDRVDARKLAKLLYLEAVPPVHVPSVAVRSWRRLIETRRRLVAKRTRAKNGLRSLLRSHGLRPPREQGLWTKRGLGWLAGVAWPSEAAALERDLLLGELSLLESQVGRVTAALDEIGSREAAVALLRTIPGVGPRTAEAVVAYIDDPDRFAGGRQVGAYFGVVPRQEQSAAVNRLGHITKEGPASVRQLVVEAAWQVIRRSASARSKFERIAGGQRERRKIALVAVGHWLLRCMHAMLRTGECWREAATQCVAA

SEQ ID NO: 514988 - protein, 411 aa, unidentified
MRGCRCSMIMGFTKPIEHFNLQRKKVITMNTLYVGIDVSSKSNVVYLMLPNGDKHSNFSVANSHEGSTLLVKKIYSALTSHSLDTVLIGLEATSVYGDNLVYFLREDATLAPFNRKIHVLNPKQVKKFHDTYNDLPKNDYVDSFVIADCLRFGRINKEVYMGDYRYKALQNLTRARFFAVQNLVKEKQRFMNVLFKKYSTMTQENMDLHELTDFIIEKGKNRFPDPVAVAKAIQKAARSSYRLPKTVNDSVNQVLSISITSMKALESQIKEFDKAIKALMELLPNVLISIPGIGPVYSAGIMAEIGDINRFDNQASLAKYAGLAWKQHQSGGFEAEVTRLIPSGNRFLKYYLCEAAFSLVRCDKKYSDFYHLKYKEVNRCQHKRALALTARKFVRLVFRLLKDNRLYCPAK

SEQ ID NO: 514989 - protein, 430 aa, unidentified
MKSNTQNAKIEAITEKTLVLGIDVGSETHYARAFDYRGIEYSKKPFKFSNTEVGFATFKEWILDLKERHEKDKVIPGMEPTGHYWFNLGKFLQDNEMKPVLVNPHHVKKSKELDDNNPTKNDRKDPKVIAGLVREGRYMIPYLPDGVYADLRTASNIRFQLQAELTRIQNRISRWFNIYFPEYKTVYGKPDAKSGMLILKAAPLPEDILTLGIDGVNQIWRDAKLRAVGKARAKTLIEAAEHSIGSKEGTMSARMEIRMLLEDYESKNMRLQEVMVLIEELVKEIPMAEKLLEIKGVGIRTVSGFLAEVGDISRFNNPKELQKLAGLALVENSSGKHKGKTTISRRGRKRLRYLLFEVAMSLVAKNPEFRELHNYYTTRRLNPLKKMQSLMAIAAKLIRVFYAMLTKGVDYDPKKMVSDIKRPAVYLQAA

SEQ ID NO: 514990 - protein, 459 aa, unidentified
MVRKRKTMRSGHVGRPENIPILNPNAAGMDIGADEIYAAVPTDRDGPPVQCFGTFTGELYRLSEWLKHCRVDTVAMEATGVYWIPVYQILETSGFELCLVNARYFQNVPGRKTDVSDCQWLQRLHSAGLLRGSFRPAQEVCVLRSLTRHRDNLIRLASTHVLHMQKALDQMNVQLHHVLSDITGLSGLAILDAILAGERDPRVLARLRDGRVKASEDTMVQALTGDYRGEHLFTLKQSLTAYRQYQKFVRACDREIEQQLKQFDAKVDVKAVPLAPPKVRRKKLFSNEPKFDLRSHLYRVFGVDLTAVPGISVLTAHTILAEVGPDISKFRSASASASWLGLCPHNDISGGKVLSVKTRRVNNRAALAFRMAANALLRSQSSLGDFFRRMRAKLGAPAAITATAHKLARIVFHMLATREAYDEAILRSNERGFRARAEARLRAQAKALGYSVVAMTMAP

SEQ ID NO: 514991 - protein, 338 aa, unidentified
MKLYGAIDLHSNNNVTVLTDEQDHVVYEKRLPNDLALIVEQLATYRDSLQGIVVESTYNWYWLVDGLMDQGHKIHLANTAAIQQYEGLKYTDDPSDARWLAHLLRLGILPQGYIYPKEHRAVRDLLRKRGQMVRQRTMNLLSIKNLFSRNTGGSMSANRVKRFDSQEIDELVPNADLALAIKANLAMLQCADGQIDLLEKTIVGRVKLKPEFELLKTTPGIGHTLSLTIMLETGDISRFPTVGDYASYCRCVGSKKISNGKKKGSGNTKNGNKYLAWAYVEAANFAVRFSANIKSFYQRKKAKTNAISAIKAVAHKLCRACYYIMKDQVAFDVSKAFA

SEQ ID NO: 514992 - protein, 349 aa, unidentified
MSTKFNSEIAVIGIDIGKNSFHIVGLDRRGAIVLRQKWSRGQVETRLANLPPCLIGMEACVGAHHLSRKLTSLGHDARLMPAKYVRPYSRGQKNDFRDAEAIAEAVQRPTMKFVATKTAEQLDLQALHRVRERLVSQRTGIINQIRAFLLERGIAVRQGLRFLRAELPRILATPRDVLSPRMVHVIEDLAGDWRRLDERIESLSSEIEVLARHDPGCERLMSVPGIGPIISSAMVAAIGAGDAFSKGRDFAAWLGLVPKQISTGDRTILGKISKRGNRYLRVLFVQAAWVVLIKPKSWDRHGLKSWLEAAKKRLHHNVLAIALANKLARIAWSVLAHGRAFEASKIRVA

SEQ ID NO: 514993 - protein, 343 aa, unidentified
MTISMLGIDIAKNTFQLHGADKSGKAVYKKRLARRELAAHVANLPACTIVMEACGGANYWARVFQGSGHSVKLVSPQFVKPFVKTNRNDANDALAIVEAASRPSMHFVPIKQVEQQDIQSIHRMRTRIVKNRTALINEIRGLCMEYGVILAPGAARVKSSLCVAIADGDNELTASSRESMQYLYEELVDVETRVRKLDIRIRQLCRQNENCQRILKIPGVGELTATAIVAAVPVPGEFRNGRHMSAWLGLVPRQSSSGDKQTLLGISKRGDRYLRTLLIHGARAVLSHYKDRDNDYTRWVGRKKATLSHNKAAVALANKNARIIWSMLSTGKEFDIGVQATAA

SEQ ID NO: 514994 - protein, 323 aa, unidentified
MNPMSQYHHHTVVGIDVAKNAFDVAVLQGRQTQPVRQFAYDQAGLDQLVQILAPMAPTRIVMEATGRLERRLAHHLLRAGFEVAIVNPRQIRAYAISLNQLAKTDAIDATIIARFGQQADLQSAVLPEEYQLKLQALVARRRQVLDAMTRESNRLDRCDDPEIRAMIQHLIDAYERQLCRIEHRIEQVVQQQPELQQRADLLRSVPGIGPVATAALLTGLPELGQLNRQQIAKLVGVAPFNHDSGQMRGRRTTGGGRTHLRTSLYMPTLVATRHNPIIRTFYRRLVDAGKPKMVALVASMRKLLTILNVIVRDQQPWNQTHNT

SEQ ID NO: 514995 - protein, 367 aa, unidentified
MKKISTVVAKQTKNFREQKLTIGLDLGDRSSWYCVLDEAGEVVLEQKLGTTPKAMKEVFGKMPRSRIALETGMHSPWVSRVLSELGHEVIVAHARNVRLIGESRRKDDRFDARTLARLARIDPQLLAPVQHRGAQAQAHLMVIRARAGLVRARTALINTARGLTKSYGERLRGCSPRSLNAEKARQLGPELQAALEPLLVAIESLSQQIYEYNQQIEKIAKESYPQVARLKQVKGVGTLIALTYILTLEDAQRFRKSRDVGCYVGLQPGRRNSGQSEPQLHISKEGDPYLRTLLVQGAHHILGPFGADSDLRRWGLKLAERGGKNGKKRAVIATARKLAVLLHRLWVSGEAYEPLRNSSAVRLPAAA

SEQ ID NO: 514996 - protein, 412 aa, unidentified
MDVIVQRPAALDVHKEQVTACVRFPAPDGTRAQDVREFKTTVGGLLVLHDWLKAHGVTQVAMEATGVYWKPVWAVLEDSFDCLLVNARHVKQVPGRKTDVKDAEWLCQLLEAGLLRRSFVPPKPIRQLRNFTRYRKAQIKERQREANRLHKALEDTGIKLDCVATDILGKSGRAMLDALCEGTTDPEVLAELAKGRLRAKLPALREALEGRFDAQHALLIGAILAHLDFLDEQVERLSEAIEEQLRPFQPAVDLLRSLGGIETRTAQNILAEIGTDMSVFPSAGHCASWAGQCSGNDQSAGKRRSGRTRKGSKWLNDALKDAAMGAIRTNDSYLQAQYRRLKPRIGHGRALGAVKHSIICAIWHMLSTGELYRDLGGDYFRKRDPERQTKRLIAQLERLGHKVTLEALQQAA

SEQ ID NO: 514997 - protein, 414 aa, unidentified
MLKIVYRICCGMDVHKSFVVACIASTNDQGVTTYKSKRFSTFTGDLRRCAAWLSENNCKDVCMESTGKYWIPIYNILEPTCNIVLAHPKYVKAIRGKKTDKRDAKWIADIFKHDLVAGSFIPPADIRQLRDLVRYRCKLTNFTTGEKNRAQNCLTVSNFKLDDVFSDVFGKAASAITTRILENPTAKITDVSGFRTKGMKASNEQVLAAVDGEMCAEQAEKLRIIRSHMDSLELCKLNLESLILSTAEKYLPQLELVMTAPGIQSFAAIGIISEIGVDMSVFPTSKHLCSWAGLTPQNNESAGKKKTTRISRAGAYIKPLLVQCALSAIRAKQFPEVRNRYLALKKRRGHKKAIIAVARMLLTAIYNMLKKNEPYNSELYRKGDRPPAHREVSVEEAVFILQRQGYLVSAPPTP

SEQ ID NO: 514998 - protein, 376 aa, unidentified
MTQTDVQYPTIHLAIELSRSAWLVAARMPGVEKPSLHRIEGGDTAALLALAAALRARAAARLGTPVRVACCFEAGRDGFWLHRLLTAEGIAAYVLEPTSILVNRRARRAKTDRLDALGMLRVLAAYLGGDRQACSMVRVPTPEEEDAKRPHREREELVRERVRLENRIAGLLATQGVRERPSLRSWERDLAALRTGDGRPLPPHLRAELDRLRRRLVLTLELIRELEAERDAALAAGPRDAAGRKIAALCRLRGVGANFAAVLTREVFYRAFDNRRQLAGYVGLAPVPHQSGEADRDRRISRAGNARARTTLIQLAWLWLRYQPDSAPARWFRDRVGALRGRTRRIAIVAMARKLLVALWRYVETGLVPEGVEVAA

SEQ ID NO: 514999 - protein, 425 aa, unidentified
MRLVYPVCCGVDVHKTFLVATIITTANNIFPKYQQKRFSTYYSGLLEFKQWLLDNNCKDVCMESTGKYWVPVWNVLEAASINVVIANPKWVSAVKGNKDDKKDSKWIGDLFRMGLVPGSYIPIKDIRILREFIRYRSKLVSMRSSEKNRFQNAFTVCNLTLDAVVSDMFGVSAKAIENYLLDTDTVDPNYCVFLLRGSLKKKASDVVEAVKGFNMTAEQKERVRIIQDHFDDIDKRIAQIDNVISQLVANYEGQIALLCTIPGIDRRLAITIISEIGTDMSVFGSSKRLCRWAGLTPGNNESAGKKKSVRISRAGVYLKPALVEAAHAAIKATQKSPYFRTKYERIMKRRGKKRAIIAIARMMLTAIFAMLQSGEVFNPCDLHKFDMPEELRKKLTLSSAKDAVKLLVSLGLVPEGSISLEPLVG

SEQ ID NO: 515000 - protein, 437 aa, unidentified
MEEVEGEPLFCERAAGIDIGKAAVMVTVRVPSESRKDGRQQETREFGTVRKDLLTLAGWLRCWGVERVGMESTSDYWKPVFFLLEREGFDCVLYQASQVKALPGRPKTDKLDSAWLARVTEQGSLAGSFVPPEEIRRLRTHTRYRRKLVQMRTAQKERCEKLLEDAHLKLSSVISDIHGASGRAMLRAVIAGEHRPQALAQMALGRMRPKIARLEEALDCSFFTPEHAFILEMMLDSIDQLTAQIAVLDERIAVLCEPYQRQIRQLDAIPGFGVTAARDLIAEIGIDMGAFPTAGHLASWARLAPRARESGKRKGKSATGRGNPYIGATLGESAASAGRTQTFLGAKLRRLQRHMPKKKAQGAIMRTQLVIAHALLSDPAAEYQDLGPGYYEQRADTRRRARGHIRAIERLGYKVTIEPLDPEADPDTGELITRTAS

SEQ ID NO: 515001 - protein, 389 aa, unidentified
MYFVGIDISKYKHDCCIISAADQQIVSKFTITNDKDGFEQLRISLNSLSNSEDIRIGFESTAHYALNLELFLENANHSFMEVNPLLIKEYKKSTTLRRTKTDSVDCESIARWLMTVEYKPHSKGFYHAYSLKSLTRLRDRLIRQRSFYLVKITNVLDHTFPEFKPFFNERLSKTAIYLLENYGSAEKMANMNSVSYDKLRCISRGKFSIQQFLRLKELAANTVGVNNSIFDIELNSLLTLYNSLCKEIKTLEAEITRLIEEVHPHYMSIPGIGPISAAVIYAEYGDISNFSNPSQMLAFAGIEPGINDSGTESHGGRMVKHGSSQLRYVLLNACLPLIRFDLTFATYYAKKRAEGKKHRVAITHVAKKLIRVIYALERQDVDFNAQKLR

SEQ ID NO: 515002 - protein, 411 aa, unidentified
MDVVNARCAGLDVHKATVVAGVRVPGPQPGARRGETKTFATTTRGLRDLTNWLLTHGVTVVTMESTGVYWRPVYEALEGLVQLVVVNARHVKMVPGRKTDVKDCEWLAQLLECGLLRGSFVPPRAVRDLRDLTRLRKALIRERGHHVNRIAKTLELAHLKLSCVVTDLMGKTGRASLQALSAGIDDPERLAACAQGLLRKKQAALREALGGRLTPHYAFLLQQHLSLIDGLDAHIATLDTRIEAAMAPFAEAAALVQTMPGVAARAAQAILAETGVDLDLFPTPAHFASWARLCPGNHESAGKRQNTTTGKGAPWLRATLQETAWAAVRSKKSYYRALYHRLKGRRGAKRAIVAVQHAMIVALWHMLKHRVAHQDLGADYFERRNIARIRRHHVRRLEQLGYDVTLRGKAA

SEQ ID NO: 515003 - protein, 376 aa, unidentified
MKQFNEIYVGLDVHKDTIAVAIARGLRTKPYYFGEVPNTPTAITKLLKQLSPDGEVLNFCYEAGPCGYEVYHQVTQQGHACDVVAPSLIPKMPGVRIKTDRRDAMSLAKLHADGSLTAVWVPDKEQEGIRDLSRAREDFKQTETKARQRLGAFLLRNGKVFTGKSKWTVAYWRWMETLTFETPTQHIVMQEYVEALKEASRRVLGMEKQILLAVRGWSLEPVLNSLLAMRGVNMITAVTLLAELGDITRFDNPKQLMSYLGLVPSEYSSGGKRQQGAITKTGNGHVRRVLIEAAWNYRFPARKSRTIEMRAEKTSERVQAIAWEGQKRLCGRYQKLLTSGKLKQKVCTAVAREMVGFIWAIACEASGRVHGSRATA

SEQ ID NO: 515004 - protein, 341 aa, unidentified
MPVTTIGLDIAKNVFQVHAIDSDEKVVVRKQLRRCQVLQFFQELPRCLVGLEACATSHYWARELAKLGHEVRQMPAKDVKAYVKRNKNDAADAEAICEAVRRPTMRFVQVKSAEQQAQLMQHRARDLLMHQRTQLINALRSHLAELGIIAPQGREGIKELLAIIADDANTHLPNDARASLIVLAAQLQALQTTIGAIEKRITVQHRATKESKRLQTIPGIGVIGASAIAATVTNPKIFRSGRDFAAWIGLVPRQMSTGGKPKLGPISKQGDRYLRRILVVGAVSVLRRAKSNPQKFPWVTQLLARRPFKVVAVALANKMARIAWALLISGKTCRSAWFAAA

SEQ ID NO: 515005 - protein, 414 aa, unidentified
MDVVVERCAGLDVHRDSVVATVRVPGKGKSRRRRAQQTQSFGTTIAQLEQLADWLAGFGVTLVGMEATGVYWRPVFWVLERRFECWLLNAQHLHNVPGRKSDLIDSAWCCQLLEHGLVRPSFVPPPEIRRLRDLTRLRSTQMEERSRAIQRLEKVLQDAGIKFSSVASKTYSVSARAMLEALLGGVSDPAALAELAKGKLRAKIPQLQEALANRFELAHHGVLVAQLLAHIDALEETVANLDGRIAEATDPYAELIALLSTIPGVGRYIAEVLIAECGVDMTVFPDAEHLVSWAGICPGTNQSGGKRRSGKTRHGDRWLRTALSEAARAAARTKQTYLASHYWQIRGRRGEKKAIGATRHDILIAYYHIARDRVPFRELGPDWLARRHSVEHRTRRLVRQLEALGHTVTLESAA

SEQ ID NO: 515006 - protein, 420 aa, unidentified
MTSQNSIPADAVLVAIDIAKVRNEVLIEAPGHKRRRRLSVLNTRAEHDHLIAILQSYDRPVVCAFAATGNYHRPIAWRLVEAGFETRLVSSLALARTREALHNSWDKNDPKDAQVILHMLRIHSTQVYHDPLRAGINDVQELSKTHEAIANAKTEIQHRILTHYLPLYFPEIERFRGNSRSDWFFAFFDAFPTPSSITTLTKEKFVEAAWDVVGRKVSKSQILMDIYETARTSIGLPLPLDAPAIRMFRMVVAEARSLIRQRNEIEAQADDLLRNSRDYQILRQIPGIGPINALTIIAEAGDLRRFHHHRQFLKFCGLDLSTQQSGQYRGQTRLSKFGNARLRRTLWIAGQVAIRQRENGFRHKFERYIARDRDNPDLRRKAMTAITAKMARVVHAVVKSGSDYRPFVEGRVPGGRTSFS

SEQ ID NO: 515007 - protein, 312 aa, unidentified
MTGIICGVDVSSEWLDACVRGVGEFRRFENSVTGIEDLIVFCRKHQVSLVVMEATGGYERLAFGLLWAAGVASAVVNPRSVRRFAEAMGLLEKTDRIDADAIGWYAEAKRIVARSPAAPAQQKLAAVVTRLRQLTELRTMQSNQRRLVTDADARSSIDEILALIGKQIRAIETKVIELIGRDPLWSELDTAFRSIKGVADRTVARVLADMPEIGTLSNKAAAKLAGLAPIACDSGKRAGKRSVRGGRSGIRSILFVVAEIVRRYDPDFAAFHRKLTDAGKPKKVIRVALARKLLVRLNAKARDIRCECALHA

SEQ ID NO: 515008 - protein, 373 aa, unidentified
MRRVIGIDLHRTFGEVVIWEEGRLRSLGRVDMTRTALEGLGGRLLSTDEVVIEATGNCMAVSRVLSPFVKRVVIANPLQVKAIAHARVKTDKVDAGTLASLFAAGYLPEIWTPDAQTERKRRLAARRYQIVRHRTRIKNEVHAILHAHLIPKCPHADLFNQRGRAWLGRQDLPDDEREAIDRHLRELDRLGGDLAILDREIAEAALDDGAVKRLMTITGVKLTVAASLMAAIGDIHRFSHPGKLVSYFGLNPRVRQSGLGPAHHGRISKIGRSHARAMLVEAAWAAAKAPGPLHAFFVRIRAKRGHQIAAVAVARKLAVLCWHVLTKERDYLWARPALVANKMRALELQAGLPQKKGNQRGAAYAYNVKALRD

SEQ ID NO: 515009 - protein, 317 aa, unidentified
MEVSSIFIGIDVSKARLDVAVHPSGESESAANDKTGIKAVVKRLAKIQPTLIVLEATGGLERQVTQALASAELPAVVVNPRQVRDFAKATGQLAKTDSIDAHVLARFAEAVRPALRPLPDAVTLELRALTARRRQIIEMIVAEKNRRATASKAVGKRIDAHIGWLEEELERADKDLDRSIRQSPIWQENEDLLRSVPSIGPVTSRTLLAELPELGKLKGKQISALVGIAPFNRDSGTLKGRRVIWGGRAAVRSALYMATLVATRRNSVIRDFYKRLKAKGKASKVALVACMRKLLTILNSMIKHKTRWSETFSLHTT

SEQ ID NO: 515010 - protein, 403 aa, unidentified
MNSVGIDISKGRSTIAVMRPFGEVVISPFEVRHTGSELSKLAKQLKSLDGETRVVMEATGNYHASVAKLLHNAGLYVSVINAKLVHGYGNNELRRVKTDRKDAVKLANYGLDRWLTLPRYIPEEDTRLLLKNCYRQYRQYSKVQTVLKNNLISLLDTVFPNVNRLFSSPIRGDGSEKWVDFVAEFWHCRCVSEKSERAFTSKYLRWCRKHGYNFSEAKAHTIYAEASGHIGVMPKSETTKLLVEQAVAQLRATSTALAALKQEMQSLASVLPEYPVVMDMFDVGPTLGPQLIAEIGDVRRFYSKKALVAYAGLDAPPNDSGDVTGRHKSMSKIGASSLRRTLFLVMSVYLQTAPLDEPVYQFMDRKRAEGKPYRVYMMASANKFLRIYYATVKAYLESLEHTA

SEQ ID NO: 515011 - protein, 345 aa, unidentified
MESKLEQLLERPSRSFTPRARPAWPARILEAGVIYHVKEQLVYLGVDIAKYYLDAAMGSEKRRFPNEAVGHRQLIRWINQMESAVQVICEPSGGYERALVRALVGAQLKVSLVPANRVRQFARAAGILAKTDRIDANVLCAFAQAMQPGTVSASQLEQEHLRELESQRRHLTHLMVMEQNRGARVSDICVRRLNRTLIQQIKKQIEQLDLLIKNHIEESAELSAKAQKLTAISGVGARTAALLLAQMPELGQLNRREVAALVGVAPFNRDSGKMRGKRAIYGGRRPVRHGLYMAALVAARHNPILRQFYLRLRAGGKPAKLALTATMRKLLIVLNSALKPDLSYA

SEQ ID NO: 515012 - protein, 339 aa, unidentified
MEQRPRYMVGIDIAAESFAATALTSPGHQVFVKEQVPNTPEGFSDLCTALETHHISVDQVVVVIEATGVYAEPLCYFLEAKGYEVALEPPNQVKKAFTSKRKTDPVDSRQIAEYGYRYFDKLHFWKPKAELLEQIHSVLTTRELLTKQLTAHRNALQALERKVVKTPVAIRMHQKNIQRLVKNIQTLDQAIKEFIDQDPDLKAKAALAQSVPGVGQLLTANLMVITRGFTQHMNPKSLAAYAGICPYEHRSGSSVNKKPKSDRHGTGRIRKLLHLAARSVATHKVSFRKYFLRKTEEGKPKKLTLNNIANQLLRIICAVVTSNTPYIENYRSVNPALLR

SEQ ID NO: 515013 - protein, 425 aa, unidentified
MNFTQNAKINQVTDKTLVIGMDIAKRTHYACMVDERGLLLKKSFPVYQSRQGFEYFYECILDAKRQFGKTDVIIGIEPTGHYWLNLAYFLDDRGIPLVVCNPMHVKKSKELDDNLQTKNDAKDALVIARLVKDGRYSYPRILKETEAELRVGATLRGNLTEEMNTVKNKIIRWTDRYFPEFQQVFPNFGKMALAVLECTPFPVDVAGKEPIELVEIYRQVEGLKSPQIPKARKLIDSALISIGVTEGHTMARIEITTLVQRYRQLEKELKSLQERLTELIQMTVEYEYLQTVPGLGDVTIIDLLSEVGSFAHYDHPRQLLKLAGLTLRENSSGQHKGQKRISKRGRSQLRALLFRVMMPMIRHNKAFRQLHEYYTTRQVNPLRKKQSIVVLCGKLLKVLHAICTKHMAFDAKQMMRDIPKLERAA

SEQ ID NO: 515014 - protein, 341 aa, unidentified
MPIVTIGLDLAKSVFQLHAIDEHGAVIMRKRLTRGQVLPVLEKIPPCLVGMEACGSAHHWAREIQALGHEVRLMPAQYVKPYVKQNKTDAADAEAICEAVRRPTMRFVAVKSIEQQAVMLNHRGRELLVKQRTMLANAIRAHFAEFGIITAQGTQNLCKLKQAAEQGSLTKTAIDVLELLFDQLDALNKNIKALELRIHTWHKSNETSQRLTSIPGIGPLTASAIVASVGTAGSFGTARSFAAWLGLTPREHSSGGKQMLGGISKRGDGYIRKLLVHGARAVVRMRSRKNAEPMPWLDGLLERKHRNAATVALAHKNARVVWALLNTGEVFEKGTRQVKMA

SEQ ID NO: 515015 - protein, 338 aa, unidentified
MEQVITIGLDLAKNVFQVHGIDAAGKVLVRRPLRRGDVLRFFGGLPRCPVGMEACATAHYWARELTKLGHTVRLMPPAYVKPYVKRGKTDVADAEAIAEAVTRPTMRFVAVKTADQQAALMLHKVRDLLVRQRTMLINALRGHLAEFGIIAARGPGGVTAAIISLHEAQDSLPELARVALHGLIDQLRIVRDEIARVEKRMVAWHRASNASRRLATIPGIGPITASAIAAAVPDATLFQSGRQFAAWLGLTPRAHSSGGKERRVGISKQGDGYIRRLLVTGATAVIRLARQGNASKTWAAKLLERKSARLVSVALANKTARIAWAVLARNQSYVARAM

SEQ ID NO: 515016 - protein, 446 aa, unidentified
MNLEGSGVTVGLDAAVVANHHVIVRRPSPFGPGEVVANFVASPTLAGMDMLSKRLSAFAPVMAVAEPTSMTWLPLSIALGRAGCSLALVGNRHSARLRSALAGKNKSDPIDADMLSRAGEFFSLQPARIPSADELALKRVCQRRGKLIVDANRRLRRIISLARWAFPDVWNAFAGSRSSALAVLTRWPDLAQLARARTSSISDVVAAHTRGVDNVDDRAVRIRSAARAWIEFWDGHLDMEALAWETTELLDDYAAAHARQERTTDVARRRWEQLWGDDPLLLSVPGMGPITAPTVRAFLADGSQFDDAKQAQSFVGLNPSNWSSGQMEAPSRAITKEGPAVLRLAFYQAGNVARTLDPQLAEFYRRLMIERGHCHTQASCAVARKLVARTWATLTAGRGYQLRDLDGQPITRRQGKQQAAALAVPDDVRRRARARSAATHRARLTR

SEQ ID NO: 515017 - protein, 396 aa, unidentified
MAAAVQVVGGVDPHADTIHAAVVTVVGRVLGDAEFPTTADGYRDAITFLTSSGEVERIGVEGAAGYGAGITRALAAAGLAVVEVERPTRSARRRAGKSDPLDAYHAARSVLAHRTSPVKDPAIDGLRALHLARNSAVKARTAASNQMKAILIMAPEPVRARFRDLSTDELVPAVLRCRGHYADPTTANTLVALKILAERHRDLGAQITTLTDRIDPLVTAANPALRAAFGVGPQVAAQLLVTAGLNPNRLTSEPSFAALCGVAPVPASSGKTRRYRLSRGGDRHANSAVHRIALVRMAHHQPTIDYVHRQTARGRSTKEILRMLKRAICREIYRHLTRPLPIPDWTDLRLIREAKNLTLTAAAAHFGVWPTVLSRLERGLHRNDELAQHYRTWLAA

SEQ ID NO: 515018 - protein, 288 aa, unidentified
MGKPNYVGIDIAKSSMEVVMHENKDHWTYANDESGLTKLLAKMKRLAPVLIVMEATGGYEVVVASELQSQGYPVAVVNPRHIRDFARSVGILAKTDILDAKVIARYAATVQPACRQLPGKDTQKLGVILMRRRQVIAMLTAEKNRLHQADPAVKDRIREHITFLEHELDDTNRELKQLVEDNPEWKEKSDIIQSIPGVGPALAVTLLADFPELGKLNRKQIAALGGLAPFNRDSGTLRGKRTIWGGRASVRAALYMGTLVATRYNPVIRRFYTRLISAGKAKKVALTA

SEQ ID NO: 515019 - protein, 375 aa, unidentified
MAQGTRWVGLDAARVSALVAVEASNDGLVKGEAAGRLPIVMGLDQHRAQITAEWIELSSGEISRGRVVPADRASVRKFLKRFAGRDLEVALEATTGWRFVAEELERVGAGVHLAEPAETSGLRGPKKRPKTDWADARHLRELLLIGRLPESWIPPDHILDLRARVRCRHTLSHQRTEWQQRIQSVLYHHGCPQRRALMTVEGREWLDAQPLPAAAREQITVAVAMINALDVQVAPLTARLYDYAKRQTGCKALIAAYYGIGGLTAVTILAELGDTRRFENSRDVVRYGGLDITVKQSDQHRAPGHLSRQGPPALRWALYEAAQQARHPRSPDREYYLQAAERIGGNRACLALARKLLKRCYHTLRDLGEDALTPA

SEQ ID NO: 515020 - protein, 425 aa, unidentified
MNTKQNERISQVSSDTLVIGVDIGEEKHYARAFDYRGLEFSRRALSFSNSAAGFNIFYKWLEEIKERTRMKKVIIGCEPTGHYWFTFQKFLHDHKLKLVVVNPYSVNRSKELDDNSPEKDDIKDPKTIAGLVREGRYSTAYIPEGNYAEIREAQVCRDQIMKQHVRLSNQIQAWLQQYFPEYLEVYNKFDAESGFLVLEKAPLPADIIKLGAEGIKQIWKDAKLRGRLGISRAQTLIEAAQESVGLQGGEAARFRIWVLISDYRRKQEQLERVDEILQKKVILVPNVEKLLAIKGVGFSSVAGFIAEVGDIGRFTDPKQIQKLAGLEITKLSSGKRKGKPGISKRGRRRLRRVMYEAARALMIWDPAFSDLFLYYRNRMCHPLGSMQAKIAVECKAIRVFYAILKHGCDYDPKKLQKDIIRPATA

SEQ ID NO: 515021 - protein, 402 aa, unidentified
MPMLSIGIDVSKGKSTVCGMKPGGEIVYTPFEVQHTREGMSELVSLLRSSGEEVRAVLESTGSYHCPVVAALLENGIFVSVVNSLRMKRFCSQSIRKVKTDRIDAMQIALYGLAYWQELQPTRLPEDTYRELQLLARQYYQMTSMLIKAKVDFNAICDQVLPGMQELMSDHAGRHKLSDFVLRYRHTTHILEMGETRFRKDYCKWAEKKGYRNCERMAALIFATAQNGIPVLPNAPSTQIVITEAIRVLHTVEASRDAILTQMQALAKTLPEYSLVREMPCIGDTLAPRLIAEIGDVRRFHSKRALIAYAGIDAPPYQSGKFCANNRHISKRGNRYLRKTGYEVMQSYVMHKPANDPIFTFIEKKRGEGKSGKLAMVAGLNKFLRVYYGKVTELYRSLPAIE

SEQ ID NO: 515022 - protein, 373 aa, unidentified
MPSNLRNLGLDVHAETIAVAVAEPDGEVRSLGIIPNRPETVAKLIRKLGSRGQLRACYEAGPCGYVLYWQLTTLGVHCDVVAPTLVPTKPGDRVKTDRRDAAKLARCYRAGDLTPVWVPDAAHEALRDLVRAREAAKQDQLRARHRLGKFLLRRGIRPPAGAKPWTQRHRRWLDTLTLALPALDATLGDYLHEVDHAAARVERLETALAAAIDTAPAALRTVVAALQCLRGIRQVTAATIVSEVGPLSRFSHPRQLMGYSGTVPSEHSSGASVHRGAITKTGNAHLRRVLVEAAWAYRFPPKCAKALRTRQRGHPDAITAIAWKAQHRLSTRYRRLLARGKPTPHVITAVARELVGFIWAIGVAVERELAMAA

SEQ ID NO: 515023 - protein, 333 aa, unidentified
MSSILRTVGIDISKDWLDAFAAPEGKAARFSNDSAGFRKLIAWIGSTVDRIAYEPSGPFHRDLEETLLKAGLPLYAINPFQVRSFARSLGRLAKTDAVDARMLATMAAAVEDLRPTEARSEAQRDLAELQQIRDGLSKDRNATINRGKHLRTPVGKRLNKQRLRQIERQLKLIDAEIRQRVEEEKALERRAEILTSIPGISDITAAGLIVHLPELGTLTGARAASLAGLAPVTRESGHWKGRSFVQGGRRRVRQLLYMPALAAVQHNPDLGRKYEALVARGKPPKVALTAVMRKLLILANALVQQDRTWTAHPPREYSCPAFPTPSPAGSVHG

SEQ ID NO: 515024 - protein, 351 aa, unidentified
MMIIGVDYHPSFQTIAFLMEETGECGDQELNHSDGQAEKFYRDLKERGISVRVGMEATGYSRWFERLLAELGFEVWMGDPAEIKAKRVKKQKFDREDARLLRRLMLENNFPQIWVPGPENRDLRQLLWHRHRLVQMRTRIMNQLQALAMNEGYRWKKKLFSEQGRAQLEKLALAPWASRRRQELLELLDRMNPTIEELTAAVEREARKRPEAMRLMTHPGVGPLTALAYVLIIGTPTRFQRGKQIGTYVGMIPCEDSSARKQRLGHISKQGNSLLRFLLVEAAQAAARIHPDWRRRYIHLAMRRHKSIAKVAMGRRLAVRLYWMWRNGCEYSPSLEFGSYAGQLGTGHGVK

SEQ ID NO: 515025 - protein, 329 aa, unidentified
MYLCILDKDGQILLHRNMKSRPEEFLAAIEPFREDLVVAVECMFTWYWLADLCRQEDIEFVLGHALYMKTIHGGKTKNDKIDAFKIATLLRGGSLPKAYAYPREMRATRDLLRRRQHLVRRRGSLLAHIRNTHHQYNLPEPRAKIAYKANREGVAEVFTVPDARKSMEVEFMLTEHYDGIIRDVESHLERRARQHDGRAYHRLRTVPGIGKILALTILYEIHDIKRFPRVQDFLSYCRLVKCEHSSAGKKLGRGGAKIGNVHLKWAFSEAAVLFLRGNPEGQKHLRRLAGRHGKSKALSILATKLGRAVYLMLSKDRAFDMERFLAHNN

SEQ ID NO: 515026 - protein, 360 aa, unidentified
MRKLSEKVLVTGGVDTHKDTHTVAALDSTGRLLGVSEFEATAQGYRKILLWLEEFGAIDCIGIEGTGSYGAGLARYLTAVGVRIVEVSCPNRQLRRRRGKSDPVDAESAARSALSGEALGTPKSQDGPIEAMRLVRVERRSAIKARTQAANQLHGTIASAPEWIRDRFRGRTVKAIVKTASAFRVTEPSESLDSTIRYVLRGLARRWLLLNAEVQLLDTLLTKMVSVVAPQLVAKVGIGTEVATALLVAIGDNPERLKSEASFAAMCGVSPVDASSGRQRRHRLNRGGNRDANRALWVIAFVRMRCDAQTKEYAERRTQEGLSRLEILRCLKRYIARDLFKILRPMALRQPEEFCIRKAS

SEQ ID NO: 515027 - protein, 372 aa, unidentified
MDNVIMVGCDLHEATLHLKVAVGNGKARTLRVRNTGPARRAMIRALLKLSAQHAGAPVYFAYEACGQGFWLHDELTAAGIRCLVLAPTEMPRSRADRSQKNDERDAQRILDVLRAALLAGSRLPSVWVPDQQTRDDRELVRLRLETAIKSSKVKTQIRMMLKRLNRQRGGDWGAKHLAVLKSLAASLPFGARTALSSLLRQLQALQDELAELDRAVAELAASARYREAVQQLRQRGVGVLTILTVLVEIGDPGRFANRRQLGAYFGLVPSMHESGQQSDCKGHITRRGPAPVRRVLCQAVWAKLRVDAKLGKAYLRWSERNPHRKKVFLVAQMRRLLIVLWHRAQELAPMAPPTLQSALLADPLPRKTEVPV

SEQ ID NO: 515028 - protein, 419 aa, unidentified
MLYDSRVHMDRTFVEFLPSSAHLLGGVFMTYFIGIDIAKYKHDCFIMDQDGSVIRDSFSFPNDRSGFCLFLSVLDSLDPSYEKRIGFESTGHYGLNLKCFLEEHDISFMEINPILIKRFSSATTLRRTKTDKADAALIASYLTTVEYITYPTQSYHIHNLKSLTRSRDALVKLRSGQLVMITNVMDKIFPEFKPFFNKSLKSSTAMYLLRNYTVPSRMASMNSESYRKMSSKLKKTISYARFSKLRELAKNTVGREDPCLTFELNTYLDIYQSLDSKIKEMEAHIEEEFKKIHSHIQTIKGIGWMSAASIYSEYGGIENFQTPNQMLAYAGLDPSRSESGEHAYNGHMVKHGSSHLRYVLLNCAEMVILHNPVFYDYYRKKREEGKHHRVALSHVARKLVRIIFFLEKNNVDYDPKKMR

SEQ ID NO: 515029 - protein, 341 aa, unidentified
MTGKIVKQVAGIDVAQKELVVTLGHLLDDFSIELFAYKVFKNSDSGFKSLVEWANKLTDNQVDVLYVMEATGVYHQKFAYFLTDNNYKLSIVLPNKISNYMRTLELKTITDKSCSQAIAQFGLERKLDKWSKPKPTYKELQQLTRERDQIVQERSIIKNQIHAEITEAEPNQRSMERMQARIRFLNSQEKEIKEDIEWIVKENPDIRQIIDRITTIPGVGELTAVIVLAETNGFELIRNKSQLSSYAGMDVKEKQSGTSVKGKPRISKKGNRALRKSMHLPALTAVKWDDNFRETYARLVSKHGIKMKALVAIQRKILQLIYVLFKNETIYDKDYSIKKIA

SEQ ID NO: 515030 - protein, 389 aa, unidentified
MDEAGKVLVKRRLPEGAAGMTQLHALIGRFLPEDADGAEVVIGIETDRGPWVAALVAAGYVVFPVNPLQASRYRERHGVSGAKSDGGDAHMLADMVRTDSHQLRPAAGDSPEGQGIKVVARAHKTMIWDRTRATQRLRSQLREYFPAALAAFEDLDAPDVLELLGKAPDPDRARRLTRAQVAAALKRARRRDIAGKTDAILAALRGEHLGQPAALTAAYAATARSLIAVITTLNAQVKILEDQVRDHFGRHPDAEIYLSQPGIGAILGARVPGEFGDDPCRYVSAKARKNYGGTSPITRASGKKKVVAARFIHNDRLIDALMSWAFASLNASPGARAFYDEQRAKGLDHNDALRRLANRLVGILHGCLKTRTPYDQATAWSHRESSLAA

SEQ ID NO: 515031 - protein, 458 aa, unidentified
MRKQNRRSPKVAVTPTLRRHNPAAAGLDIGAEEIWACVPAERDPQPVRAFGTFTPDLLALADWLVQCEVTSVAMESTGVYWIPIYEVLEARGLEVYLVNARHLKHVPGRKSDVQDCQWIQQLHSYGLLTASFRPAEDMRVLRAYLRQRAMLVEHRAGHIQHMQKALQQMNLQLTQVLSDITGTTGLQIIRAIVAGERDPQVLARLRHGRCQRSEAEIAKALSGHYRPEHVFALKQALALYDFYTAQVQECDTYLEQHYAAIKPTYDEQTPPPPLGPDPKPNSHAKNAPAFDVRACLYRILGIDLTATDGLEASSAQVLLSEVGTDMSKWPTEKHFASWLGLAPHNDISGGKVLRSKPLKGNRRAAQALRLAAQTLGRTQTALGSYYRRLRARKGPTPAITATAHKLARMLYHVLKHRTPYQPQSQETYDQHLRQRAIRHLKRSATRLGFTLVPQPVAA

SEQ ID NO: 515032 - protein, 344 aa, unidentified
MANLNQFCDFTKLIGIDIAKRVFQIYSCDTQTGEITNVQVKRDKVLESFANCGKCLIGMEACGSSEYWARKLQALGHTVRLMDPKLVKPFVRHNKSDKADAEGIYHAMVSRVRSVAVKTETERDIQTLLTMRALLVKQRTARINHVRGLLAEYGHVMPTNVAQFDEKVDECINNLEGDAVQLVIDTLRDTIKSIRDDQERIKTLQREISRLANQTRNSKHFLTVPGVGDTIMAYMCVLLADPTQFSSGRQFAAYLGLVPMHTGSGGKTVTTKIPGRCDKALRAVLVQGAHAVARSKYRTEWVKNILAKKPKKVAMVAIANRMARQCWAVASKGQDWRRMPVTAA

SEQ ID NO: 515033 - protein, 390 aa, unidentified
MRYFIGIDVAKFKHTACVIDADGIALVEPFDFTNDIIGFQSLLKNIKPFLKKKHLVGMEDTGHYGDNLHNFLLEKQYKVVMLNPIVTSHIRKASNKAKNDRIDCFVIANTMMNPNFYRDQQVQSIDYATIRQLTRMHHTHTEEINRYKCQLQKSIDIVFPEFNSLLNTKYSKTYLEILDTYHGAYTIANTDIRLLRNTLKNVGVGRSVSISAEQLKKAAKESIGQHNLAIEMDIPFLISLIRRLTSILGEIDKKIEEFSHQLNSPILDISGISHFSAMSIISELGDITYFSNEKKLIKFAGVNPCVYESGTYSMTHTRLEKKGSKYLRKTLYQIIDVVIRFNPVFQAFYQKKISQGKSYRCAQGHCIRKLLRVIYRILSTGENFDSAKLK

SEQ ID NO: 515034 - protein, 385 aa, unidentified
MANQNDLSRSVVAFEQHNTIIAVIEMSLSSWLVAGIVPGIERHPRKKLSVDEEMLLKLLYRWRDEAVNAGRTITRIVVAFEAGRDGFWLARWLRARGIEAYVIHPTSVAVSREHRRAKTDRLDTELLKRAFLGWLRGEPDHCSMVAIPSLQEEDAKRPTRERENLVGERTRIVNRMKACLVRFGIRNFNPTLRRATERLNALCTPEGVSLPPNTLAELRRDMARLRFVMDQINEIEAARLQRLERAPTEGPHAMVRLLARVIGVGLETADMLVHEILSRKLRDRRAVARYAGLTGAPDESGSKRGEKGLAKAGNARVRRGMIQLAWRFLLFQKDSALSQWYRTRTESTGKKRKTMIVALARKLLIALWRLVTTGEVPAGVVLRAA

SEQ ID NO: 515035 - protein, 344 aa, unidentified
MDHSAGLDVSVKETSVCIVDDTGKIVREVKVASEPEALLAVLRNPAYHFKRVGLEAGPLSQWLYSALAEAGLPVICVETRHMRAVLKAQINKTDRNDARGIAQMMRVGLYRLVHVKTLRSQKLRMLLTHRKLLQSKAIAIDNDLRGTLRNFGLKVGIAGAVKFEARIRELVENLPDLAALVEPLLIVRRTLREQFCILHRRLLAIVRDDEVCRRLMTTPGVGPVVSLTYRATVDVPARFRKSKSVGAVFGLTCAKYQSGEVDWSGRISRCGDEMMRVMLYEAAQAMLRSKKWSWLKAWAMQIARRRGMKKAIVALARRLAVIMHRMWVDGTEFRWTREQAAAAA

SEQ ID NO: 515036 - protein, 367 aa, unidentified
MKKVSTAEAQQSRNISQPQQTIGLDLGDRASWYCVLDECGQIQLEQRVRTNAKALREVFGAMPHSRVALETGTHSPWISRLLSELGHEVIVAHARKVRLIGESRKKDDRLDALTLARLARIDPELLCPVRHRSAQAQADLTVIRARAGLVRARTALVNTARGLAKSYGERMRGCNVRNLNPEKAEGLSPELQCALQPLLSAIEALSERIAEYNDRIEALAEASYAQVELLKQIKGVGTLIALTFLLTLEDPHRFRKSRDVGCYLGLQPGRRNSGQSQPQMHISKEGDPYLRTLLVQGAQHILGPFGIDCDLRRWGLKLAERGGKNAKKRAIVATARKLAVLLHHLWVSGEVYQPLHNSKPNMLATAA

SEQ ID NO: 515037 - protein, 362 aa, unidentified
MTTIARKDAADQIEVTAGVDTHQDTHTAAVIDTAGRLLGHRQFPADGAGYRALLRWLRSFGTLVVVGIEGTGAYGAGLARHLQAQGVAMLEIDRPDRKTRRSAGKSEPIDAEAAARAALARVRTGVPKKRDGQVEALRNLRVARRSAVDQRADCMRRIKTLIVTAPESLRVRLRGLTKQALLDSCAGLRPYTTRVGEPEQAAKVALRSLARRYAALVEEITELDRLIEPLVTAINPGLLELNGVGADVAGQLLVTAGENTERLRSEAAFAMLCGTAPIPASSGKTHRHRLNRGGDRQANAAIYRIVLCRLRWDPRTQAYANRRTAEGLSKDIIRCLKRVIAREIYYVLTADQLKHAELATAA

SEQ ID NO: 515038 - protein, 343 aa, unidentified
MERTDGIETFVGIDAHSQQCSIKAITRQGEELREVDVPTRGAALRKALKGLRRPVWVIVESSYLAPLMVDLIGGSVDRLIVCETRENRWISHSDDKSDQADADRLCRLLRMGEFKPVHVPSGHGRDRLEVLRMYQKAQGDVSRTKNRIKGKYREHGVTLHGKRVYGEVHRKDCLKQVARPQGRFLLEVLYQKLEAEERSCDDVLARLVELMRGDARYESLKEIPGLGKVLSAVVTAVIDDPDRFANKRKLWSYAGLGVRSRWSGDPSKAKVSGSKGGNRLLKYAAFTAATAALRGENRFSRHYRKMVAEGADPSMAKRTVARKILATALVLMKTGAAYEDDKK

SEQ ID NO: 515039 - protein, 413 aa, unidentified
MRVIHPRCAGLDVHQKTITACVRVASKGHVQRETRTFGTATAELLELVDWLEEHGCTHVAMEATGVYWKPVWHVLDGHFELVLAHPAQVKNMPGRKSDVSDAGWIADLLAHGLIRASFVPPAPIQELRELTRTRKQFVREIARETQRIQKTLEDANIKITGFISDILGVSGRAILQAIISGETDPHRLLQLTKGRLKASNVELLGALQGYVSEHHRFLLQFHLGHVNQLQAAVTTLERRIGETLRPFHPAVKLLMTIPGISETNAATLIAEIGPDMSVFPTAGHLRSWAGLCPGLHESAGKRRPQKSRHGAPWLKTALVQAAWAASRKHDSYLRAQFFRLKSRRGPQKALLAVAASILTAVYHMLKQGIPYRDLGANYFNHRDKERIKDKMVRRLKELGFAVTLEPLSQPTSP

SEQ ID NO: 515040 - protein, 369 aa, unidentified
MADRITYVGLDVHKESIVVAVASGGLRGEVREYGRIANTATALDRLLRKLGDAGMVLRFCYEAGPCGYGIQRHVSARGHECVVVAPSLIPKRAGDRVKTDRRDAASLAKLHRAGELTAVWVPDPQHEAMRDLVRARLDAVHSLRRARQQLSGFLLRQGCHYGRPAWTKLHRRWLAGLIFEQAIHHIVLEDYIAAVEAAEARRDRLTAQIGTMLPDWTLAPVVAALQTMRGMAMVNAATLIAELGDLSRFADPRQLMAYLGLTPSEYSSGSSVRRGGITKAGNGAARRLLIEAAWSYRFPARLSRELLLRQESQPKPIRDIAWKGQVRLCARYRRLARTGKPANVVTTAIARELTGFVWAIARQVTVTPG

SEQ ID NO: 515041 - protein, 351 aa, unidentified
MVYIGVDLHRKKSQVAAIDQDGKVVLNRKIRTGPAEMQQLIDELRPQPIQVAFEATFGWGWFADLLSELGIESHMAHPLATKAISSARVKNDAVDAKTLAHLLRTNLLPEGWIAPPDVRDARRLVRMRAALVRVRAKLKAQIHALLGEHGIQPDVVDLFSKRGRELLSQLELPPVSQSRLRACLRLIDEVSLEIVLAEREIQEMIRDDDRVERLLPIPGIGPIIAATIVSEIGDITRFSSPDKLCAWAGLTPSEHSSADNVRRGHISKQGSRWLRWVMVEAAVHAFRDVELRQFFVRIARRRGVKIARVAVARRLLTLVYYALRSETGCRSYPISSNPKVEARSMAVMASH

SEQ ID NO: 515042 - protein, 375 aa, unidentified
MCERAVLTNRPSLDLSPFVLEGHRACRGAWDRSGVFLNPNSCMGLEPGPSKEGSWMMAQNDLVVAGVDVAKDKVDVCIRSLLLRRTFASTAEGRRELASWLRRNKVGKAVMEASGGYEREWAKALRDAKIEVRIVDPKRVRSFAQSAGRLAKNDTIDAEMIAWFAETFDEARGQSYDATREQLHQMVNARQALKEMQAKLETRREHAVPAAVQRIHARISKTIAVELVKIEATISALIQATPRFAELAEIIESVPGIGRVTSAALIAAMPELGQANNKIVASLLGVAPYDDDSGRRRGERHIKGGRRRTRNVFYMACLGAATQHNPVLKAFYDRLVAKGKLKKVALTACMRKLISILNIMIERRQKWDAKRYAVS

SEQ ID NO: 515043 - protein, 411 aa, unidentified
MEVLYRVCCGLDVHKKTVAACLRVPGSTGARSEDIRTFGTTTRELLQLADWLAAAGCTHVAMESTGVYWRPVYQILEGPLEILLVNAQHIKAVPGRKTDIKDCQWIARLLEHGLLRASFVPPAPVRELRELTRYRRQLVQERARETNRVQKVLETANIKLGDVATDVLGASGRAILKALIAGERDAENLAALAQGLLRKKEAQLREALVGQVTAHHSFLLQRLLSHIEFLDQQITRFDAHIEARTQPFAPALERLDTIPGVARRSAEQILAELGDDMRRFPTAAHAASWTGICPGNHESAGKRKSGRTRKGNRWLRATLIECARGAVRTRGSYLAAQYHRIARRRGDKKAIVAVAHSIVVAAWYVLRYGVPYHDLGHDHFDRLDRDRLIRYHTRRLADLGVVLPASAPVPA

SEQ ID NO: 515044 - protein, 393 aa, unidentified
MDMIYVGIDVAKNKHDCCILGSSGTVLREAFTLSNDRKGFQELFSAIHEALLQEGTDQIKAGLEATGHYSENLVAFLRNSGIQPVVFNPLQVNLFRKSQSLRRTKTDKVDAKCIAQLLMSAESTPVFASYQIQELKTLTRHRSRLVSQRSKLKQYISRLVDILFPELPSVCCSATQASMRTLLLELPSARQIAACRIDRLTNLLYAASKGRYSREKALEIKQLAQQSIGANSPASELELRLTLQQLDFLLDQLKQMEKAIQTIVAEIHSPILSIPGIGPTLAAIILAEIGDIHRFSSPDKLLAFAGMDPSTYQSGKFKAGHTPMVKHGSTYLRWALMQAARLVSIHCDTFRDYMDSKLAQGKHYFVALGHVSKKLVRVIFRILTSNEAFVPQA

SEQ ID NO: 515045 - protein, 328 aa, unidentified
MEPLYIGVDLHAAFFQGCAVLPSGERQWEGRFPRTDAGVAAFRAQCPPGAAVAVEASTPTWHFVDTIAADVGRVVVVDAFRTRLKAGYAAKTDRLDARRLADALRRDSVVGIYVPPPQVREWRELCRHRQTLVRAQTGLVQRLRALLLRQGIVDARRLVRHRGIGPLDTIALPGRAGEAVVQLRELILAVHQHLMGVAETVRAEAMGDPIVGALMTIAGIGPVLGLMIRAEIGSIARFERAAAIASYAGLVPRVDASAGRTYHGRITRRGSPWLRWALVAAAIHRVRQPDARGRWARRLALRKGALKARVAMARRLCEEVFVVWQRAE

SEQ ID NO: 515046 - protein, 320 aa, unidentified
MKHKVGKDNTVARFIGIDVSKQWLDVATLPERETRRFSNDGAGQEQLGAWLIQLAPELIVMEATGGFETRVATALAAEGLALAVVNPRHVRDFARAFGILAKTDRIDASVLAAFAEKVHPPVRPLPDEDRRELIDLVDRRRPLVTMRAEEKTRLSQATASARQDIKEHIEWLDERLRRLDIDLTAKLRSSSLWKAKEEILISVPGVGRVTVFTLLARLPELGALNRRAIAALTGVAPFARDSGQHRGRRMIWGGRADVRSVLYMAAVTAARINPVIKSFYLRLKQAGKPAKVALTACMRKLLTILNTMLRTNQSWHAPTT

SEQ ID NO: 515047 - protein, 334 aa, unidentified
MQNITLIGIDLGKHSFHIHCQDKSGNALLRKKFTRTKLMQFLATCPPSVVVMEACAGAHFMARRISDFGHETKLISPQFVRPFVKSNKNDFVDAEAICEAASRPSMRFVQPRTETQQAMRALHRVRESLIRDKVKTTNQIHGFLLEFGISLPIGDAVIKRLSLVLAEHEIPEYLSRLLVRLHTHYFYLVEQIAELESELSQSINADDTAQRIMTIPGVGPITASLLSSQLGDGKQFSCSRDFAASTGLVPRQYSTGGKSTLLGISKRGDKNLRRLLVQCARSFIMRLERKHGKLAEWVREQLNKKHSNVVTCALANKLARIAWAITTQKKEYQA

SEQ ID NO: 515048 - protein, 355 aa, unidentified
MSGTKYIGMDVHKESISIAVMNSVGKVAMECVIETKAITIVQFFKGLQGDLRVTFEEGTWACWLYDLLKPHATEVLVCNPRKAALLKDGSKSDRIDARKLAELLRGNHLKTVYHGEHGLRTLKELVRSYLTISKDLGRVMTRVKAIYRSWAIPCTGKRVYAPRYRAEWLAKITDPGVHRRAEFYYQQLDALRVLRQQVRFDLLRESKKHKAWPLLCQIPSMGPIRAAVLMGIVQTPHRFRTKRQLWSFSGFGIEMHSSADHQWVAGKLQRTKRPASIRGLNDNHNHDLKNLFKGAAITASTKPGPLQEFYAALLAKGIRPEMARLTLARKIATISLIIWKKGVSFDAQHLKPQTA

SEQ ID NO: 515049 - protein, 450 aa, unidentified
MPRLFVGLDVSQKSVAACFLLEDGTEPIKRFGFQHNPAGVETLVSKINTTADRLGIDHVLIGMETTGLLWWHLSDALRGCEQLQRLSPAIYAINAKLVANFKKAYIEAEKTDPGDAFVIADRLRFGRLPRLAEPDERYLAIQKLTRHRFHLVNSLAREKNRFLSHLFLKFSGFCQEEPLSDPFGAAAGSLLTDFLSVDEIAQTSVEDLADFLIDKGRNHFADPEAVAVTIKQAARNSYRLSKALADPVNVVLAMTLENIRFFERQITVIDKVIARELAAFPGAQVLLSVPGLGPVFTAGIIAEVQDINRFDTDAQLARFASIVWKKSQSGEFSADETPMMHSGNQYLRYYLIEAANSLRMHNEEYAAYYQTKYREATTHHHKRACVLTARKLVRLVHTLLRKGQLYQSPDQRKEARAANPLPAGMTPGELARQVVRRRQAKGRFKVHLDH

SEQ ID NO: 515050 - protein, 337 aa, unidentified
MGLYCGIDLHSNNHVVTVIDEEDRRLYERRLPNDLAITKAALEPFRRQLVAVAAESTFNWYWSVDGLMEAGYQVRLAHTGAVVQYDGLKHTDDEHDAFWLAHLMRLGILPTGYIYPKSGRGLRDLARQRMRLVQHRTSHITSVQSQVWRSTAVRLRSETIKGKGKQPWPELLDPDVALSVETGRAAIDALTAQIERLEELLLKRVGLSPQFQVLKTVTGIGPILALTIALEVGDIKRFPGVGEFASYCRCVDSRRLSNTKKKGEANRKNGNSYLAWAFMEAAHFAIRNLPAAKRFYERKRRQRNALLAVKALAHKLARACYYILRDQVPFAPDRLFA

SEQ ID NO: 515051 - protein, 349 aa, unidentified
MRSFQPPADTRFYAGVDLHARALFLSILDRDGQSRYARNLPAQPEPFLRAVEPFRAGLLVACECVHCWYWLADTCRAHDIPFVLGHAWAMKAVHGQKTKCDRKDAEAIARLLKGGNFPPAYAYPRERRSLRDLLRARLRLVRQRAELYGHVHTARRQANLPPVSSDVKYVSKRAAISADIADPFVRRRVETDLALLAPLDTAIRQLEAELEDAAQQHYPTELAVLQSTPGVGLVLSLTILLEIDTIDRFDTRQQFCSYARLCGAVQTSDNKRAGIGNRKAGNAWLKWAFSEAAVLSAQKEEQIGAYLQRLASRLGKAKALSALAHKLGRAFYHMLHTKEVFDVQRFVRH

SEQ ID NO: 515052 - protein, 362 aa, unidentified
MKQYIGCDAHARYSVFVSVDEMGRVGAPVRVEHGSRDLRDYLNGLEKETAVAVEASGGWYWFMDELEAAGLDARLVNPLEAKRRIGGRNKTDKLDARGLAILLRNGTLPEVWIPPAELRDLRGLMRGRLAMRSHTTVLKNRIHTALKRYGTLDGGVVSDLFAKKQRLKLSLAIGRMPEETRRTTLHEWELLDEVERHIGELEARIRFRIGRLGWVRLWKSLPGVGEILGATIHLEIGDVHRFATAAHLASYAGLVPTVHASGGKSYAGPTSKQANHYLRWAFVEAADCILMHRHRFTGHHALQLYDRVKAKKCHGKAAVAVARHLAESSWWILCKREKYRQPHAAAVSSSKERVSAEVSLAH

SEQ ID NO: 515053 - protein, 343 aa, unidentified
MGEVSTIGFDIAKSVFQVHGVDSAGAVVIRKRISRSKVLEFFSGLLPCLVGIEACPSAHHWSRELQALGHTVRLMPPNYVKAYLKRSKNDANDAAAICEAVTRPSMGFVPIKSEQQQSILILHRSRQLLVRQRTMLSNAIRGHLAELGIISAKGRNGTAELLRVIANAKDDRIPPVARFCLDVLARQYLTITAEVAAIDKRIHAWHRSCEESRRLEEIPGIGPIVATALVAEIGDWKQFRSGRNLAAWIGLVPRQHSTGGRERLGSITKQGNRYLRWLLVAGAMAVIRYARQHGTKRPWLTRIMERRPAKVAAVALANKIARIAWAIMVHSQRYKERKLLLAA

SEQ ID NO: 515054 - protein, 412 aa, unidentified
MYYVGIDWADQKYDLVILDDAGKQVYQPLEIKKSDQGFNTLLAKLRTLSPCPDDFKIGIETPHNLLVDFLLLHHYPVFFIHPSSMKSFRKRYRRTNARDDVYDSYVLADVARTDRACWKKVDRGSELTNQIRMLVVDHHRLIQKKTAVHNVFQETLKQYYPEYIHFFKDVSCPTSLAFFQAYPTFDAAATLSQQQLINFFKEQHLYNTKTARRIYDKLHQAHLDVIKLVVQVKRIKAMIYANQLVEFNHSVDDYLTQINQALARHADAEIFSSFPGVAEVTTARLIALFGDNRALYDDVSVIQAMAGTCPVTEKTGYDKKKKKGHYIVYFRQGCNKVYRDFVHRMAFASLTKSKWMKVYYDQHRKSGHTHHHALRCLANLELKILFAMWKNHNKYDENIFLAQRTKHQLNQK

SEQ ID NO: 515055 - protein, 467 aa, unidentified
MPRSSKSSQKTDSTRRKPIQDLESLTQLNLNAAGLDIGASEIYACVPSGRDEPSVRVFATFTVDLHGLADWLKQCGVTTVAMESTGVYWIPIFQILEQRGFEVYLVNAQFVKNVTGRKTDVLDCQWIQQLHTYGLLHTSFRPDDQTCALRALVRHRDMLLRYRASHIQHIQKALEQMNLKLNRVLTDVTGVTGLRILRDIIAGVHDPEQLAKHRDWRCGKTQAEIAKSLTGDYRPEHLFTLQQSVELYDLYTLKLQACDEEIEQHLAAFAPQVNLEEHPLPPPTRRPSNRPKNHPRNDLRPSLYQLAGVDLTQIDGLDVATVQTILSEIGTDMSRWKTVKHFTSWLGLCPHNAKTGGRVIRTQTKPTNNRANLAFRQASASLGHSKSALGDFYRRMRTKLGTPKAVVAAAHKLARIVYYMLKERVPFAAVPPEQATAQYRELALRQLERKAQKLGAKLVLESAIDVS

SEQ ID NO: 515056 - protein, 320 aa, unidentified
MTSRGAEKMKNDTIGVDVSKDHLDAHRLADGASRRFVNDTSGRKALLKWLAEKPVERVVFEPTGPYHRAFESALGAAGVPFAKVNPRQARRFAEATGKLAKTDRLDAAMLARMGALLELEARPARSNALLELKELHIAREALVKDRTAAKNRAKTLTLSLLRKHNAQRLDQIERQIQAIETAILAAIEADADLASRFAILTTIPGVSAVTAFALLIAMPELGALDAGQAASLAGLAPIARQSGRWTGRSLIRGGRADVRQALYMPALVAARFNPDMKAKYTHLIDTGKPAKVALTAIMRKLVVLANALLKANRPWTPRIA

SEQ ID NO: 515057 - protein, 363 aa, unidentified
MYSERTSVGLDVHARSVAAAAIDSVTGELKQARLTPSHDHIRSWLDGLAGPVAVTYEAGPTGFGLYRSLTEAGVRCVVAAPSKLQRPAGDRVKTDAKDAVHLARLLRLGEVSPVTVPSVAQEAARDLVRAREDCRGDLMRARHRLSKLLLRQGIVYSGGQAWTGAHDAWLRRQRFDNRATQLAFESDYDAVLAVSARRDRLDTAINDSAADSEFTPVVRRLACLRGVSTLTAFALAVEIGDWHRFSGNSIGSFVGLVPSEHSSGASRAQGSITKTGNTHARRLLVEAAWHHRARYAPGKTMHDRWELAPPAARARGDAGNRRLHARWVTFNLRRKRPVIANVAIARELAGWCWSLAVLDSDTS

SEQ ID NO: 515058 - protein, 414 aa, unidentified
MFAVGVDVSNGRSMVAVLGARRSVVVQPHEVPHTADGFAELAARLHALDGEVRIVMEHTGRYYESFAMSMYRAGFFVSAVNPLAIKGYQEGISVRKVKTDKADALKIAQFAIDKWEILPHYTPMDTIRYDLKTLHRQFQLSSKTKTALNNNLIALLEQSYPGANRYFDSPVRPDGSQKWVDFVDTFWHVDCVARVSRKAFVERYQKWCKRHGYNFSEAKAVEIHEDARQRFPLVPKSDTCKLMVREAVAQLNAVSRTVETYRAEMDRLASQLPEYETVMAMTGVGKSMGPQLIAEIGDLRRFAHQKSLVGFAGTDPIKDDSGDKVSDSKPSSKRGSPYLRRTLFVIMTILLQLQPPDDPVYQFLDKKRSEGKLYYVYMTAGMTKFLRIYYGKVRDCLKEKGLWEQPNVDEVNPV

SEQ ID NO: 515059 - protein, 423 aa, unidentified
MDPNVKETPFAEQFDLFVGFDWARQEHVLVGVDAGGKKVLELCIPDTWEGWGDLRRRLAERVGSDLGRVAVAVETCNGPAVERLMELGCRVYPLNPKAAQRYRERKAPMGAKSDRLDAWSFADALRTDGHGWRSLVPDDPLTQELRLLCRDEVQLIQQRTALVHQLTAALREYYPAALEAFEDWTSEGAWAFVEAFATPAKLVQSGKRRWEKFLHAHKLYRPETYPRRLEIFARADRFAGPPAVTRAKSRLALALAAQLRVLQRELEGYRAAIEELFGKHPDGDLFGSLPGAGAKLAPRLLSEVGDNRERFGDAEAVQCYAGSAPVTIQSGKKRWVRFRSGCNKHLRAAAHLWADLSRHKSTWAEVYYRRKREQGMSHACALRCLAQRWLKILWKMWQTRTAYDEALHTRNQTRHGSWVVALT

SEQ ID NO: 515060 - protein, 373 aa, unidentified
MDKNITKVVMDTHKKRHTVAMVSCETGQMEVFSVNNTAKDIKKMVGKIQKRSSGPIHVCYEAGVCGFVLKRQLEALGCQCDVIAPSLVPTKPGDRIKTDRRDAKKLLGQFIAGQLTVVHPPDAAQEAAREITRCRQAAQEDLKRIRHQLLKLLNRHGYLYREGNHWTQKHHKWLQSLELDPSDLRLVFESYFTELRHCISRLKGLDQEVDRLADRPQYREIVGLLRCFRGIDTLTAITVLTEIFEFGRFDSPRKLMCYLGLVPSEYSSGENSKRGGITKAGNKRVRRLLVESAWHYRHRPFASKALDRRRQDQPQWAIDMADKAMSRLYKRYWHLINRGKMPTKVCVALSRELAGFIWAILHEHRNRQARQSA

SEQ ID NO: 515061 - protein, 337 aa, unidentified
MSRARIYKEGYLTVPLNFNAKCWVGIDVSKDWIDVVVLVEEHTAESLRCERSAQELGQLAQKLLPYGPQGIVLEATGGLEAPVIAALATAGLKVMRMNPKRVRDFARAHGLLAKTDALDAYVLALFGMRMQPPWRAWPEAERQQLAAWVTRQQQLTVERAAERTRLHQTTEPQLQKSVARVIAFLGKELALLEKQLGAWVARSETWTAQEALLRTAPGVGPKTARLLLAQLPELGQANRREIAALVGLAPCACDSGHGRGKRRIQGGRGAVRAILYLASWTAVRIPGSLKEFYLRLVAAGKPKQVALIAIARKLLVALNEMVRSNTSWRAPKVPIST

SEQ ID NO: 515062 - protein, 350 aa, unidentified
MNISHYIGFDVHKKSVSYCVKTADGKIVEEGTLRATHEKLRQWAQKRQEPWHGAMEATLFSGWIYDALKPFAAELQIGNPSMMKAIAAAKKKNDQLDARKIADLVRCNLLPVCYVASAEMRELRRLLRYRNTVVAHAVRTKNKMSGLLMEVGAEYNKQRLHGKKYFTELMGQLEEVPESVKDMLKLSRSALEMFETTQRQLLDRLQKEPLLAKRVELLQSIRGVGEVTALTWALETSDPRRFPSMGDAMSYCGLTSALASSADKQQRRPISKQRNRHLQTVLIEAAKLAPRWNQQLAEIHEREVKRGNRNRATLAVARKLVAYLLAVDKSGKPFEVRKPTTTKSEAEKVA

SEQ ID NO: 515063 - protein, 422 aa, unidentified
MAKKEDTKVIEVLHPICCGLDVHKETVAACLIVQTATGERIEHREFGTFTCELRALKEWLLDNECPVVAIESTGVYWRPVFNVLEDSIQVILVNARHTKHMPGRKTDMSDSKWLAGLLRHGLVRGSFIPAKEVRQWRDWCRQRKTLVNTVGDYKRRVHKTLEMANIKIDSVLSDLFGATGWNLIQLLLREDPITLDDVRNCLRGSLAGKDRKQKAAQLHDAIQGFFGSHEREVLQPFLRIIGALENEIALIEARLQGLFAPYNDLVDRIDAVPGIAYVSAWAILAEVSPYLDAFPTVQAFCSWCGLSPGNHESAGKRMSVRSPVRKKMIKTVLIEVAWAAIKNKQSYYRDKYFRLKARLGSRKAIVAVAHRIAKALFHIIKHGAEFKDLGKDYLSLLHAQRRYEYLSREAKVIGYKLIPVAV

SEQ ID NO: 515064 - protein, 342 aa, unidentified
MDHYAGIDVSLECSSVCVVDASGKIVREGKVASEPEALIAYFGSLRLSVVRIGLEAGPLSQWLYAAMKEAGLAVELLETRHVRRALETMPVKSDRNDARGIAQLMRLGWFRPVHCKSIGAQETRAVLTARKLVQSKLLDVENSVRGILRGFGLKVGHTTNRSFAGRVEDLVVNHASLHMIAAALLSVHAVLLRELKAFDKQVRSMARVDVKAKLLMSAPAVGPIVALTYASAIDDPGRFTSSRRVGAHFGLTPKKYQSGETDYTGRISKIGDATVRTALYEAAHIMLIKPIKGCAPLKSWAMRIARRSGMKKAKVALARKLAVILHRMLANATPFNAAMAAA

SEQ ID NO: 515065 - protein, 316 aa, unidentified
MYLGIDVSKATIDCCLISDGLFFERKFENRESGFHKLQDWLAENSVTDKLRCCCEATGKYYEALAEFMAAHHSISVENPRRIKGYAAAKLQRSKTDKLDARLIAEYCRDMNPRPWQKPEPAQTKLKELTQYRQRLKRQKAAEQTKQQTAPDCLAPLIQKHIQEIQNLITEVDGQIKQFYKDHPEYKDRRKRLQTITGIGEAAADNLLSVLAAHHRFKTAKQLTAYLGLDPKLYKSGTSVNGREKISKVGSKNIRTALYMPAMHAYRSETFRSFVNRLQANGKRPKQIIVALMRKLAVIAYHLIKTGKDFEPKRYTG

SEQ ID NO: 515066 - protein, 454 aa, unidentified
MSKRPRVLRSQRKIIGHFDIVNRNAAGIDAGSEEHWVSVPEDRSDQPVRKFGTFTKDLEALADWLIECGITTVAVEATGVYWVPLYEILEQRGLNPKLIDSRSIGRRHKKTDVIDCQWIRQLHMYGLLDAAFRPPSEMLALRALMRQRRMLIEHAAQHIQHMQKALDLMNVKLHLVLSDIAGVTGSRIIRAILDGKHSPSELAALREPSCSGTEQMFVDALTGNYRSEHLFALGQAVALFEFHQKLIAECDARIEAELTKLEKRNSAVTAKTGKKRTRRKNQLHFDGRTLLHQLAGVDLSAIDGLEVPTVLTILSETGSDMSHWRSAKHWTAWLTLAPNNRITGGKPIRKKGPVIRPNRAAQAFRLAAQTLERTQCALGAFFRRIRSRHGRKAAIKATAHKLALIFYSMLKNGTEYRDPGVNYYEQRYRETLLKSLTRNAATLGFALVPMEEVH

SEQ ID NO: 515067 - protein, 429 aa, unidentified
MVAVMIGVDPHKASHTAVAIGVAEELLAELRVRACQSQADRLLAWAQAWPERAWAVEGAGGVGHLLAQQLLSAGERVLDVPPKLAARVRLLQAGNTNKNDPNDARSVAVAALRSPGVREARRDDHAAVLKLWSKRYQDLGRGRTQVACRLHQVLCELIPGGVPGEITAGQAARILASITPAGAVEAARCQLAAELTEDLRGADVRIRETRKKAAIAVRAAGTSLTGLFGVGPVIAAAVIGDVRTVSRFPNRDHFAAYNGTAPIEVSSGGRKVYRLSRRGNRRLNHAIHMAAVTQIRYRHSPGRAYYDKKLAEGKTGKEALRCLKRQISDAIFACLQADARRAEAAAAKSPGGQPGNHSASRAAGSHPENRRFGQATPGPATHPTAPAAPAAFPAPLPTRASRQTGQGPGAARPRSGAAKASLKRPPASR

SEQ ID NO: 515068 - protein, 435 aa, unidentified
MNGIDDIRLEQFRQLKKEIRGSEKYLIVGIDAAKDNHKAFFGTARGKTLIKNLVFGNTLEGFQMLLANVERIKVQYSLAAVVFGIEPTANYHKPLAEHLIKCGYMVVLVGGVSIKHNRQLLDGRWDKHDGKDAANIADLISQGKCLFYEYPLMTLRNVRTLIVLKRRLKKREHGISACIRNNLLAQYFPELDHHFGPLETLSVVRECLDPSAIAGMEYDTFCRAVAPGKMTLARERRVGAIWRAAVNSIGGTMGEAASFEAQVMVDSLKLLRQTIKSVEDKLEDACLEFPEYTYLLSIPGFGPDLSAKVLGAIGNPHRFTSAKQVLKLAGLDLCASRSGKTSNSATPVISKQGKSDLRYALYEAAMIASLKNKDFIVYFTNKLKGRAREKGIGTKMRVKLSAKLLVIAWTLMKKQVFFDPKYLKQEDQDVQKKAA

SEQ ID NO: 515069 - protein, 388 aa, unidentified
MQTVADRPEAPTAIRTDLGAIFVSLELSRSTWLITSLSPGGGEKMSKQVVRGGDVAELLKRFARLREKARARTGKVFPFVVIQEAGLDGFWIDRALQNEGIESHVVDPASIATSRRRRRAKTDGIDGEALVRALLAYKRGEPRVCAMVKAPTPEEEDRRRLCRERKVLIGERVQHVNRVKGLLFSQGISGYEPLRRDRRERLATLQTGDGRLLPDHLKAQVCRELDRLELLLEQIKAVEAERDVLLAAQQVAAPAPAAMLLDIKGIGPEFAAILWSEGLFRHFDNRRQVASYAGLAPTPWQSGSVDREQGVSKTGNPRLRTTLIQLAWLWLRHQPQSALTLWFEERVRRNGGRLKKTTIVALARKLLVALWKYVTAGVVIEGAVMKRT

SEQ ID NO: 515070 - protein, 433 aa, unidentified
MLKLNYMSTLFVGIDVSSKTNAVYAMDFEENKYISSSFGNNQPGADQLVNMIAECMQKHKNLDTVLIVLESTSVYSVHISNFLSTSEVLMPYKPYVFCVNPKAASNYRKSYIGMEKTDPTDAYLIADFGRVGRTKKLEPWRGGQFIALKRLTRHRMHLSECITREKTYMVSNLYLKFSELQLLEGDDKPFGSLYGATSSAVLTEFLSPQEIIDMPEEDLLTFLAGKSRNRISDLSKTSELLRKAARDSYRLDKCMYEPLSISLASSFNCIHAYQKEIKLIEQAIEKCINGMNPNALLILQSIPGIGPIWASGILSEIGDITVFHSSDALAKYAGLYWPKGDSGDFTSEDNKMSKAGNPYLRCYLGEAANSVRKHIPEYADFYARKYAEVTKHQHKRALALTSRKLVRLVFGLLVKNQLYTGEKLDAEYNIESN

SEQ ID NO: 515071 - protein, 385 aa, unidentified
MQTPNDLSQSGIVLKHDSTLIAVIEMSLSSWLVAGMVPSVERQPLKKLAIDENALLKLLHRWREEAEKAGRKIERIAVAFEAGRDGFWLARWLRARGIEAHVIHASSVAVSREHRRAKTDRLDTELLKRAFLGWLRGERDHCKMVAIPTIEDEDAKRPNREREGLVGEQTRIINRMKAALSRLGIRGFNPKMKKAAQRLEDLRTPEDEPIPPNTLAELRRDMERRRLISEQIRQIENARLERIEHAPRHGPHAMMRVLARVIGVGIETADMLVQEALSRNMRDRRAVARYAGLTGSPDESGTRRREKGLARSGNARVRRGMIQLAWRFLMFQKDSALARWFRARTENARGARKTMIVALARKLLIALWRLVREGVVPDGVVLRPV

SEQ ID NO: 515072 - protein, 344 aa, unidentified
MTYYAALDVSLRSVAVCIIDDQGKYHFERKIPSEVEDIVQCLEAFDGEIDRIGFEAGMLTQYLHYGLTAAGYQVVCLETHHVKESLKAMRNKTDKNDARGIAQLLRTGWYQAVHVKSLQSHEIRALLSSRRVILRKCVDLENELRGLLRIFGTKLPSRLAHGIFEDEVRAPIEADPALRRALLPMLELRGMLYQAFLKLDTQVRAMAREDAVCQRLMSAPGVGPVTALTFKAAVDDPTRFKNSRNVAAHFGLTPKREQSGEVDYDGRISRKGDTQVRCALFLAAHAVLTREKQWSSLKAWGVKLAKTKGHRKATIAVARKLAVILHRMWIDDTDFQWRSEDRAA

SEQ ID NO: 515073 - protein, 347 aa, unidentified
MTHVGIDLHKMESQICVIEETGEVVAEVRVTTRRDTLQRALEAWPGAQVLVEACNESEWVARHLEGCGYTVVVADPNYTPMYGHRHRGYKTDRRDARALASASAQGLFRRAHRTSDARRRMRAELVTRDALVRTRTRYISVIRARLRSEGYRLRSGDASTFVTRVNELPLEPEMLDQLQPLLMVMTLVNQQVATMDRSLVQEAKADRVTLRLQSMPQVGPITALAFVAALDDVRRFRNAHQVESYLGLVPRERSSGEHQVRGRITKTGDKRVRWLLVETAWRLMHRSKTKVPALQTWSTKVAVRRGRTIAAVALARRLAGILYAMWRDDRIFDPDHLSRRRDLPHVA

SEQ ID NO: 515074 - protein, 423 aa, unidentified
MKYALVRVLPEVPPGGVCAGIDWASADHAVCVVDLAGQVADRFAAAHDRAGIAGLIARLRGRGAAEVAIERGDGVLVDALLAAGLTVVVIGSRQVKNLRSRYGSSGAKDDRSGAFVLADTLRTDRARLRPLVPDSPATLALRAAVRARRDLVAHRVSACNQLRAHLQVAFPGAVGLFSELDSPLSLAFLAAFPGQQAAARLDEQALAAWLATVPRRGNTAPAGVLAARLAAAPRGAAGADAAQAAVTTQLAAATAGLAGRVRALEAEIAAQLAAHPDQHIFTSLPRAGTLRAARLLAETGDCRARYPDPWSLAGLAGVAPVTRRSGTYISHEFRWNVNRQLRDAICDFADGSRHASPWAATVYAAARDRGKDHPHAVRITARAWVLIIWRCWQDGTSYDPAKHRALQDILTRQAAAGTPQPHR

SEQ ID NO: 515075 - protein, 324 aa, unidentified
MTTATPFPLFVGIDISKAHLDIAIRPTNARWQVDNQEPGIAALVDKLKQLKPALIVLEATGGLEMAVTAALASAGLPVAVVNPRQVRDFAKSLGRLAKTDKIDATVLAHFADAVRPELRLLPDEQTQELQGLLVRRRQLIEILVAEKNRLPMTHKRLKEGVKEHIQYLEHQLKDLDQEIQDRLHSSPVWREQEDLLRSVPGVGKVLSVTLLAELPELGQLNRKKIAALVGVAPYNCDSGQKRGKRAIWGGRASVRSALYMAALSATRFNPVIKSFYKKLVTAGKPSKVAITACMRKLLTILNAMMHSGTRWQAQKAATKLPAIA

SEQ ID NO: 515076 - protein, 407 aa, unidentified
MICVGIDVSKRKSTVCFMAPGDKIIRRPFDVKHTKEELQPLVDEIRVQAKYDEIKVVMESTGVYHLSIAYFLQQNGIFVSVVNALKVANFNKAENFRHTKTDSIDSTNIARYGIAYWAKLPQFDLNGDKYFLLKRLCDAYLNFSEERSRILLQLQSQLEQTMPGIFDLFGGFDINSGKDKLLDFLERYCHIEDIIAKSEAEFVASYCGWAKEKGYRSNESKAATIYAQAKNGIPSIPNNPIVRETIMWYVGLLRRADETLMASLTRMEDIAKDLPEYELVGEMGGVGRVTRVALIAQIGDVRRFKNKHSLICFAGLTPSIHESGKFRASQNHIVKKGPARLRKVLYQVMMSLVMHKIPKDDAVYRFIKKKEAEGKYKKVAKVAGMAKFLRIYYGRVMHLYRDLGLAA

SEQ ID NO: 515077 - protein, 391 aa, unidentified
MVVAQTHSTLSNVNRTDFAAIFVSLELSLSTWLVTSASPGSGDKMSKHSVQGGDINALLERLKLLQQKAKVQTGLDYPVITIQEAGLDGFWLHRVLLANAIESHVVDPASVAVSRRSRRAKTDRLDGEALVRTLLAFKRGEPRVCAMVKVPEPEEEDRRRICRERKVLIAERIKHVNRIKGLLFAQGIRDYRPVRSDRRQRLEEFVTGDGRPLPMHVKMQISRELGRLELLLEQISAAEQERDALLLEQDNCDAAKSTPARMLLDIRGLGSEFVAILWAEGLFRHFDNRRQVAAYAGLAPSPWQSGTIDREQGVSKAGNARLRTTMIQLAWLWLRHQPCSALSLWYKARVLSNNGRMKKSSIVALARKLLVALWKYVTAGVVIEGATTKSA

SEQ ID NO: 515078 - protein, 405 aa, unidentified
MQVYIGIDWSESKHDVVAMNAAGAVLAQLTIPHSIEGFLQLTDLQEKLGMHSEDCLIGLETAHNLIIDFLWSRGFGQVFVVPPRVVKSSRTRFRHSAARTDLSDALVIADCLRTDRGRMQPWHPDSLLTQQIRAKVSLIHHLTRGVGRLYNRLRDVLLRYYPAALDVFGNQSKVWLAFICAYGSPEKAQKLTFEDFRLFARQHRYPNPALLPAAFARLQAPQPVASATIVMVYEDETHTLARLLLEMKMSKEKALKELKNLFDQHPDAPIFDSLPGAGDLLAPALLAKFGDDRDRFTSPASVQALAGTCPVTDASGKRRVIKFRRACDREFRRITQQWAKASLGKSVWANAYWLKVYSRRGYASHAYRCLANRWLAILWRIWQDGVVYDETYHLQQRAMHSKACN

SEQ ID NO: 515079 - protein, 370 aa, unidentified
MQYVGIDWAYRRAAWCAKQADGTIAGEGFVPADEDGLARLVLGLGPEVRACLEMMSGAVWVRDRLAGVGWRVEVADARKVKNVAPLACKTDKVDARVLAELCRRELVPALWIPSLEERALRERLKRRLHLVRLRTSAKNRVFGLLTQWGLRIPCDRLRRHDAMELLETRGVPEVWRRSVAEALAVIELLDERIAPLDRELGPLARADRRVCLLSTIPGIGPVLGLTIAAEIGDVARFPSARKLIGYSGLAPRVKQSGERSRSGELSKAGSRTLRFAAVEAAQGAWRETNPWHRLYSDVKARTGKANPAKSAVARKVLIACWHVLSREQPFKPSQPRTDHVPASSLCFLAARRPARELRSRDSSDPRWCAA

SEQ ID NO: 515080 - protein, 354 aa, unidentified
MKRARKELQPGDRVFVGIDLHKKKWHVTARTAELELFSGSIPGCWKALQRILDRYQGHQIETVYEAGYFGFWLRDHLVDYGAECIVTPPSLIPQEYGNKVKTDRRDSRKLAHFLAKGMLKRVWVPTEKERYHRQVSRRRRQLVGDRIRTQSRIKAELKLYGIELPEPDGKWTKIYLGNLGRIRFNNRWMEENFKCLLEQYYFLDEQIIKQTRLLRELSKTELYRERVELLMTIPGIGMIAAMELLLELQDVNRFQRADQLAAYVGLTPSQYTSADKVRMGRITRVGKNSLRATLIQASWALIRKDGLMQEKYDRLKSRSGGKRAIVAVARTLLIRMRRMLLDNNPYVLGLIAAN

SEQ ID NO: 515081 - protein, 369 aa, unidentified
MEKSITYVGLDVHKNSIDVALADGGRENEVRHYGTINADMESLDKLVRKLVSQGRELRFVYEAGPCGYVIYRHLSRQEFDCVVAAPSLIPKKSGERIKNDRRDSMMLARLHRAGELTPVYVPRSEDEAMRDLCRAREDAKGAERKARQQLNAFLLRNGFRYTGKSLWSLAHWRWISDIKMAHAAQQFTLQEYVDAVRSGTERIERITGQIRELVAQWRLGPVVEALQALRGVSLIVAVTVVAELGDLSRFDHPGKVMAYLGLIPSEYSSGENTKRGGITKTGNGHARRMLTEAAWSYRLPARVSRRLRDRQQGLPQQVWEIAWKAQVRLCSRYRRLVAKGKRTQVAITAVARELAAFIWAIARTVEIAA

SEQ ID NO: 515082 - protein, 334 aa, unidentified
MTHRRMIIREDFRSLGKKRKMETQLKNITFEQVIERGCGIDVHKSVVVATIRGAGIKEETRTFDAFTESLEALRDWLKDNCITHVAMESTGVYWKPVYNILEEDFVILLVNARHIKNVPGQKTDKKDSTWIAKLLLSGLLKGSFVPPRHIRDLRDLTRYKRKVIEQISSEKNRIHKLLEDANIKLSSVVSNLSGATATKIIDAMISGEEDINELVKLRHGKMQCTVEDLAASLKGKLRPHHRFMLQTYKDSIKSKEAIIEKLDKQIDEQLKENELLLDAELLATIPGVGKEGAAYILAEIGNNMEQFPSEQHLASWAGMSPGSNESAGKKKAHE

SEQ ID NO: 515083 - protein, 306 aa, unidentified
MLYVGIEVAKYKHDVAVLNDQGKWVLKPLTFSNSRAGFETLLNTLSQLNQDYLVALEDTGHYAFNLLHFLHEQEITTYTYNPLLIKEFAKSLSLRKTKTDKKDARVIALKLLADPKREQFRHDNKHEELKILTRHINRLKKKQSDYAYELLSRYPNPQKISVADFEQLLTIKRLTVPKIQDILKVAPHSIGTTSPAREFELIEIIENIKHYNKLITKAENRVDELMAEINSVITTVTGIGNRLGSIILAEIRNIHTFDSPAQLQAFAGLEPSIYQSGQVDLSGKMVKRGSPHLRWALIQAAKSVAR

SEQ ID NO: 515084 - protein, 366 aa, unidentified
MKKNSTVVKNGNKIFKQPALTIGLDLGDRSSCYCILDESGSVILERSVATTSSGIRQAFGRMPRCRIALETGTHSPWVSRQLTRMDHEVIVAHARNVRLIGESSRKDDQLDARTLARLARIDPGLLGPVRHRSAEAQIQLTVIRARAALVSTRTALVNAARGLTKSYGERLKKCGTEQMNRDSSEGLSPELREALDPLLREIESLNERIKEYDQRIEQIAKEVHPEVARLKQVKGVGTLIALTYVLTLDDPRRFRHSRDVGCFLGLRPGRRNSGQSEPQLHISKEGDRYLRTLLVQGAHYILGPFGQDSDLRRWGLKLAERGGKNAKKRAVVAVARKLSVLLHKLWVSGEAYEPLRNNHKVASAAA

SEQ ID NO: 515085 - protein, 407 aa, unidentified
MKKKEVIEFEQVVERGSGMDVHKDVIVVTIQGKDIKTQTKSFKTFTSSLIKMKKWLLKNKITHVAMESTGVYWKPILNVLGDDFEILLVNARHVKNVPGHKTDKKDSRWLAKLLLSGLLKGSFMPERAIRELRDLTRYKTKLTHQISAEKNRFQKILEDANIKLSSVLNDVFGATGTKIMSHILSCENYRPEQLLQYVHGRVKASRADIKEALTGYVTTHHRFMLKTIKRNIERIEATVAEVEQQIEICIEPYKVEQELLESIPGVGQDGATKIIAEVGVDMEQFPDQNHLASWAGVCPGSNESAGKNKSGRITYGNKYLRSLLVECGWAASRTKNTYLSAKYKSLVGRRGKKRAVIALGHKILIATYFIIKDKVAFNELGADHLNNFRRDRFIAYYRQQLEKLEAV

SEQ ID NO: 515086 - protein, 459 aa, unidentified
MVSHRGSTPSLGTFEQINWHAAGIDVGTEEIYVAVPEGCDGDRVRVFPTFTVDLERIADWLKQCQITTVAMESTGVYWIPLFEILESRGFEVYLVNARHLKNVPGRKTDVLDCQWIQQLHTYGLLRASFRPSEEICALRAVVRQRDMLVRYRAAHIQHMQKALHLMNIQLTQVLSDITGVTGMQIIRAIVAGERDPQLLAAYRHNGCAHTPEDIVKALQGHYRREHLFTLQQALELYDLYGQQIAQCDAELEAMYREMDPPNAPPTAEVTQPPPVRTTKPRKNQASFDLATSLYQMAGVDLTRIDGIDALTAQVVLSETGLDMGKWPTVKHFTSWLGLCPQNEITGGKVKHRGTAKTRNRANTALRVAAQAVWRSQSAIGAFFRRIRSQHGGAVAVTATAHKLARMIYHVLKFRTDYRDPGTQAYDTQQRERAERSLRRQAARLGFAVTPLEPSPAAVS

SEQ ID NO: 515087 - protein, 383 aa, unidentified
MTEQQVIIGMDPHKSSNTIAVLTRDETMLTRRRFVNSDDGFVEMLAAVADYPDRVWAVEGANGMGRSVAQRLVAFNETVVDVPAKLATRVRVYSTGHGTKTDAADAVAIARAAIHSPHLRHVLADDASVAMKLLSDRRKELVGQRTQAMCRLHRLLRELIPGGAPTAISAETAFGLLNDLKPDDPANEMRLEIAIDHIEDVMRLDRKIDDYTRRIVTEVKASNTTLTRIYGVGPLNAALILGEVGDVSRFPSRDHFASYTGTAPIAASSGDHHRHRLNRAGNRTLNHAMHIAAIVQIRFDTPGRSYYLRKVAEGKSKKEAIRCVKRRISDAVWRQLQIDRSDDQTQDDAWPRRASTRGGLPHYRSPDTPRANGRPMQPKPVTV

SEQ ID NO: 515088 - protein, 349 aa, unidentified
MANLTIGVDLGDRYSELYVVDAAGACVETGRIRTTVAGLEQWFGGRAPARVVLEAGTHSPWASRVLQRLGHEVLVANPRKLRALYENDSKDDRVDAEYLARVGRLDPALLKPITHRGEAAQADLAVLSSRDVLVRTRTLLINHTRGVVKAMGGRLPRCSAESFARRVGPHVPPALRPALAPVLAQLQQLTAAIRGVDREVERRCAEQYPATAQLRQVSGVGPVTALAYVLVLEDPRRFPRSRAVGAYLGLRPRRSQSGEQDPQLRITKAGHPFLRRLVVQAAHYILGPHGPDCDLRRHGERIAARGGKNAKKRAVIAVARKLAVLLHVLWIRGEVYEPLRQRLVLAQAS

SEQ ID NO: 515089 - protein, 441 aa, unidentified
MAMRKQEEEVMFPNAAGIDVGASSHWVAVSRHTARDPVREFGAMTDDLNAMADWLVACGVDTVALESTGVYWIPVYEVLEQRGLKVWLVDARQMKYVPGRKSDVQDCQWLQKLMSLGLLRAAWRPDGEVCVVRAVARQREVLIAEQASWVQRMQKALVQMNIQLTEVLTDVMGVTGQAIIRAIVAGERDPKVLARHRNNRVKASAEEIARALTGNWRDEHLFVLGQALAMYDDIARHLAECDAKLQALLAQLGQAKVDLGKAPRTGSKLRAEFDVRQALANWAGVDLTRINGLEVATVMKILTEIGPDLGRFANVKHFCAWLGLCPGTKISGGKVLSAKTKRSANRVRQALKIAAMSLSHSSSALGAFYRRLCSRMDKPSANTATAHKLARMVYFMLTRGEAFVDQGQQLYEEQQRQRSVAALKRRAAALGFQINPTPVAA

SEQ ID NO: 515090 - protein, 409 aa, unidentified
MDVIVERQGALDVHKEQVTACVRVPDEQGERVSHVAEFKTTVRGLLVLRDWLKAHRVTQVTMEATGVYWKPVWHLLEDEFELVLVNARHVKQVPGRKTDVSDAVWLCQLAEAGLLRASFVPPKPIRALRQLTRYRKAQVSERQREANRLHKALEDTGIKLDCVATDILGRSGRAMLDALIGGTTDPEILADLARGRMRAKIPALREALEGRFEPLHALLIGAILAHIDFLDAQIERISAAIEQQLAPFAPAIELLCTTPGIQRRTAENIVAEIGLDMGVFPTAGHLASWSGQCPGNDQSAGKRRSGRTRKGSKWLDVALKDAALAAIRTDDSYLQALYRRKKPQLGHGRAIGAVKHSIICACWHMLTTGELYNDLGGDYFSGRDPQRQIRRLVAQLERLGQTVKLQPAA

SEQ ID NO: 515091 - protein, 333 aa, unidentified
MTNVGIDVGARELVLAIRHKGIIQKIKTFCNTPAGHQQIMKLCSKYLRYGKVRIAMESTGVYYFDLAVALTNGDKFDVVAINPRATKNFARAAMERNKTDKVDAQILALFAEKMDYPLWKRPSQKALSVRYMSRTVSSFVQDKARAKNYLHALESCNESPEILLTMTTKRIKFYEDMIGELTQEVIAIIEQDKQLNQWYILLQTIKGFGPASSIQLLGEIISVPAGLTHKQWVAFAGLDPRQFQSGTSINKKIGISKAGSRRIRQALFMPAMSAIRNDRYVKGYYQHLLEDIGLAKLQAIVAVMRKLLHAIHSMVHQLKPFDSTRFYAGPLEV

SEQ ID NO: 515092 - protein, 348 aa, unidentified
MEHYAGIDVSVEWSSVCVVDGGGKIVREGKVASEPDALIVWFNSLGFGLARIGLEAGPLSQWLYAALREAGFAVELLETRHVRDAFKAMPVKTDRKDARGIAQLMRLGWFRPVHCKSMAAQEVRALLTARKLVQSKLHDVENSLRGILRGFGLKVGKTTPRSFAERVRELAAGHPALETIAQALLGVRAVLIREFNMFEKQVRIMARQHGQAKLLMTVPAVGPIVALTYATAVDDPARFKSSKAAGPHFGLTPKKYQSGETDRCGRISKIGDAAVREALYQAAHVMLTKAVKGCSQLKSWAMRIARRAGMRKAKVALARKLAVILHRMLADKQTFNPAASARTRTAAA

SEQ ID NO: 515093 - protein, 315 aa, unidentified
MEAMIERCAGLDVHQETVVACVLFGPLDKKPKTSIETFSTTTTGLLALSDWLATLQVSDVVMESTGVYWKPIWNILEGSFHLVLANARHVKNVPGRKTDVKDAEWLAKLLRCGLIESNFVPPEDIRDLRDLTRYRKKLIHHRTSEQNRIHKILQDANIKLTSVLSDIFGVSGRRILEAILNGEKIETDGLRKMVDWRTKASITDIANAINGRIRRHHRDMLRYHWEHMSYLEQTIEELEKQIDQLLSPYRKEVELLDGIPGVNKAAAATFIAEMGVDMSVFKSAKHLASWAGVSPGNYESAGKKKRVKPHKEIKL

SEQ ID NO: 515094 - protein, 479 aa, unidentified
MENSVVMRKPAEILDADHELVIERVCAIDVAKASGMLCTRLPQGAAAGRRVSRVWEVAATTRAITELADHLVAVGIEQVTVESTSDYWRIWFYLLEARGLDVQLVNARDVKNLPGRPKTDKLDAVWLAKLTEKGLLRPSFVPPAGIRQLRDYTRLRVDLTRERTRHWQRLEKLLEDALIKVSSVASKLDTRSVRDMLEALIAGDRDPRRLAELARGRMKTKRGALVEALSGRFDEHHAEIARILLDQIDGLSAAIDQLTTRAELLLQALLATRAGDQRAGGAVHAPGSGDPRQAPTEAPTEASVPAGGTIAHRGGNGLSASQRLDEIAGIGPLAAQVIIAEIGLEMSRFPTAGHLVSWAKLCPRTIQSGATRRSGVAGKGNPYLKGVLGEAAAAAAKTNTFLGERYRRLVKRRGKLKALVAVARSILVIVWHLLSDPTARFYDLGPDYHTHRIDTTRKIRNHVSGLTALGFRVTLEPTA

SEQ ID NO: 515095 - protein, 310 aa, unidentified
MIINPGVVGIDISKHSLDIFDAALERSERVDNSAQTAAALAGRFAAAGAFVLFEATGSYDLALRRALEAAGVTYARVNPGRARDFAKAAGFLAKTDRIDARMLAAMAQSLRPAAQAPLDPDRQRLTSLSRRRDQLVAMRKQERTRRSACADEEMAEDINRHLAWLDKAIAALDHTIRELIGANSNLALAARRLRSVPGIGPVAAATLLALLPELGTRSPKSIAALAGLAPINVDSGTFRGKRSIRGGRKRVRDALYMAAVTAARSKTRFAAIYRGLVNAGKPPKLALIAIARRILVTLNAIIRDNAIFQT

SEQ ID NO: 515096 - protein, 378 aa, unidentified
MSLPATVVAAPPIIYLGMDVHKESITIAVLPADAKGPTHVDRLPNDIPKLKRYLERIQARGEIRACYEASGAGYVLHRAMREWGIACDVIAPSLIPKRPGVQRKHDKYDAAELARLYRAGELTPVRIPSEAEERVRDVVRCRETFQREILKSRHYILKFLARRGFVFRAGTNWCGPHLKWLQHLTTEHSPLEPADRLVFREYHALLLYKLQRRDELDREIVRLAELPTLKPIVQRLQCFRGLSLHSAMVLATEISDWRRFERPGQLASYVGLVMREHSSGGTERRGSITKAGNSHCRHVLVQAAWSYRHRPAVSVDLKRRQAGQPPAVVTHAWKAQHRLHQRFNHLVYRKSPQIAAVAVARELVGFLWSVLQEVPVTT

SEQ ID NO: 515097 - protein, 375 aa, unidentified
MIIVGMDVHVRNSFLHVTDADGRVLRRGRVGNSLGQIAEFLGVLESQEDLMRVVLESTTNSRAICRLMYDYGRQAGIDLQAQVLDARKLRVIAESVSKCDKLDAAVLAELARSNLKLPACYVPDDEVFALREHLRARADLVRMRTMLKNRVHSVLHRRGVLNPLKDLFSVPGRQWLRELTLDDAGRSILDRYLASLDQLQETIKQSTAALTRLSRSQRWCHPAALLQTMPGVGPITSLTVLAELGDVSRFKSRASVSNYAGLVPVVRNSTDKQFSGHITRRGPAHLRGAMVEAAWTSVGRVPQYAGIFHRVSGRKGKQVAIVAVARRMLEDAWTMLTRDEVFRMRSVEADQRSGVPVASGESFADGRVAAPSVAG

SEQ ID NO: 515098 - protein, 337 aa, unidentified
METYVGLDVSQKSTMVCVIDGDGNPVWRGTVASDPQAIDSIIRQQAPGVRRVGMETGPLAVWFYHGLRERGVPVDCIHARHVHAALATQLNKTDSNDARGIAQLTRSGWYRAVEVKSIASHEVRLLLGARSRLVSMRTGLYNQIRGVLKTFGVVLPAGTRSAFERLVEQHTPATSLIHGVIEILLDSWRHIDRQVRETDKALERIARASDVCRRLMTVPGVGVTTAVAFAAAVDNPDRFRRVGDIGPYLGLTPRKYQSGEVDHNGGISKTGCRLTRHMLFEAASALLLRHKRDCALRRWAQSLIPRIGLRKALVATARKLATLLLSMWRSGKEFIPG

SEQ ID NO: 515099 - protein, 344 aa, unidentified
MGRVVIGMDPHKRSATIEVLDQREKVISTGRFGTDRDGYRNLLAAGRRWPERVWAVEGCQGVGRHLAQRLVADNEPVLDVPAKLSARVRVFSTGQGRKTDATDAHSIAVVALRTPGLRAVQVDDATVALRLLVDRRDELGAARTLTVNRLHRLLAELIPGAAKTFLSAMQAKALLATVRPRDVVGKTRRKLAAELIVELEGIDRKIKVATKELRELVAATGSTLLELNGIGPSGAARLLGDIGDVSRFPTRGHFASWNGTAPIDASSGEQNRHRLSRQATGGSTGSCTSWRSSNCATTPKAVPTIGASSPPARPRWKLSAPSNAGCPTSSTASSSPTRSGCGRK

SEQ ID NO: 515100 - protein, 390 aa, unidentified
MEARTVNNLPSAAAHDGAVRCRVAIELSKKSWVVAVNTPLSDKISLYKLKPNDWKELLELIERIQKRVAQELKKPVEVISCYEAGYDGFWLHRLLEAQGVRNHVIDPASLQVDRRARRAKTDGIDVEKLLRSLMAYLRGEPKVWNVVRVPTVIEEDDRRLHRERSRLINERIQHVNRIKGLLAIHGIYDYEPMHPERMPRLERLRTTACHRLPPHLNAEILRELQRLELVLGMIQTIEAERDAIASAKSKSRHTSAKKIQHLVKLKSIGPEFATVLVGEVFYRTFDNRKQIGSYVGLTPSPFQSGSTFRDQGISRAGNAKARTTMIELAWLWLRNQPDSSLSVWFRERVGERKGRIKRIAIVAMARKLLIALWRYLETGLVPEGAALKSK

SEQ ID NO: 515101 - protein, 400 aa, unidentified
MMTPDDIDVWVGLDVGKSAHHAHALDHDGNTLYDKPLKQDEKAIRTMLGKLSKHGRVLLVVDQPNTIGSLPLTVARNMGIAVAYLPGTAMRRTAQLLPGDAKTDRRDAHVIAWAALKLPETLRDAGPDDETLAALKLLAGHDEDLAHESTRHVNRLRSLLLQTHPAFERALKGERITRDATLALLERYGGPMGVKRAGIEDVKDWAKSNGLRAGRIIDDMFKAIGEQTVTVPGTLMAETIIPSIAHDIKTIRDRRREVDRQVEKLLEDHSLLTVLTSMPGIGVRTASNILLGIGGDIANFKSSAHLAAYAGISPATGQSGTSIKGERPSRRGNKRLKNALWQTAFVASTKHPPSVAYYKRKREQGKHHNAAIICLARRRCDVIYSMLKNGTLYQEPALVA

SEQ ID NO: 515102 - protein, 477 aa, unidentified
MVINRVEEILDEPYEQVVQRVCAIDVAKDSGKVCVRTPAESGSGRRVSRVWDVQARTNAIIELGDHLACQSIEKVTLESTSDYWRIWFYLLEARGLDVQLVNARDVKNVPGRPKTDKLDSVWLAKLTEKGLLRPSFVPPRQIRVLRDYTRLRVDLTAERVRHWQRLEKLLEDALIKITSVASRIDTLSVRDMIEALIAGQRNPKVLAGMARGRMRLKHADLVEALTGQFDDHHAELARMLLDQIDALTAQIDTLTERIDTVLADVPVSPPPDGPEPDPDDHQPGRRNRVEQAPQVRGNGSGTAPAPGAAPRPVTALSLVDILDEIPGIGRHNAQEIIAEIGLDMSRFPTPEHLVSWAKLCPRTIQSGSRSSAGKTGKGNRYLRAVLGDAAAGAAKTQTFLGDRYRRLIKRRGKIKTLVAVARSILVIIWHLLANPGMRYQDLGVDFHTKRIDIARRTRNYVRQLEAMGYTVTITAAA

SEQ ID NO: 515103 - protein, 422 aa, unidentified
MNMLQKNESNVNKFVAIDLHRKNFFATIFNTETEKSSSFKIPFNRESVKNFASTFDKKTNVVIESTQGASLLYDFFSKFANKVIVANPSKLRVIFDSYKKSDKNDTENLLELLITDKVPEVYIMPKEHREIWKLIKIRNSLTKTKTVLKNIIHSIIGSEGYNSPYSDLFGKKGKNFLLSLPLSVNESWIIQELLPEIERIEEKIKKIDERITAFALDKKEIQLLMTIPGINIYGATAIFIKIGDISRFPTAEKLAAYFGVVPSTQSSDKKTRHGRITKAGCDIVRTILVNAGFYGVKGSKVIKNFYNGIAIRRGNNIARVAVARKLAKIIWAMLTRGKTFNEVNEESFKRKIKRFMHAYISGVIPTGNLLLQEMLISNGYSIKDYKKEMEKEIFETILSKSEEKTEGVLKFLKILLNFVFNY

SEQ ID NO: 515104 - protein, 392 aa, unidentified
MFYLGIDIAKVNHVASLIGEDGSVLLKAIKFTNSNDGLQKLIDSISVYDLSQIYCAMEATGDFWLSLFSALTDKDFNVSVFNPYQIKSFRGAYSNRKQKNDVIDSIIIADFLRFNGVNQTCLPNDDLLALKNLTRYRSNLVNNIAKIKTQIKGILHKVFPEYSDIFSDVFGNSSKQILLNCPTPSEVVNFNTRKLANLLKKASKGRHGSDTVRKIKDLAKNSFGIKFTGDACSFEIKQLVSQIIFLEDQVDELDLKIKEIYSNLDSHLESIPGIGKTIAPIILAEIGDINNFSTTSKLTAFAGIDPSENQSGNKKSTNEKTSKRGSPYLRHAIYQAAFIATNNDPVMHDYYIKKRAEGKHHYVALAGVERKLLGIIYHVLKENRDYRPPKSS

SEQ ID NO: 515105 - protein, 320 aa, unidentified
MAIIGVDVSKLSLVAVRTSSTGIVKESFEIPDTAVEIGTWLDQLQGKHKYLLVASEATGDYHNTLAKACLSRGIKFRLLNPILTKQFNRATIRKRKTDLTDSEIIAKLAIQGEGSIVSATTFAPSKAIHRATIRLVKVKQALERMSTRFNEMFPEENAVNQQLSNCVELLGESCIKLRKEAKIKTDPKLRKLLTSIPGIGEHVVVTLINEINNIGRFPSPKSLVAYAGLDPRVKQSGTSLKHNTHITKRGSVYLRRDIFIAASIASRWEPEIKNYFEKKLGEGKRYREALVAVSRKLLNRVYAVWKRGTPYERRLTTTGA

SEQ ID NO: 515106 - protein, 349 aa, unidentified
MVVVGADVHKRTHTFVAIDQAGRELGHKRFDADTAGHRKAIAWARERFGTELVWAIEDCRHLSARLERDLLTAGQSVVRVPPKMMAEQRRIARTRGKSDPIDAAAVARAALREPDLPVACHDETSRTLKLLVDRRDDLVQHRTATINRLLWRVHELDPAWAPKPRSLDLAKHQQILAGRLAAADGVVAELARDELADVVELTGRINQLERRIAVLVEQAAPTLLAMPGVGVLTAAKLVGEAAGITRFKSEAAFARHAGIAPIPVWSGNTRGRVRLTRSGNRQLNAAIHRIAVTQIRLDGLGKTYYEKKKSEGMSTPEALRCLKRRLARIVFNHLTTDHAAARTVLAQAA

SEQ ID NO: 515107 - protein, 393 aa, unidentified
MICVGIDVAKDKHDCVILNSEGKALTGVFTIPNNADGFDTLLQKIHGCTSPDDKIKVGLEATGHYSYNILGFLLNQGLPTYVINPLHTNLFRKSMSLRKTKTDRVDAKTIAAMLMSNVDLKSYTDTAYHNEELKSLTRYRFDKVQERAQLKQSVSRLVTILFPELEKLVPTLHMSSVYALLIEFPGAKQIAEAHLTHLKSLLKDASKGRYGRDMATEIRDAAKRSIGSVMPAKSLELRHTIRLIRELDSEIKDIEAAIEAIMEELQSPITTIPGMGFRMAAMILAEIGDFSRFDSPSKILAYAGMSPSTYQSGHLSLAGTYSHMEKRGSRYLRYALYNATKYVCHWDPGFAAYLAKKRAEGKHYNVALSHAAKKLVRLIYAMEKSRQPYKRAA

SEQ ID NO: 515108 - protein, 414 aa, unidentified
MTEEEIISWFAGVDWGSERHQVCLLDARGTTVGEREFPHSGEGLAELGDWLLSMASAASTVAVAIEVPHGPVVDALIDRGFVVYAINPKQLDRLRDRFSVAGAKDDRRDAYVQADGLRTDRRLFRRLQVADPRLIELRAWSRLAEELRAERVRLSNRVRHQLWRYYPQMQKLTNDLAAPWFLELWAIASTPAKAGRLRKSTVERLLKQYRIRRMDAETVLRILREPAIKVAQGVAEAASIHMRSLVARLRIVNRELREAERKLDELCTTIGEIEQTSGEGLQRRDVAILRSMPGIGRINLGTLLSEASGPLSRRDYEGLRTLSGAAPVTKRSGKSLIVVRRYAAHVRLRDTVYHWARVATQRDPKCRARYTALRKRGHSHGRALRGVADRLLALACVLLQRQTLFDPYFGGSTA

SEQ ID NO: 515109 - protein, 320 aa, unidentified
MLSFGGIDVSKDRLDVMILPEERRSSVSNDASGWAKLVEQLRGSSIAAIGIEASGGYERGVIRALLAAGIPLRQVGPFKLRQFARASGVLAKNDPIDARMIASFVGIMPTRPAQRQARAAERLTEMLAIRRQLSAEKIAAENASRLLEDVMLQRLSRRRIGRLTADIDILDKWMFEIVATDDALVHRYRLLCSMPGVGPLLACTLIALLPELGCMSRKQIAALVGVAPYAFESGTIKGRRCIWGGRAHVRQVLYMAAMSASNWNPVLKIFHHRLKAAGKLPKVVIVAVMRKMITTLNAMVRDDVAWADRLSGRHSVATAR

SEQ ID NO: 515110 - protein, 317 aa, unidentified
MTQTITIAAGIDTSKHKLDIAVHGSAARWQVENSLAGWRQLANHLVEAGVTRVGIEATGGYERGVVLHLREQGFSVLVLQPSQVKAYARMHRRRAKNDALDAVLIAACTANLEPPRVLPDARLEELAGHLTFVEQTEEDIVRFKTRLEHVEDPRLRRLVIKDIADLKARRAVEMVRIVKALRAHADLARRFHLVLSVPGIGERTAIAIIVRMPELGRISREEAAALAGLAPFDHDSGAFKGQRHIAGGRGRLRRSLFAAALPAAFRWNKALIELYARLIARGKLHKVALIACARKLLIYANTVVQRGTPWVQDKAAA

SEQ ID NO: 515111 - protein, 337 aa, unidentified
MKFKRIAIDTSKSVFTLHGVDEQDRPILRQNLSRTRFEAFLGKIAPTEVVLEACGSSHHWGRFLQRLGHRVRLIPPQYVKPFVKRGKNDRNDAEAICEAASRPSMHVVPVKSAQTQAEAMDLSARDLLVRQRTQLANAVRGHAAEFGIIAAKGITQVEPLLKKIAETDMPPAAQETLAQLGRCMAQLDAQLAEIDRRLTRQHKANPVSQRLAVIPGVGPITALSVAVKVDPGQFHSGRHFAAWLGLTPKQQSTGGRQCLGGISRAGDERLRQLLVLGATTVIRHAKPGSKTASPWLLHLLERRPRKVVAVALANKMARIVWAMMTNDTAYRRSPQAA

SEQ ID NO: 515112 - protein, 407 aa, unidentified
MSFFVGLDWAATTHAVCVIDETGAVRWRGTVPHSAAGLAELVQRVARFGPPASLPVALERPSGLVVDTLLEAGFLVVPIHPNVVKASRPRYTAAGGKSDPGDAYLLADLLRTDGHRFRPLQPLADETRALRALVRGRDDLVAQRVAVANQLRALLERFWPGAAAIFADVDSPIALAFLARYPTPASAERLGEHRLAQFLRRHAYSGRRPAAELLARLRSAPLSRTGDAETEASGELVQALVAVLTPLVAQIQQLSAAVAAALAQHADGPLVQSFPRSGAVNAAQILAELGDDRARFPTADQLAAEAGVAPVTHASGKHRGVAFRWACNKRLRQALTTFADNSRHASTWAAAVYAGARARGCDHPHAIRILARAWVRVLWRCWQDRRPYDVSCHRAAQPLLAVQGGGG

SEQ ID NO: 515113 - protein, 316 aa, unidentified
MTIKLEEYVGIDVAKDKLDVAVLGQKATSEAFNTKKGIIMLVKKMCQLNPKLIVVEATGGYEEALVLSLFEAGLAVALVSPQRVRQYAKARGLLAKTDKLDAQNLAEYGKNIQPRLFVAKSEAGRRLSAIIGRRRQLGDMQKAEKNRLRTAYAEMRGSIQTVIDCLETEIERLDTEIRTFMKAHENFGEQEKLLRSAKSIGPVTAATLLADLPELGKLDRKEIAALVGVAPMNHDSGKKRGYRKTKGGRPEVRSVLYMSALSAIRYNPVIKAQYDQLVKRGKEKKVAITACMRKMLTILNAMMRDQQPFHAMALGS

SEQ ID NO: 515114 - protein, 396 aa, unidentified
MHYYLGIDVGKFHHQAILCDDQAKPVIGSLKFKATFDGFQQLFAYVRQQVPEGTVIHAGVEATGAYWITVYEQLLKHQIRVSVLNPLQVKAYRNEGIRGAKTDRLDALLIVKVLRFGDYRESAIPPADLFALRQLTRLRFDLVSVTSDLKRKVICIFDQIFPEYKELFSNLFGTSSKTLLAKAVTPEDIAALSTRKLTTLLEKASFGRYGAKQALAIKKKAEQSIGITLGIDAFTLSVKILLAQVGHLEEQTQKLEEEISQRVAGQQTTLTTIPGIGRIQEATILAEIGNFERFRNDKDGAEKLVAIAGIDPKVKQSGKYQGKAKMSKRGSPYLRTAIRQIAFNAACMRKDAMFARIFQKKVAEGKPHEVALSHVENKLLHVIYSLLKSKKEYVPN

SEQ ID NO: 515115 - protein, 404 aa, unidentified
MKGPIVSIDVSKGKSDYQAFKNLNVKYTGSRSIKHTKEGFDEIVNLVREMEKKLETEVCVVYEATGVYHRVLKKVLEDNNIKQFIINPLLSAKTRKNDSLRSPKTDKLDPKSIAKTYYSHSLHNSHKPETIYHELRELSRYYEDILVHIRKDKVAFRAQLDVVFPGYDALFDDLYGPVALAVIEKYPHPEMLQKKKINTVSKVIQNKTCHRQAVSDTMADKAIEYSKTIYSGCDKDDIEVLILQRFIKKLKEDMAEAERAIGEMIKLAQELPDFSIIKSIPGIGDNLAARIIAELGDMTRFKKKNELVAFAGLDPRISESGQNDGDHMHITKKGNKRLRCLLYLAVTCSIRLKRDDNSIKDFYIKKKQQSNPMCSKAAKTACASKLVRIIYSMCKTGELYQYNK

SEQ ID NO: 515116 - protein, 457 aa, unidentified
MEDTLAQRNRISPPRSGKTRAALSLTHPNAAGIDIGSASHYVAVPADRDDEPVREFQSFTADLHRLADWLAACGVDTVAMESTGVYWIPLFELLDARGFTVLLVNARHVKNVSGRKSDVLDCQWLQQLMSFGLLRGAFRPADEVCALRALSRQREMLLRSQSRHVQHMQKALTQMNLQLANVISDVVGATGQKILRAIVAGERDGRTLAALKDARIKASTNEIAQSLQGSWRAEHLFALKQALALFDFYATQLAECDAAIEAQLQVLAAHSADPQPGKKRSRSRNAPKFDLRSRLFRMCGVDLTRIDGIDVTTALVVVSEIGTDMSRFPTVKHFTSWLGLCPGTKITGGKLLSGKTKRCANRAAQALRLAAAALRSSKSALGAYFRRMCSHMDKPKAVTAAAHKLARLIYTLLTKGEEYTDQGQDYFEERYRERVIRQISQRAAKLGLSVVPTPQAA

SEQ ID NO: 515117 - protein, 385 aa, unidentified
MQKLNDLSRSLAPLKPDRTLIAVIEMSLSSWLVAGIVPGIERQPLKKLEVDESTLLKLLIRWREEAKKSGHSIERIAVAFEAGRDGFWLARWLRARDIEAHIIHASSVAVSREHRRAKTDRLDTELLKRAFLGWLRGERDHCRMVAIPTIKDEDAKRPNRERESLVGEQSRIVNRMKAALVRLGIRGFNPKLKKAVERLDGLRTPEGEPIPPNTLAELRRDMARRRLVSDQIRQIEDTRLERLEQAPSDGPHAMVRLLARVIGVGIETADMLVQEVLSRNMRDRRAIARYAGLTGSPDESGRKRREKGLARSGNARVRRGMIQLAWRFLMFQKDSTLAQWFRARTENARSTRKTMIVAVARKLLIGLWRLVREGVVPDGVVLRPA

SEQ ID NO: 515118 - protein, 317 aa, unidentified
MAMQAGKLIVGADVAKAELVIHHDDRDEIIRLKNSKPEIKRWLKQQPLNTAIAVEATNVYHLDLVEQAHSLGFEVYVIDGFQLSNYRKSVGGRVKTDPSDARLLSRFLKNEGEDLRPWSPPPAVYGKLQSLLRRRAALVTARTAMTQSWANESLLQAAFETFVKSIDRLDKLIQQKIKEVLREAGLQEQVARCQAVEGIGFLTAAALVMAFMRGEFKSSDSYIAFLGMDLRVSDSGQKNGRRRLTKRGCSEIRRLLHNAAMAASRSAAWKGLYEQHRKSGKATTQALVILARKLARVAFALMKNQDEYVTKGGKLAC

SEQ ID NO: 515119 - protein, 383 aa, unidentified
MSMNPSASSQEEAPLKYICGIDVGSQSCAGCVYRLDKSLVVKPLAFANAKEGWNVLLDKLTQLDALPKQILIGMEATARYSENLYHALEQRGYRLCLLHPGQTHQFHERQGLRAKTDRLDAITIARVLLSGEARAGYIPDEQVATYRELVRLHSQLSEQVARYQNQIHALVVVLFPEFTQVFADPCLPSALSVLKVYPSAQAMAQAEEAALYALLRMHKHAHYGHPTAKKLLSLASTSVSSQRAEAGRSLSLRILCGQLEQTQKYLEELQAELEQLIVNDPAAKSLQQIPEFGTQTVAVLRAELGDVDRFARTDQAIAYAGLDVQIKESGLWKGKAKLSKRGSGPARGRCSIWRLCVAFICRGLPLGLTIRDWWHAVSRKAPP

SEQ ID NO: 515120 - protein, 339 aa, unidentified
MRLYAAIDLHSNNSVLVVLDAKDKVVYEKRHPNDLQTILAQLKPHKKNIHAIAVESTYNWYWLVDGLMAAGYEVKLVNTVAIKTYDGLKYSSDEHDARHLAHLLRLGILPTAYIYPKEERAVRDLLRKRSQLVRNRTMHILSIQNLVTRNSGKPITQGGIRKLDEKALDLYCEGNALRIMAIKSSLEILRCLDGQVALLERKVLEQARLKPEFKQITSIDGVGEIIGMTITYEAGDMERFEEVGQFASYARCVESSRWSNGKKKGEGNRKNGNKYLAWAFIEAAYSAIRYNERIRKFFQRKKARTNSIVARKAVAHKLARACYHVIRDQVPFNEEKAFA

SEQ ID NO: 515121 - protein, 340 aa, unidentified
MKLYGAIDLHSTNNVTVVIDEQDRVVYQKRLPNDLALILKELSVYQSELQGIVVESTYNWYWLVDGLMEHGYKVHLANTAAIQQYNGLKYTDDNSDARWLAHLLRLGVLPEGYIYPRADRPVRDLLRKRSQMVRQRTTNLLSIQNLLTRNTGSSMKANRVKRLDVQQVDELLPNGDLALAVKANLSVMSSADEQVRLLEQTVTERVKLRPQFSFLKTVPGIGEILALTIMLETGDIGRFASVGNYASYCRCVGSQKISNGKKKGQGNTKNGNKYLAWAFIEAANFAIRYNSKIKSFYQRKKAKTKGVVAIKAVAHKLCRACYYIMRDRVAFDITKAFGPK

SEQ ID NO: 515122 - protein, 366 aa, unidentified
MLDSTTNTVSVGLDVHAASVRLAAVRADELLDERTLPYEHAAVARAIGRWPGARVCYEAGPTGYGLYRYLTARGIACEVVAPGLVPQRAGERVKTDSRDARKLARLHAGGLLEPISVPSPELEAARDLVRAREDVRLDRMRDRHRLSKFLLRNDRRLPFKSWGAGRRKWLGEQAFEQPARQQTFDSYLLALDLVDRRAEALEREIAEIAATGPWAELVRRLRCLRGIDTLTALGIAAEIGDFSRFPTAEELMSFVGLVPSERSSGEKRRQGSITKAGNAHLRRLLVEAAWHARLRPKVSYELARRQAGQDAAVLERAWRCQQRLFKRWRRMAARGKPDQKIVVACARELAGFVWAIATDQPLRKAA

SEQ ID NO: 515123 - protein, 377 aa, unidentified
MKKLRFLGLDVHAETIAVAVAEPDGEVRSVGVIPNRPEAVRRLVKKLGPADQLRACYEAGPTGYALYWQLTGLGVACEVIAPTLVPVKAGDRVKTDRRDAERLARCYRAGDLTAVWVPDAAHEALRDLVRAREAAKGDELRARHRLTKLLLRRGCRPAVGVRAWTVAWWAWLRREVRFEPAALEVTFLDYVDAVDHALARVARLERAIEAAVVDAPPAMRAVIAALQALRGIARVSAATIVAEVGELSRFASARQLMGYSGGVPREDSSGARVRRGGITKTGNAHLRRIVGEAGWAYRHRPCLGGALKQRQAGLPDAVREIAWKAQHRLHDRYRTLVGRGKTKPQAVTAVARELLGFIWAIGVQVEQDWRSPQRRAA

SEQ ID NO: 515124 - protein, 313 aa, unidentified
MAQISPKVGIDCSDARLDIHIYPLDLSFSVANDPDGWSELDRRLAAVQAEIVAVEASGGCERDIARFLMARGYSLRLVDPFRVRQFAKAAGKLAKTDRIDAQVIALFVASISTRPFVRHKHLETLAELVTARAQLIDQITADKNQGRRREDSLLRRLDARRAKALAADIKLIDRRIAECVDTNADLKTKNLVLRSMKGVGPVLAHTLLALLPELGQITGKQIAALVGVAPFDDQSGKRQGLRFIQGGRPAIRAALFMAALTAGVHNPALKTFRDRLRNAGKKPKVAIVAVMRKMIVTLNAMLRDNQQWTPETT

SEQ ID NO: 515125 - protein, 403 aa, unidentified
MFYLGIDVAKKSCRYLLLNEEGEKVKSFSLDNNHQAFQNLLERLQALAIPKENLLIGLEASGGFWENLYTHLKENGFSVVLLNPYHTKKFREALAKKAKTDDIDALVIAQLLRTGEYVQSQVAEELIQSLRELTNLRYELIQERKNYQRQVYALLAIIFPEFEKTPLKNPFATASTAILQKFPTAKDLAQAKPKQIEKIVRAIPGNNLHLQEIETLIKTAQTSIYSGRAKEARATSLRILLGHIQNLSASIEKLEAEIKQLLAPQGPKDSFPGENLLTIPGVGDKTMAAVLSYLGTNGASFSTSTKAIGYVGYFPKIHQSGQTYRDNTICKRGPKLLRWALYMAAVASLKHNPEMRTIYHKKISQGKTEKQALICVGKKLLQIMLAMLKSGEPYNPTKVFVNC

SEQ ID NO: 515126 - protein, 387 aa, unidentified
MQSVTSATAVATTARANDTTLFASLELSKSKWVVTINSPGSEKFSKHLVEGGDGAGLIDLLSRSRAKAEQRCGVQVKATVIQEAGLDGFWIHRLLLAHGIESHVVDAASIAVDRRHRRAKTDSIDGEMLLRALMAWARGERRVCSMVRAPSLEEEDRRRLTRERGTLLKERIQHTNRIKGLLSGQGVRDYNPLRRDCFERLEAFRTGDGRELPPMLKAEIRRELDRIAVVTTQLATVERARDALIRADAEERNNPAALLLKLKGLGPEFASLLWLESLFRNFGNRRQVAAYGGLAPSPWQSGGVERDQGISKSGNRRLRKTMIELAWFWLRHQPDTALSRWFHTRVGAAKGRVRRIAIVALARKLLVALWRYVTQGVVPEGAVFKAA

SEQ ID NO: 515127 - protein, 428 aa, unidentified
MNELDRNRLEEFRQLRREIRHSQEYLIVGIDVAKDRHYAFFGTATGKTLLKRFVFDNTYQGFRKLLDQTEALRVRHELSKVVYGMEPTANYHKPLGEGLIELGRSVVLVCGVTVKRNRESLDGRWDKHDGKDSANVADLISQGKCLYYEYPSAELRGLRGLLSLKRRLKKQEHSYRVRIRNHLIAQYFPEMDRDYERLGAEGLSIVRWCLPASQITQLDVGPFIERVTSRRITQEKRRRLGAIWEKAAESIGCHGVPGVDHEGKVMVEGLKQIRETIKETEQKIEEICKQFPEYNFLLTIPGFGPDVSAKVLGAIGDPDRFDNRRQVLKLAGLDLSADRSGKDSDKAIPEISKRGKADLRYALYQAAFIASTKNQGFMRYYTSKLRGREKEKGIHTKMYVKLSAKMLLIAWTLMKKKEAFDPAYLDAE

SEQ ID NO: 515128 - protein, 350 aa, unidentified
MLIIGCDYHPGFQQIAFVDTETGELGERRLIHREEAERFYGELERQNLKVRVGMEASGHSRWFEHWLRNLEFELWIGDAAEIRTKRVRKQKTDRQDAQLLLRLMMEGRFPQIWVPDAANRDMRQLLWHRHRLVQMRTRVMNQLHVVALNEGLRRKKALWRPAGRKELESIALAPWATRRRQDLLDLLDQLTPKIQELTRALEEEVEKRPVARRLRTHPGVGPLTALAFELVIGTPERFHCGKQIASYVGLVPSEESSGDRRRLGHISKQGSALLRFLLVEAAQVTVRSQSEWRSKFFHLAMRRGRKIAKVAMARKLAVHLYWMWRQGLDYGQMHKLGSHAGEPGNLDGGK

SEQ ID NO: 515129 - protein, 436 aa, unidentified
MSQVTAERQEEFAALIGIDWADREHHVCMRVVGTNTVTSRKLLQTPEDIAEWIAGLRNQFPGRQIAVAIEQSRGAVVYALMQYDFLTIFPINPVMVAKFRQAFTHSRAKDDPTDAELLVDLLLCHRDKLRAWRPDGEATRRLQILAEHRRKAVNLRSQLSNRLLSLLKVYYPQAIELCGSYLFYPVACDFLAAWPTLEAAKSARKDTIRKFYYAHNIRRPETIEQRLKLIAEAQPLTTDAAVIETHALAASMIVGQLRSLHKFLLKYDQQIAQTFRSHDDAGIFSSFPGAAEAMAPRLLAAFGSDREHFGSAAEMQKFSGVAPVTERSGQSQWVHRRWSAPKFVLQTFHEYANISIRYSIWAKALYEHLRAKGKGHHSAIRAVAFKWIRVMFRCWQDRVPYDEIAYIKTLQKRGSYLFGRIAEAQQTTPMQGATIA

SEQ ID NO: 515130 - protein, 414 aa, unidentified
MDIVHYRCAGLDISKRDAKVCVRVQEPTRARASSLVTTWSAMTNQILALREHLIEQKVTLVVMEATSDYWRPFYYVLEDGPFEIMLVNPRHVKNLPGRKTDVSDAAWLAQLGAHGLVRGSFVPPAPIRQLRDLTRARTAIVRERSREILRLEKFLEDSGIKLSSVATDITGVSGRAMLDALVAGERSPDVLADMAKRRLRAKIPELSEALTGRFNDHHAFLVKVHLNLIDEHTRAIDMLTKQIEEEMIPFRAARDLMSTIPGISTKVADVIIAETGADMSRFPTAGHLASWAGTCPGSNESAGRVKSTHTRPGNPYLKGALGTAAMSAARSHDTYYSAKYRRLAARRGPIKAVVALEHAMLVAIWNMLQTGATYNDPGDDFYTRRSPDMTKTRAINQLRNLGYTVTLEPTAEVA

SEQ ID NO: 515131 - protein, 535 aa, unidentified
MLIAYSCVPLQLPMPNRAIDWRIQGKSVPQLAGADSRHVTRGVALTKSKHRLSDNRHRHEPFDPRPNPCFHNRHHRPAAFAQERWPFLDPGQRPIRSEFQKHMQQGDQSLAVGVQKPKFRPEERQSRTEEVLLYVLFLNLYENDCGLWSLWAKGCAVGNAQRFPRQASRFAAGELSKSNLNLSCGSLKYSGASQPVPTERRAVSHCDSCLGRLRFLQGVPRGEIITETFVGIDVSKGTLDLCIEPAGETMHVDYDDKGISRVVKRLVELAPALIVMEATGGLETRLATELAANSLPVAIINPRQARDFAKATGQLAKTDRVDAATLATFARAIRPAVRSIKDADTRDLDDLVTRRRQLVDMRVQETLRLGTASKIQKKSLAAHITWLDKRITDLDDDLTKRLRASDVWKTKDDLLRGIPGVGAVTSLTMLAKCPELGQLNRREIAALAGVAPLAKDSGKHRGKRFVWGGRADVRAVLYMATVSAMRFNSSIKVFAERLRQAGKPGKVVIVACMRKLLTIMNAMIKNNSPWNPKNA

SEQ ID NO: 515132 - protein, 364 aa, unidentified
MKETVRFLGLDVHAETIAVAIAEPDGEVRSLGTIANRAESIRKLVKKLGPAERLKACYEAGPTGYVLYWHLAELGVFCEVIAPTLMPTKPGDRVKTDRRDAERLARSYRSGDLTPVWVPDEGSEALRDLVRARHRLSKFLLRTGQRPATGVKSWTLAYMSWVKQIRYTQAARESTRQDYLHEVEHMAERVMRLEQAITEAVKQASPEIQQVVRGLQAMRGIAQISAVTIAAELGNISRFESARQLMGYSGTVPSENSSGQRTRRGSITKTGNAHLRRIAVEAAWSYRLRPCVGPALRKRQEGVSEEIKEIAWKAQHRLHKRTMRLAAAGKDQRKIVIAVGRELLGFIWAIGVKAETASRQQRAA

SEQ ID NO: 515133 - protein, 391 aa, unidentified
MSMYFIGIDISKYKHDCCIISAANQKVVSKVIIKNNKAGFNELLTIIHSLANPADIRIGFESTAHYALNLELFLENSLLTFMEVNPVLISEYKKSKTLRRTKTNSVDCESIARWLMTVEYKPHSKGFYHAYSLKSLTRLRDKLIRQRSFYLVKITNVLDHTFPEFKPFFNERLSKTALYLLENYGSAEKMARMNSASYEKLRSVSRGKFSPQQFLRLKELAVNTVSVNNSIFDVELNSLLSLYKSLVKEIDTIKKEINQLIEEVHPHYMSVPGIGPLSAAVIYSEYGDISNFTNPGQMLAFAGIEPGINESGTESHGGKMVKRGSSQLRYTLINCCLPLIRFDMTFATYYAKKRGEGKPHRVAITHVAKKLIRVIYALESQDIDFNAQELR

SEQ ID NO: 515134 - protein, 312 aa, unidentified
MDAQEETILPVKNFDNNSQGCLKLLAEIPHPAETQVILESTGVYGKLFVKTLAATRLDLFEVNPHEIKQLSCSMVQTKTDQADAARIAQVGKLLAESQPKTLEKYRAQYNPHRENLALWVSEYKRLSDASARLKQQVKQLAFHTASQVQVILQRRQQELEQILQQLKTTKKEIEALLQEQADSPAQCLLSIPGVGTLTTAMALVSIQNIERFASADSLKAYWGVYPRRRQSGKYEARSRMANHGNKLMRHMLWNAAKSAARHNPICRELFERMIAKGKSAPAAYGAVVRKLVQIIYGVLKSLTTFNPEPKIT

SEQ ID NO: 515135 - protein, 337 aa, unidentified
MKFYCGIDLSARDCHVCVIDEQLQILVQQKLRNELPKIVQLLEPYKANLKIVVESTFNWYWLIDGLQAAGFDVVLAHTLGLYLITGAKVKTDRRDAYSLAKLLLVGAVPAAYIYPVETRPVRDLLRRRARLVQVRAGEYGSLRRLLLRQGILSSKQQEIKTATEAELEQWFTHPLVRLHASQELQRIELYSEQIAELEKSILGLAKTERSYELLLKLPGVGQTIALTILYEVGELTRFTNVKVFSSYCRVVPGIAQSGNVSRRGRASKQGNHYLKAAFSQAAVHAVRCYPKVRRYYERQLKRKLRVSLKRSRSVRKKNKTRSITTRLNGWLQAATTS

SEQ ID NO: 515136 - protein, 376 aa, unidentified
MLYTKNIHPGDKTKRDFSLYFLFHFIKIGMKKVIKQVLGIDVAQKELVVCMGRMHDDFRPELYAHHAFTNNSKGFALLIKWVEKITDLAIPVLYVMEATGVYHESFAYFLRDQNLNVSIVLPNKISSYAKSLDIKTVTDKTASEAIAQFGLERCLIHWEKPLPLYKKMKQLTRERNQVVCDRTIAKNQLHAENAEAEPNKSSIKRINKRIDLLDKQVIEISEEVTALVKTDLEVAGKVKILTSITGVGVLTAITVLAETNGFALIKNKRQLTSYAGLDVKEKQSGTSVKGKPRISKQGNKFLRKAMHMPALTAIGRDDRFKALFARLVSKHGIKMKAVVAVQRKLLEMMYTVFITNTAYDKEYLQKQAKEQAKEAA

SEQ ID NO: 515137 - protein, 347 aa, unidentified
MSTNGQAVLGIDTHKHTHVAVVLDGLGRHLGMLQFPASDAGAAQLLAWCRAHGAPTTAGVEGTGSYGYQLTRCLQAAGMTVAEVNRPDRANRRRKGKSDPVDAEAAGRAVLAGQATAVPKNREGAVEALRALTIARNSAVKATTTASNQIKALLVGAEQDLRDAMQVKSLLQLATRCSQLLAVSGLHAALASLGRRWLQLHDEVIQLDRLIRDLIRRTAPKLIQRPGIGIHSAAQLLITAGGNPERLHSDAAFAALCGASPVQASSGQRQRHRLSRGGDRAANCALWTIANNRMIHDARTREFAKKRSQHGDSRNDTLRVLKRYIARETFALIREALRGEQPITKAA

SEQ ID NO: 515138 - protein, 409 aa, unidentified
MMNPLFVGIDVGSRNNVAYLMKPDGSKHSSFSVQNNLGGAKLLSERIVSALGSMQLSDVVIGLEATSIYGDSLVYALREDGRLGQFQRKIHVLNPKQVRKFKEAYPDLPKNDWVDAFVIADHLRFGRIAREVYMDDYRYKALQTLTRARFEVIQNLTREKQRFANYLFLKCSGMAQDKDIVNSSSTTIALMERFETVDDLANSDLEELTAFVTETGRGRFADPAATAKAVRAAAKGSYRLPKTVNDTVNQAMSVSIASMRALKEQVKVLDKAIEQQFEIIPNTLTSIPGIGKVYSAGIIAEIGDIHRFDSQASVAKFAGLVWHKNQSGEFEAEHSRMIKSGNRYLRYYLLEAANSVRRCDSEFRRYYDLKFKEVNKYQHKRALALTARKLVRLVFRLLKDNRLYIPPES

SEQ ID NO: 515139 - protein, 338 aa, unidentified
MVAGDTAALLAFVATQRAWARARTGAPIEVVSCFEAGRDGFWLHRLLLANDIINHVVEPTSILVNRRARRAKTDRLDAQGLLRVLAARHQGDHHVCSVLRVPTPAEEDAKRPHREREHLVRERVRIENRIEALLVTQGIRKRPSLRSWDADLAALRTADGRELPPCLRAELDRLKRRLALARDLIRELETERASAFEAAPQDETGLKIEALSRIRGVGDNFAAVLTREVFYRRFDNRRQLASYVGIAPMPHQSGTMDRDRGIGRAGNPRARTALIQLAWLWLRYQPESALARWFRERVGVLAGRTRRIAIVAMARKLLVALWRYAETGVVPEGVAFKA

SEQ ID NO: 515140 - protein, 307 aa, unidentified
MFVGIDVSKDRLDVHVRPSGEVFAVSRDSDGLEDIVTRLQTLAPRLIVVEATGGFETVVASAIGAAGLPLAVVNPRQIRAFATACGQWAKTDRLDAQVIAHFAEAVQPEARAIPDESARALGELVTRRRQIIGMMVAERNRRRQLTQPRLLKTVDRILATLQEQLSAIEQEIDGAIRGTPAWREKEELLTSAPAIGPKIARILIADLPELGALTRRKIAALAGTAPFSRESGQWRGRRSIAGGRGSVRAALYMAVLVSIRRKLPLAATYNRLRAAGKPAKVAIVAAMRKLLVILNAMLRDKQTWHAA

SEQ ID NO: 515141 - protein, 416 aa, unidentified
MEQIFMIKENYIYVGIDLHKETHTAVMIDCYNQKLGEITFPNRPADFPKLVAKVKKCNTDGKTIVFGLENAYGYGRALAVWLIDKGYLVKDVNTAISHRQAKHRGAMYRKSDSDDAEAIALATLNMLDKLPDAYPNDAYWSLGQLVHRRDNIMKQRTRLVNQLHEQLCIAYPSYKQFFNDISRPTALYFWEHYPSRKYLKGKSVEDLRKELVPVSHNRCSTKNCEKILDAVASDKVKNNAHQDARDMVTLSIVSDLQHYDSQLTEVDKMLEQMYKMLGCTLTTIPGVNVITAVKVLAEIGDIKRFSNANKLAQFAGIASLHLSSSGKGKDVATKQGNRRLQATIYFLAIQMVQLSSKGTPRNPVVRAYYEKRKAEGKTSQQALICISRRLISIIYGMLKNGTEYRMPVVENAGENR

SEQ ID NO: 515142 - protein, 351 aa, unidentified
MYLIGVDYHPSFQTIAFLSEETGEYGEQELNHSDGQADRFYRDLKQRGIHVRVGMEATGYSRWFERLLAELGFELWIGDPAEIKAKRVKKQKFDREDARLLLRLLRENNFPQIWVPDPENRDLRQLLWHRHRLVQMRTRIKNQLHALAMNEGYRWKKKLFSKQGRAQFEKLALGPWASRRRQELLELLDRMNPTIEELTAAVELEARKRPEAMLLITHPGVGAITALAYVLIIGTPTRFQRGKQIGTYVGMIPCEDSSARKQRLGHISKQGSSLLRFLLIEAAQAASRIQPDWRRRYIHLAMRRHKSIAKVAMGRRLAVRLYWMWRNSCEYSPSFEFGSYAGQLGTRNGVK

SEQ ID NO: 515143 - protein, 372 aa, unidentified
MPDVSSKAPVDVRLWVALDVHKFSIVAAILPPVGGSPEVQRIETTEKAIRRFIGRLGGPEGLAVAYEAGPGGFDLLRLLARIGVACDVIAPSLVPVRAGDRVKTDRRDAKKLVRLLRAGELVFVAPPSPETEGLRDLLRCRDDLRCARTAARHRVAKALLRHGRIFREAKTTWTARHRAWIARQRLDDVLAHAALEQMLIHLDGIDRQLDALDAQLDQLAASDRWRAQVQTLSAFRGIRTLTALGLIAEIGDFARFAHPRELASWLGITPSEYSSGDSQHRGHITKAGNRHARRLLVEAAWHYRHAPRLPAGGPPPSERAWQAQIRLHHRYRHLSTHGKRPTVINVAIARELVAFLWAAMTDQPPREMTAAA

SEQ ID NO: 515144 - protein, 355 aa, unidentified
MNDTKFIGLDVHKTSVSAAVLDQDGKLVMQSVFATHAAAILSFIHGLRGTLRVTFEEGTHSTWLYDLLHSQVAEVLVCNPRKNALLKSGNKSDQIDARKLADLLRGGMLSAVYHGQTSTLTVKELGRTYTTLTQDTTRVMGRLKALYRSQAIATEGKKLYTRRRREPWLALLTQAGQRYRAERMFEQLDALQGLRRQARRDLMIECRKHTATSLLTSVPFLGPIRAALLLARVQTPFRFRGKRQFWSYCGLALETRSSADYNFVAGELRRSKKPVLIRGLNQNHNHDLKNIFKAAATTASAFPGPFREFYENLLGKGMKPEMARLTLARKIAAISLILWKKGERFDPEQLKPQAA

SEQ ID NO: 515145 - protein, 353 aa, unidentified
MDLAKRVIQVHAVDAAGHVLCSRALARDKFIAWCAQLPADCIVAMETSSSAHHWARKLIALGLDARIVAAQLVSPYRKQGASGKNDANDAAAICEAASRPQMHFVPVKSIEQQSMLCVHRLREGLKADRTACINRLRGLLAEFGLVFAQSPAVLEAVLTDVLEDASNEMNTLARLVLQRLQDQWREIDAHIAWCDERIAAHGKDNGAVKTAGTLLGIGPVTASAVVATVGEFKQFSSGAQFGAWIGLVPRQHSSGGKNSLGGITKRGDTYLRSLLIQGAKSAVMTAHKRSDPISKWAAALRDRAGWQKAVVALANKNARILWAVMTKGDAFDARYISVKPGAPMGASPATATA

SEQ ID NO: 515146 - protein, 406 aa, unidentified
MAEETIGWFAAVDWGSEKHQACVLDARGGVAGEREFPHSGAGLTELADWVRSITGEASVVAIAVEVPHGPVVDVLLDRGFIVHSINPKQLDRLRDRFSVAGAKDDRRDAYVAASGLRTDRHLFRRVQAADPHIAELREWSRLAEERKQERVRLGNRLHHQIWRYYPQLLELTDDVAADWFLDLWTIAPTPAKGEHLRKVAVEQLLKRYRIRRIDAETVLRNLRQPAIKVAEGVAAAASVHIRSLIVRLHLVNRELRDAERKLDELCAAFEGGKQDDVAILRSLPGIGRINLATLLAEASEPLSRRDYPALRTLSGVAPVTKRSGKSHIVIMRYAAHARLRNALDHWALAAVRHDPKSRCRYTALRQRGHSHGRAIRGVADRLLHVACALLQRQTPFDPEHDQAAAA

SEQ ID NO: 515147 - protein, 403 aa, unidentified
MEVLYKRCCGIDIHKNMLVACVFMSIRKKEIRQFGTMTDDILQLTGWLKEVDCEMVAMESTGSYWKPVYNIFEEEQVPIIVVNAQHIKGVPGRKTDVKDAEWIADLVRHGLVKASFIPNREQRELREITRYRQELIEERSRELNRIQTVLEGCNLKLGSVITDISGKSGIAILKAIVSGETNPVILSQLAQGKARSKSSELQRALRGSIHQHQRLMLNHQLEHIETLTKIIEDIDADIEKKTKSMNKQLQLLDEIPGIGKKSAERLLAEIGIEMDQFKDQSQFSSWAGLVPECKESAGKKMSTRIRKGNKHVKSVLVECARSAIRNKKSYFYSRYQRIAARRGGKRALIAVAHSMLIAVYHILKELQPYKELGYDYYDTCNHEKIIQRNIRSLERLGVNVVIG

SEQ ID NO: 515148 - protein, 348 aa, unidentified
MIIIGVDFHPEFQQIASVDTDTGEFQEKRLAHRDEAENFYRALAGHKVRLGMEASGHAGWFERLVAELQFELWIGDAAEIRTRRVRKQKTDRQDAQLILRLLVEDRFPKIWVPSWENRDLRQLLWHRHRMVQARTRIMNQLQAVALNEGLRCKKRLWREPGRQQLESFRLAPWASRRRRDLLELMDRLNPTIAELSQAIEREVENCPEAKRLMTHPGVGALTALAFVLIIGKADRFGCGKQVASYLGLVPLEDSSGNRRRLGHITKQGSSMMRFLLVEAAQVTVRSVPEWRSKYLHLMMRRGRKIAKVAMARKLAVRLYWMMGQGWDYQQWSKFGSHAGQPGNRHGVQ

SEQ ID NO: 515149 - protein, 425 aa, unidentified
MVNAIVGIDLADRKQMVVVCDHDSRVLARRTFRCKAWDLAAALDWASDRAARAGFAGLTVACEPTGHRWRVLGQLASDRGLPFVCVQPAASAYARRTEDLTSDKTDDKDAVLIARLTAQLRCYLPEPVDPTWGRLRHLGARREQLLESHTRCVQQIRDLLECVWPAALEAAAQPFKSTTWVAALTVIVARDDGNLARTRRLGLDRFTRLVRAEVTRRGKAKPCLRIVRKVFAAVTATAGVVEHRQAALERVGWILTDWERARTDQMVVENRMVAVLGQLGLTDLACSIDGLSPVGAASILAETGDLRRFTSARAVVKLAGLAPRERMSGTFAGKTRLSGAGRPRLRVAAWRAVWGCLQNNRVYAARYRHLTSREVNRLKPTQAQTVVAAAILRQLYAVVATGQAWDPDIAAHGTRRLPVAGVVAA

SEQ ID NO: 515150 - protein, 364 aa, unidentified
MTTVHCVGMDVDKEKIVLARVGGGRDTLAVQHVIAHTPAAVKKYFTALTANAEVQAAYEAGCFGFGLYRQLVSLGVAVTVAAPGLIPRKPSDRIKTDRRDALSLALALRAGQLTAIHVPTEQDESVRDYLRMYDALRGDLRICKQRVLQFLLRHGIHYQGGGPWTVKHKHWLANIEFALPRDRQTLDMYLSQMQELQGRCAEAAAEVESIAAQDCYGPQTRKLTAFKGIKTLTALSFITDIGDFRRFDTARQFMAFLGLVPSERSSGNKRRQGGITKAGNSHLRRLLVEAAWHYRSYHPCSRDLTERRRGVPTPLVSYANRAGRRLNRKYMHMVLRGKRSQLAVIAVSRELAGFLWGAMTDRVA

SEQ ID NO: 515151 - protein, 386 aa, unidentified
MHHPTTLPVSEQTCSREDCATLFVSLELSRSTWVATSLALGSRKMSKHTLVGGDARKLLDLLARLKSRAEQRIAAPVKVVAIQEAGLDGFWIHRVLEANGVESHVVDPASIAVPRRHRRAKTDAIDGETLLRTLMAWQRGEPRVCAMTVPPTPSEEDRRRVSRERATLLRERIRHTNRIRGLLFGQGITNYNPLHKNRREGLEKLRTGDGQPVPVHLKAEILREIDRLELVLRHINEVEAERDEMLRPGQASSPIALLMRLKGIGPEFAAVLYLEGLFRHFENRRQLAAYAGLAPSPWKSGSVDHEQGISKAGNPRLRTTMVELAWMWVRYQPASALSCWFRQRVGSERGRIRRISIVALARKLLIALSRYINHGEIPAGAVVKPV

SEQ ID NO: 515152 - protein, 534 aa, unidentified
MLIHPTVDRLRALGLAAMADTCVELQNNPEAAEMPHADWLGLLVDREVTARDNRRLTRRLTGAKLRQAATIENVDYRTARGLDRSLFQNLVTCQWIRDSNHLVIVGPTGTGKSWLACALGNKACRDGFSVLYKRTSRLFADLAQARGEGRLARLIAALERVNLLILDGVDGLTQRHHSAKAWSPERHKEGRPSEMKFIRIGVDLAKNYFQIHALSSEDAPAVKRKLTRRTMREFFLKIEPCRIGMEACGSAHYWARELKAMGHDVSLMPPAYTKPYVKRGKNDAVDAEAICEAVSRPAMRFVPIKSADQQATLMLHKTRELLVKQRTMSVNALRGHLAEFGLVVAKGSGRVDELLGLAEGDATLPDAAVLAAKVLGQQIDALGSALDDLESEIAKAHALSETSRSLEEIPGVGKLVASVIAASVPDPSVFHSGRDFAAWLGLTPRQISSGGKPTLGTITKAGNRYIRKLLVLGATSLLNVVEKRRGGLRDWIVGLLAKKPARLVTVALANKLARIIWAMMKTGECFRTEMFAKP

SEQ ID NO: 515153 - protein, 320 aa, unidentified
MTYIGIDVSKDSFVAAYPTKSGYTTKTFPNTTTGVRKFVNSLPADCHCVMEATGNYSMLLLYLLQQANIIVSMENPQKIKHFARAMLSTTKTDEIDAKLIATYGEKMTPAPYKIPTESIILLKQKRTVLRQLKKQLTATINLQQSLAVLPKQDPASKVAIEQTVKFLRKQISKMEEEITNLSTKEFGRQVKLLTSIKGISVTIASALILATGGFTYFSNAKQISRFLGLCPTYQQSGTSVNFKGHINRNGDTHLRSQMYVAAFASIRCNAACRETYERLRARGKSGKLAVVAVANKLIRQAFAVVTNNQPYIDGFVSSYA

SEQ ID NO: 515154 - protein, 413 aa, unidentified
MADETIHWFAGVDWGSAKHQVCLLDRAGNVVGEREFAHGGAGLTALCEWVVSMAGDPGTVAVAIEVPHGPVVDAVLDRGFAVYAINPKQLDRLRDRISVAGAKDDRRDARVAAAGLRTDRPLFRRVLAGDPSVVELREWSRLAEELQQERVRLGHRVRQQLWRYYPQLLALSDDVTAEWVLALWTLAPTPAQAARLREATLARLLRQHRIRKLDAPAVRGILRQPAITVAPGVTEAAVLHLRSLVARLRLANQEFHQAARKLEALCTALSQTQPGAQDSGPRDAAILSSLPGVGPVTLAALLTEAAGPISRRDYTALRTLSGVAPVTKRSGKSCIVIMRYAAQLRLRNAVFHWARVAVLNDPKCRSRYAALRARGHSYGRALRSVADRLLGIACVLLQRQVLFNPNHGAPTQP

SEQ ID NO: 515155 - protein, 351 aa, unidentified
MPRSKSKEPIATIGIDIGKNTFHLIGLDRRGSIVMQTKLSRTQLGRKLVNVPPCLIGMEACSGAHFIGRMLEGFGHNVRLIPAQYVKPFLKGHKNDYRDAEAIAEAVQRPTMRFVRIKTPEQMDLLALHRVRSRLVSQRTGVINQIRGFLIERGITAAKGPRALRKVLPDILASCDDVLSAMIARLIEELSEDWRRLDIWIDDLTEEIELLANEDACCQRLMTVPGIGPTIASAIVSAVGNASGFASGRDLSAWLGLVPRQMSTGDRTILGRISKRGNRYVRTLLVQAAHIILVRRPRTAREGLWPWIEAASKRLHRNILVIALANKLARIAWAVLARGQNYQSKALNHAG

SEQ ID NO: 515156 - protein, 370 aa, unidentified
MSQSSTLFIGMDVHKDSIAVAYVAQDHGAEVASLGTIGTRQCDIDQLIRKMQSKAKHLIFIYEAGPCGYWLYRYLRQKDYDCWVVAPSLIPKKAGDRVKTDRRDAVQLARLARSGDLTAVYVPKVEDEAIRDLTRAREDTLSDRKDAKFRLKAFLLRHDIRYTGRANWSPAHLRWLSEVICPTPAQQIVFQEYVRAVNEHTERLQRLEQELQDHVQAWRLHPVVEALQALRGVQFTVAVTMVAEIGDLTRFDTPRELMKFLGLVPSEYSSGERRQQGSITKAGNTHARRALVEGAWAYRYPAKVSRHLQLRLEKQPKIIQDISWKAQVRLCKRSRRLVARGKHANVVTVAIARELVGFMWAIAKEIPVKP

SEQ ID NO: 515157 - protein, 403 aa, unidentified
MYYVGIDIAKRNHEASVIDSTGKPLSGSISFSNSKEGCNKLIALFEKLGVDVDNSIIGMEATGHYWLSLYSHLLEHGYDLKVINPIQSDAFRKMSIRKTKTDSKDSLNIAQIMRFGEYSSTRLSDENVQAMKLLTRYRFSIVAECASCKCKVIALLDQVFPEYERLFSDTFGSASKELLLNYQTPEDLLEISSAKLASLLTKASKGKFKMAKAEQIRDAAAYSFGVSFAKKAFSFQIRQLIEQINFIEKQLDELDKEISSLLAQTNSVITTITGVGPVLGAAIIGEIGDIARFDSPRKLVAFAGLDASVSQSGEFIGTQGKLSKRGSPHLRRAIWMAASRACFCDSTLSDYYKSLRARGKHHLTAVSAVARKMCNIIFTILKENRPYESIPPKKTTVCEVQSD

SEQ ID NO: 515158 - protein, 391 aa, unidentified
MSVYFVGIDISKYKHDCCILSAATQTVVTKFTIQNDKSGFEQLITTLQSLSIPEDIRIGFESTAHYALNLELFLENAHHSFMEINPVLIKEYKKSTSLRRTKTDSVDCESIARWLMTVEYKPHSKGFYHAYSLKSLTRLRDRLVRQRSFYLVKITNVLDHTFPEFKPFFHERLSKTALYLLENYGSAEKMARMNSASYEKLRSLSRGKFSPQQFLRLKELAANTVGVNNSIFDVELNSLLSLYKSLVKEIDTLEAEINKLIEEVHPHYMSIPGIGPISAAVIYSEYGDISNFSTPAQMLAFAGIEPGINESGTESHGGRMVKHGSSQLRYVLINCCLPLIRFDMTFASYYAKKRAEGKPHRVAITHVAKKLVRVIYALERQGTDFNAQKIR

SEQ ID NO: 515159 - protein, 354 aa, unidentified
MNVSHYIGLDVHKKSVSYCVKTADGRIVEEGKLRATHQTLQQWAQQRTEPWHGAMEATLFSGWIYDTLKPYAAELQVGHPALMKAIGASKKKNDKLDARKIADLVRCQLLPACYVAPVEIRELRRLLRYRNLVVQQATRMKNKMSGLLMEVGAEYNKQQLHGKKYFTDLLDSVEEVPESVKDLLRLSRGALEMFETVQRQLLDRLQHEALLAQRVKLLRSIHGVGEVTALTWALEVGDPRRLGSVARAVSYCGLTSALVSSADKQQRGPLSKQRNAHLQTVLVEAAKIAPRWNPQLKAVHERELQRGNRNRATLAVARKLVAYLLAVDKSGQPFQIRSVAAAETETETETEKAA

SEQ ID NO: 515160 - protein, 397 aa, unidentified
MSYDVVIGLDVGKAAHHACALAPDGRRLLDREVENTEAALRAVFASMADQGRVLVVVDQLHSIGALPVTLAQTMGLEVAYLPGLSMRRLADLHPGNAKTDARDAYVIAHAVLTVPHTLRKLDVPSEAQADLAMLLGYDDDLAAQVTSAVNRLRGLLVQIHPSLEKALAENVSHEAVLRLLIKTGGPDGLRRLGRARIDKELAKHAPRIHARLADEIWAGLNAQTVVVPGTAAAAKVLPGLAAQILQLRDQRREIAKDVEKVLDDHPLAGILTSMPGVGVKIAARLLAEIGGDVSAFPTAAHLAAYAGLAPVTKRSGTSIRGEHVNRGGNKRLKNALFMAAFTSLRADPASRAYYDRKRAEGKKHNAALICLARRKTDVLFAMIRNHQPYTPAQPTAA

SEQ ID NO: 515161 - protein, 322 aa, unidentified
MSLPNPVCVGIDVSKATLDVAIGTGAPPFTVSNDLDGFDAIIAVLRKHNVSLVLMEATGGLEVAIACSLQSEGGDVAVVNPRQARDFARAMGYLAKTDRIDARMLSQLAEVIDRHTERERFVRALPDAQRQVLSAMVVRRRQLVTMLVAERNRLQQAHPMSRKSIQTIIDVLEKELQRIERNMDKHIQTHFKALSEQLQSVKGVGAATSATLLAEVPELGHLSRREISALVGVAPLNRDSGKMRGRRTIFGGRASVRTALYMATLVAVRYNPVLRDFYQRLVGAGKPKKVALVASMRKLLTILNAMLKTGSAWDNSYHSATC

SEQ ID NO: 515162 - protein, 416 aa, unidentified
MTYRIAAIDIHKKVLMVVVATAAAEVADAAGEALEFTCRQFGTGALERQHLVSWLQRQGVTEIVMESTAQYWKPIWLELEPHFQKLHLAQAQSNRAPRGRKHDFKDAKRLARRLLAGELSLSYVPEPEQRLWRIMTRGKQQLVRERIRIRNRMEALLEEMQIKLDSVISDLLGVSGRRILKALSEGETDPNRLAQLGDERLKCSQEELADALRGHPTPTHISMLKLYWEHVELMDRQIADLDRLVAQALKPYEEAVQRLAEVSGFGVDSAQQLIAEVGVLADAFPSAGQFSSWVGTCPGSNVTAEENHSSRSPKGNKFARRLLNQAANAAIKKKGSHFQNIFRRFVGKLGYQGAVWVVAHRLTRLVWLILNRQVRFVEQGEETNPKAKLRRAQKLARGLRRLGYQVSLTPIQPAHA

SEQ ID NO: 515163 - protein, 418 aa, unidentified
MNGERKARGKRRYVALDIHKHYCVIAAVDKDGQVVLHAVRVEHQDLEAWAKKNLQDSDHVVIESTTNAWHVYDLLSPLVEQMVVANSFKVKQIANARVKTDVRDTLILARLLAANLVPTVWVPPAHVRELRQLLAQRREMVQTHTQIVNRMHSVAHRHHLKHERGKRFNEKNTGWQTDKQLSKMEQFQLKLEMENRAYLEKQIERIGKEVAKLSHQKPWAESMTYLMQLSGFGVITAMTVLAAIGEIKRFETAQHLASYSGLVPGLEQSGTKKRGKGITKEGRKELRWALVEVAQRAVKSDPYWKKRFEAMQKRMHRNQAIVAIARQILEVVWNLLSRRLPYRHFSVERIAYKYLTWGWQMDEEARGGLTRQQFTRYYLMRLGIGQDLTRIALDPKHPRRIASEAEVLALHPELHRIE

SEQ ID NO: 515164 - protein, 339 aa, unidentified
MKRYLGVDLHRNCFTVCTLGEDGKSELKKWSIHSLGEFAQEVQATDAVAVEATGNARYFCQALKERGCRLVVVNPHQFQVISRSVKKTDARDAKTIAEFLAKDMLPEVRLKEDLPAEMASLLQTRDKLVKLRTTLKNKINNLLAARGILIRRESLASDKGLEQVLRTPVTDLARVELMVLVEQIRHLNQGIAKLEAAIKEQGPKLPGYENLKSIKGIGDIGGSTLLSAIGNINDFADEGKLAAYFGIVPRVANSNETERSGRITKRGNKMGRTVLIQCALIATRYSPYLAKYYARLKAARGTGKAIIALARKFLGIIYKTLKNGWVFEDFPGFVIATSG

SEQ ID NO: 515165 - protein, 354 aa, unidentified
MNTTQVFEKRKIAVAIGIDLAKDHCDVVAYNADNKICFTKANWAYPHLMEWLANAQPAVVLMESCKGCHVRARDIADLGHDTRLVKGADVKALRNVCQKNDIRDADYIARLLYVPGTKFVFVKNQRQQSLQFLQNEYKSIQELRIQVGNQIHAGLEEFGCPGPKSKKFIQSRMMAHLEKNAEPISDEVMSSFLRRREMWLNLFEQEEEAKKRMEEIAKTDDDAQRIMTVPGVGAQTAVGMLVHIGGDIGRFKNSGQFAASIGLVPKQNSTGGNTTLNGITKCGPKRLRANLVQCGQVILMHADKLKGNFGDWVRKLRDSGKKRGVIVCAIAAKIARIVYRLMKDKVDYTPVPSR

SEQ ID NO: 515166 - protein, 481 aa, unidentified
MKPRPAEKDKEVIADLSCGHWNQMNRQQRRHMMRKMQSDDLSLEVVHPDAAGIDIGNESHYVAVPPTRDSQPVRRFGCTTAELKAMADWLKQCGIQTVAMQSTGVYWIAVYDILEAAGLDVYLVNARDTKNLPGRKSDVQESQWLMKHTYGLLRNSFRPSQEIRTMRTYWRQRNDLVQSASRHIHRIQKALTQMNLQLANVLSDVSGLTGQAIINAILAGERNPYKLAAFRDPRVQASEEQIARSLEGNGQEDLLFVLKQEQDGYEFCQKQMAECDRQLEQYFQRREDRSQGASLPEEKRKTRLKKKNGNKPQFGLRADLFRMTGTDLTQIDSIDVVTASTIVSEVGWDMSKWETEDHFVSWLRLCPDNRISGNKIIGKGRLPTNNRVSIALRMAASTLRVSNTYVGAQFRRFRAKLDARVAVKAMAAKLARLVYRMMRYGMKYVDQGAKFYETQHRNLQLKHLKWRAAKLGYQLVQAPST

SEQ ID NO: 515167 - protein, 347 aa, unidentified
MNITTIGIDLAKDKFQVHGVDQKGKTVLRKQIRRGDMAKFFVNLPPCLIGMEACGSAHYWARKLSEYGHTTKLMAPQFVKPYVKTNKNDAADAEAICEAVARPSMRFVPVKNGEQQAILSLHRARQGFVKARTAQANQMRGLLAEFGIIISKGIHSITKKIPLILEDAENDLPGVMRDLLVRLNDHFKDLDQQVDELERQIKLSHKDSDLSRKLEAIPGIGPITASAIVATVGNAREFKNGRQLAAWMGLVPKQHSSGGKQNLLGISKRGDVYLRTLLIHGARSVIRFAENKAVPDVWLCKLIGRRNKNVAAVALANKNARIIWALLTDDAATFRPNYVRENYAAEA

SEQ ID NO: 515168 - protein, 399 aa, unidentified
MLLDHPSAGPTAIQTQLSAIFVSLELSRSKWIVTSLSPGKGEKMSRHSLQGGDLAGLLALFAELKRRARERTGSDYPIVTIQEAGLDGFWIHRALQQEGIQSHVVDAASIATSRRRRRAKTDKIDGEALLRALLAFTRGEPRVCAMVTAPSPEEEDRRRLCRERQTLLDERIVHTNRIKGLLFAQGISDYAPQRRDRRKRLEGLQTGDGRPLPPRLKAQISRELDRLELLLIQIKAVEAAQEAMLAAECKMAIEAEPRQAEREGEQPRNVVAMLLAVKGIGTHAAAILWSEGLSRPFSNRRQVAAYAGLAATPWRSGAIVHEQGLSKAGNPRLRTLMVQIAWLWLRHQPQSELAKWFKARGERGRKGSIVALARKLLVALWKYVTHGVVIEGAVIKTAA

SEQ ID NO: 515169 - protein, 370 aa, unidentified
MESIYYIGLDVHKKSIAYCIKTVTGQIVCQGMVKAERRSLRKWLMDLPGSWVGAMEATMFTGWIYDFLKPYAVELKVAHPAMLKAITAAKKKNDRADAEKLADLLRVNLLPECTMMSEELRELRRILRYRNLIVRTASKMKNKISGLLMEVGAVYDKRKLHGKRYFGQLLERVEDVPESVKDLLKLSRSSMELFEAVQKKLLKTLREDSLISKRVELLRSISGVGEVMALTWVLEIGDPKRFSNSGQAISYCGLCSAQHESAGKEHRGPISKKRNKYLQSMLIEAANLAPYWNPQLGILYEKELTRGNRNRATLAVARKLVIYMLAVDRRGKPFMTENVVISSESGLNGSRQLSPFRPHLQYLKEQKVFR

SEQ ID NO: 515170 - protein, 353 aa, unidentified
MMVIGIDPHKQSHTAVAAGELGRKKAQKTVRARRDGHRELIAWAREIAPAGRLWAVEDVRHVAGGLIRELLAAGEQVVFVPPKLMAGERRGGRERGKSDPIDALAIARLALREGAGLPAARLDEQVLEVRRLTDYRDDLVAERTRFVNRLRWLVHDLDPELAPPPRSLGSGRARARLEAGLRALPAGAGRAVALSQLARVTALSAEITGLEKDLAGLVTVLVPELLAIPGVAVITAAKIIGEAGDIRRFRSPAAFARHNGTAPVPASSGTGTGGPQRLNRGGNRQLNAALHRIAVVQARCHPGAAALLERRGQDKHETRKASLRILKRHLSDVIYRALNADAWRLDQPAPHAA

SEQ ID NO: 515171 - protein, 333 aa, unidentified
MYYMGLDIHKKNTQACVKDESGKVLVNERFPSETREINAFLDRLGAAEARVVMEATGFYQYIYEAIEARGYEVVLAHPLKLKALTVGRAKTDENDAEMLAELLRINAVPVSYVPPKETRELRNLTRHRSSLIAESTTLKNKIHAELAWRGVKPPAEARSAFSKRFVRWLRTLRIEAVDDHLDILEVVQEKVKKADGRIKDEATKDADIRLMETIPGVGHVVATVIKAEVGDLGRFRSPDTLASYAGLAPAVRQSGEMKDHMGGMSKQGNPRLRHVLTEAVRAHVMFCEDSRLTAFYLRKKEEKGSKKAAVATAKKMLEAIYFMVLRKEEFRAH

SEQ ID NO: 515172 - protein, 365 aa, unidentified
MEHIAIDLGTRESQVCVRSEDGRILEERRIATRPEKLRRYLEGRPKSRVIVETGAEAFWVAEIARECGHEVRVVPSMLAPSLGVGRRGQKSDQRDARVLSETSCRVEMPTVHIPAVETRRLQSRLGMRDALVRSRTKLVNVTKAYLRTIGERAPIRNAERLIVQLREKLAHAAQHLEPLLETIEALNRSIEQFDEELEKLAAGNELAKRLQTAPGVGVVTSLRYIATLDVANRFRNGAAVGSYVGLVPSEHSSGQSQRKGGITKAGSPSMRGVLVQAAWAAMRSRRHHNDPMVCWARAIAQRRGKKIAVVALARKLAGILFAMWRDGTQYNALRAAASEELPTPPRRLAPSKGPRRPLRLEPATV

SEQ ID NO: 515173 - protein, 355 aa, unidentified
MKNTKKPDFSNEDFYIGIDVHKKSWQIAIQLDKNFLQSFSMDPDVQSLVKHMQKQYPNGIFHSVYEAGFSGFGIHEELIRSGFDNIVVSPGDIPITNKEKSNKNDTVDCKKLARELSNGSLKSIYIPDKYHQELRSLVRRREDLSDTQSQIKQKIKCCLMYHGIETPDELKYWSGNYINWLKARQFQYKAGSDNLSILIEELSMIKKLISTTLKSIRNECQSKPQIKKIIELLTTIPGIGIVTAVTIYTEIIDIKRFEKIDKLPSFVGLVPSISASGDKERNRGLIHRHNSHLRNLLIEAAWVAMRKDPALTYAYSQYKKRMVTQKAIIRIAKKLLFRIRHVWINETPYCLNIVE

SEQ ID NO: 515174 - protein, 312 aa, unidentified
MSLACAAGVDVGRDFLDVGIAPSGRTWRLANAPAGIEALIGRLQRAGVRRVVLESIGSYGARLVRALARAGFEVGVVDPKRIKALRLAEGRRAKTDRLDAQLIARFALIMSDAARPVPTPDAFEIRALCARRRQLVEMIAMEKTRLKQTFDAEIAASCRMIIAQLSAERARLEARLRERLTAKPQDRARLELLQTIPGVGPAVAMTLMADLPELGSLDRKTVASLAGLAPHPNQSGARDAPRHVAGGRPCVRVAFYMAALSAARADHGLRSEYLALRGAGKPAKVALIAIARKLAVAANAILKAGQPWNHPT

SEQ ID NO: 515175 - protein, 353 aa, unidentified
MDHQLLTEEVILGVDTHLDIHVGAVVSCTGKLLGTLAVATDSPGYLRLLTWACSLGKLRRAGVEGTGTYGAGLARVLRDHDIEVFEVNRPDRAKRRLQGKSDPTDAESAARSVLGGSSTAIPKEQSGAAEAMRTVSVARRSAVKAKTQAINQLRALLVSAPQEIRERLWKVKPLDCVTSCARMHSLGSTPLLQTLSATLKLLAKRWLTLTEELKKLDSMLELLTMKHARRLRHQFGVGPQTAAVLIAVAGDNPERLRSEAALAALCGASPLQASSGKTTRHRLNRGGDRSANNALWTITMVRMRSDPKTQAYVERRSAQGMSSKEIQRCLKRYIARSLYPLILADLTDSALSA

SEQ ID NO: 515176 - protein, 369 aa, unidentified
MSDVITYVGIDAHKKDLFIAMLVGPQAKPVAWTVANEPNAVRRLAKKLEREAPGPVQAFYEAGPCGYALQRQLTTPRVQCDVVAPGLIPQKPGERVKTNRRDARKLVELGRAGLLTTVRPPTPEEEAVRDLCRARDDAREDLQRCRHRLGKLLLRRGLQYRVGRQWTKAHRRWIDSLQWPHDAERVVVEDYLLAIDQHETRLKELDQQLAAVAETAPYREPVAWLRCFRGIDTLSAMLILAELHDVRRFPSPRALMAYVGLVPGENSSGEKHCRGRITRAGNALVRRLLVEAAWHYQHRPGVGVALARRRKGQPGRIIAIADKAQQRLCRRFQYLAVLNKPRPTIAVAIARELVGFLWAALQPALVVAN

SEQ ID NO: 515177 - protein, 343 aa, unidentified
MLFVGIDTHKSSLAVCVVDELGRQLAVESFANNPGAHRRLHAWVVEQAPGERRFGVESSGWLGHGLAVFLLGLGEDVRDVRGHMTQRERVRIKGHGKSDPRDAYAIARVTAREQLAPARADSPARDLKLLSDYRDQLMSERTRTQNRLHTDMVTLRPGYERKVSSLATPPKLDAAWTLLENDDSVQAGLARRKIERIREIERERREVERKIRARVRELGTGLVTLVGVSELVAARIIGEVGDIDRIPSNRHFASLNGTAPVPASSGQRLRHRLNRAGNRRMNKAIHMMALTQARMDPRARALRRPPTSRRSHPPRSHPRPQTPPLRRHLPPAPRRRRRRLVDP

SEQ ID NO: 515178 - protein, 332 aa, unidentified
MSKFKQIVGIDISKETFDCNVYNQSQTEAFINNREGFDSFRDKVLLKLRCKKEEVFIAFENTGMYSYNIAVYFEEQGYNYIMLPGLELKRTLGIVRGKSDKIDAKHIARYAYEKREVIKPGKLASATIMKIKKYLSLRDSLVKSRTGFKANFSESRKVYSRDEYGEYLEVLETQIKHFDAEILKVEQIIDELLKSDKELQKQYSLLTSIKGIGPQISLYLIAYTNGFTKFENARKFASYIGVAPFPHQSGTSIKGKMKVSQLALKKINALFEMGARSAIQYDIEMRLYYQRKVAEGKEKESVINAVKNKLTLRAFAVIKRGTPYVNIMRFAA

SEQ ID NO: 515179 - protein, 370 aa, unidentified
MKDFITFVGLDVHKESIEIVVAENFGNKEVRHYGKIGGDMASLDKAVKKLVRRGNRLQVAYEAGPCGYELYRHLTKQGYDCAVVAPSLIPRRSGNRIKNDRRDAEHLARLYRAGELTMVHVPTEDDEAMRDLLRGRQDAVKGLRTARQQLAAFLLRHGFRYGGKTSWGPAHGRWLADVKMAHPAQQITLQEYIHAVRERTERVERLTGQILLLLPQWRMAPMVNALQALRGVAPIIASTVVAEIGDMSRFESPRHLMAYMGLVPSEHSSGDTISRGGITKTGNTHARRVLVEAAQTYSYPARVSRHLLKRQEGVPLSICDIAWKAQVRLCGRFRRLLSRGKSRNTVVAAIARELTGFIWAIARQVQAPMI

SEQ ID NO: 515180 - protein, 464 aa, unidentified
MKTLSVINPNAAGIDVGSEKLFVSIAGEDPEVFGTVTDEVYRMRDFLKQRGVTTVAMEATGVYWLYAYAVLEAAGLEVIVVNGRYVRNLPGRKTDMSDCQWLATLHAHGLLRGGFVPPAAIRRLQDYQRLRADHISEAASQVQKMQQALERMNVKFHDVISDLTGVSGMKVIQAILAGERQPERLLELCDKQIQKKKSERVLESLHGVWAPEHLFALGQALSVWEFYQKLLAECDRQIEAVLKDLAGPPPASPPSSPESGEAKGKAPKPPGKNAPHIDDLHALLVRICGGRDATSLPGVADYLWLQLVAETGTDLSAWATEKHFTAWCGLAPGTRQSGKRKGSVKRQRNRAGRLFCAGARSLVQSVDKGLGGFVRRISRRKGGLVAIKALARKLAELYYRVLRYGLEYAERGLREYEQRYEESQRRLLAKLAAQHGFQLVSEQALALHAAASQAASPNLSPSDA

SEQ ID NO: 515181 - protein, 387 aa, unidentified
MPQPNDMSRSLITLEQDSTLIAVIEMGQSSWLVAGIVPGIERQPLKKLAADQDGLLQLLHRWRKEAAQAGHPIKRIAVAYEAGRDGFWLARWLRAREIEAYVIHPSSVPVSREHRRAKTDRLDTELLKRAFLGWLRGEPKHCSMAAIPTVEDEDARRPSRERESLVGECTRIVNRVKANLARLGIRGFRPRLAHAPKRLETLRTPEGTAVPANTLAELQRDMVHLRFVKQQIKEIETARAKRLEQASGGGRDAMVRLLARVVGIGIETADMLVQEVFSRKLRDRKAVARYAGLTGAPDESGQKRRERGLAKAGNARVRHAMIELAWGHLLHQKDSALAEWYQRRTVDARGGTRKTMIVALARKLLIALWRLVTTGEAPAGLLLRPAA

SEQ ID NO: 515182 - protein, 412 aa, unidentified
MKVVYPRCAGIDIHKQSMTVCLIVDRLDGSAPEYHKRKLATHTEGIRDLCAWLEQYQVTDVGMESTGVYWKPVWNALEGKWGLHLCNPQHVRVIPGSKTDMRDGTRIGELLAYGKLPESFIPPQWQRELRDLTRLRARFKQEAARAGNRILKVLEDAQIKLDCVASDPLGVTGRLILNSLVKGETDPAKLAELAVGNLKRKKKELRQALDGKFTDHHRFQIRQLLEVVKEFEDKIFELDRRIDRYLEPYEDLVRRLDRIPGVNRVGVADILAEIGPDVSHWEDSAKLASWSCLCPGSRESGGKRLSGRTRQGNRWLRRIFCQMAWAATHKKGSYFKAQYHRLARRRGKPRALLAVAHTLLTVIYHLLREPNLEYRELTEDYFEQRDAQQTAVNLIKRLGKLGYEVTLKAKPA

SEQ ID NO: 515183 - protein, 335 aa, unidentified
MNNVPLLLGLDYSEASVQLCAMDEQAKVLVNRACRNDWRELVRAVQGKGIVRRVAIEACSGAADLAEELVSRAGWHVELAHPRYVAKLKGSPDKSDYSDSRLLADLTRVGYLPRTWLPPLFVRELRQLVGYRQQLVDQRRANKLRVGALMREHRVKAPKELSRWSRAWVSFARNTPQLSEQGRWIVNQVLDQVVDLDRRITVAEQRLRTTTDGDVMTQKLMHQPGVGEVTAWVIRAFIGRFDRFHSGKQLSRYCGLSPKNASSGGREADGGLIKSSNKILRATLVQAAHRLIRTCPRWSGLAESLRRRGKPACVTVAAVGNRWMRRMLHEMKAMS

SEQ ID NO: 515184 - protein, 346 aa, unidentified
MKQISTIGLDLAKNVFQIHGADAEGSPILNRKLRRAELLRFFEKLPPCLVGLEACGSSHYWAREIAALGHDVRLISPIYVKPFVKRGKTDAADAEAISEAVTRKTMRFVPIKTADQQAAAMVLKTRALLVRQQTQAINALRGHLSELGVIAAIGTAKVAALIEIVRDEEDVRLPKAARLALAEIADQIEALTRQIEKLERGIVSEAKRDEDMRRLTTIPGVGAITAANVKALVPDPDGFKSGRHFAAWLGLTPKPHSSGGKERLGGISKMGNPTLRSLLVCGATSVLRRAKGNDKAPQWLTGLLARRPFKVVAIALANKMARIIWALLTKGGTYRNTGTASGTVSV

SEQ ID NO: 515185 - protein, 344 aa, unidentified
MPHPAPAVVGLEIAKNVFQVHGADAAGHRVLRRRLRRGEVATFFARLPPCLVGIEACPGAHHWARELQALGHEVRLIPPQYVKPFVKTNKNDAADAEAICEAVVRPTMRFVPVKTVEQQAATMLHRTRALLIRQRTQLINAVRGHLTEFGLVARKGTRNLRELADLVRDTATSALPDAARAMLVLLLEQIREAQVRIAHVERALEAWAARSDACRRLMAIPGVGTMSATALVVAMGDPSRFRSGRHFAAWLGLVPKQDSSGERERMGGISKRGDAYLRTLLVHGARSVTRWRRRSWGWLAGLMARRPTNVAAVAIANKTARTAWALLARGTSFEVGGAPATAAA

SEQ ID NO: 515186 - protein, 291 aa, unidentified
MEAQAKFVGIDVSKARLDVGVWPGAESFSLSNDERGIAQLVERVRRLAPQAVVLEATGGLESVAAGELLAAELKVAVVNPRQVREFARSLGRLAKTDRLDALVLAQFAQSADSNGRLASMRTLDPAQAELKALVARRRQLMQMLVAETNRRERAPKIIRKSVVQSIKGLKRAIAVVEQQVAEVIANAPVQRAKAKLLRAVPGVGPELTAGLLADLPELGELGRRAIASLVGVAPHAHESGSFHGRRMIWGGRAHVRTKLYMAALSAVRFTPYSSAAKPGSSRWSRACANSC

SEQ ID NO: 515187 - protein, 344 aa, unidentified
MGEVSTIGLDIAKSVFQVHGVDADGAVVIRKRISRAKVLEFFATLPSCLVGVEACPSAHHWSRKLQALGHTVRLMPPSYVKAYLKRSKNDANDAAAICEAVTRPSMRFVPTKSDQQQSGLMLHRGRQLLVRQRTMLSNAIRGHMAELGIISAKGRNGTVELLEIITNADDDRVPTVARLSLDALARQYANTTAEIRAFEKHIHAWHRSCEESRRLEEIPGVGPIVATALVAEVGDWTVFSSGRNLAAWIGLVPKQHSTGGKERLGGISKQGNRYLRWLLIAGAMAVIRYARQHGTKRLWLARIMERRPIKVAAVALANKIARMAWAMMVRGERFKEPRLLSEAA

SEQ ID NO: 515188 - protein, 381 aa, unidentified
MNRPIYEQSVIVGVDAHKYSHTAAAVDAWGQEKGRLDFTNDSLPACLSWLKTLGRREDIIVAVEDANSYGCHLVSALAGQKFAVRSVPAVLTERDRQHSTQRDKSDFRDAKRVAKVILFKYEETLPVIASLATSAELAVATELNLLLNERRDVVKECTAIKNQLHSLLHQYYGDHYDADEFTKAFNKQAMIFYQANLVQALSVNSPNANEAGKALIAESILRRIQRLKLLQEQSAAILKQIAKIGKTSAQVLALHESIHGCGILTAGAIMAELVTIRRFGGRDKLAKYAGIAPTLKSSGAHHRLYTNPFGNRLLNKALHTIALSQIAIKGDDRGKMYYRKKLKEGKTKLWALRCLKRRLINLVFRVLKQIEAEIEIGLAEI

SEQ ID NO: 515189 - protein, 314 aa, unidentified
MAEEKLYSGIDVSKKWLDVAVRPTNQTWRVPNDREGIASLIKQFQAHAPQQIIVEATGGYEVQLVTELFTAGLPVARVNPLRVRRFAEGMNWFAKTDKIDARVLADFGRKANPRLLALPTEAEKQLSAFLKRRKQVLDMLTAEKNRLGTANPDMQVYIHSIITSLKNQLAELEKEIEQLTKHTPGMKEKRTLLMSVPGIGKITAATLIALLPELGQCDRKQIAALVGTAPFNHDSGTKHGKRKTSGGRVDVRCVLYMATLAAARFNPVIKAQYKNLLQAGKLTKVALVACMRKLLVILNAMIRSNTAWQSPATP

SEQ ID NO: 515190 - protein, 389 aa, unidentified
MQTARKTATHTIAPVECGAIFVSLELSRSFWLVTALATPVGSKMSRHQVRGGDMSGLLERFSDLQRNVQRRTGQVVPVIVIQEAGLDGFWIHRALVTEGIESHVVDPASIAVSRRQRRAKTDRIDGEALVRTLMAWRRGEPRVCSMVCVPTPGEEDRRRVCRELKTLIGERIRHVNRLKGLFFAQGIDGYEPRNKDRRERLEDLRTGDGRELPKHLKALALRELEIIELLNQQIEAVKAERNALLEKAPVSGSAPEPVRMLLELKGIGAGFAGALWSEGLFRQFANRRQVAAYAGLAPTPWKSGTINHEQGVSKAGNLRLRAIAVEMAWLWLRHQPDSALARWYHERVRRLGPRTRKVTIVALARKLLVALWKYATSGVVIEGARTKTA

SEQ ID NO: 515191 - protein, 315 aa, unidentified
MRKNNIARKQQQKKKRVTIGLDLGDRSSRYCVLGEQGEVQSESSVPTTEKALAQVFGSKTRGRIALEVGTHSPWVSRCLTKLGHEVIVANARRVRLITDSSRKNDRLDAKTLARLARVDPELLSPIRHRNEQSQADLMVIRARAALIEVRTMLVNCARGMTKSFGERLRSCDPDQFRQDLAGVLSKHLRDALGPLLAEVESVSKRIQEYDEQIENIAKSRYPETELLKQVHGVGILTSLTYVLTVEDPHRFRRSREVGAYFGLRPKQRESGDSQPQLRITKEGDAYVRKLLVQCSHYSGSFWPRKRSKALGIETG

SEQ ID NO: 515192 - protein, 373 aa, unidentified
MGYRSEAFVGIDTSKLRNAVAVAEEGRGGDLRYLGEIDTTEAATRKLVTKLAAKYRQLTFCYEAGPTGYGLYRLIRKLGHDCIVAAPSLIPKKPGDRVKTNRRDAVGLAKLLRAGDLTAVWVPDERHEAMRDLSRAREAARKDLKGKRQQVSSFMLRLGRHFPGKKTWGPAHMNWLMLQKLEHREQRIALEELLGAVRQESERVERLEQAIRDAVPEWSLAEVVTALQAMRGIDLITAVTVLAEIGDLSRFQNPRELMGYLGLVPSESSTGDTINRGGITKTGNGRVRRILVESAWSYRYPPRVSREKQMKVAAAPRAVREIAWKAQMRLCGRFRSLTRKGKRPTVVATAIARELAAFIWAINREVMAHATAS

SEQ ID NO: 515193 - protein, 410 aa, unidentified
MELLHPHCAGLDLHKETVVACIRHMADGKVTTDVKSFQTTTPQLMDLSGWLSSQGVTHIAMEATGVYWKPVWHILSDGEFELVLANAAHVKNVPGRKTDVNDATWLADLMAHGLIRASFVPDEPTQQMRDLLRTRKQFVRERSSHTQRIQKTLEDANIKLDSVITDIVGLSGRRMIEALIGGETDPEALAALAHGRIRATKAELEAALRGRVTAHHRFMLRIHLNHLDALNTTIADIDKEVDANVEPFRIAVEMLATIPGVSSLAAEVMVSEIGIDMSRFKTEGHLISWAGLCPKNDESAGKRRSTRMKKGAPWLKTTLIQCAWAASRKKGSYLQAQFLRIRSRRGAKKAIGAVAASMLTAAYHMLKDGILYQDLGANHFDNRDKGKQALRLVNRLQSLGFTVQITSMAA

SEQ ID NO: 515194 - protein, 345 aa, unidentified
MGEFAGIDLGKEVLSYHVVDAAGVTVRRGRAAATPRAARQALDGLDLERVGVEAGPYGAWLVEGLCQAGVPGVLIETRRMKQFGQYSKVKTDARDAERIAQAMRCALYTPVHVKSTPSRQARTLLRARATLSRARLELQNSARGLLKEYGVKLKRQSSRLLEEAVREALLEHDAAVATAVLPLVAGIAELRRQEVALSREVRRLARTDAVCRLLMTVPGVGPMVGLAFRATLDDPQRFADSQLVGAYLGLTPSKYASGETDYDGSITRHGDKLMRASLYEAATVILGRLRRPCALRDWGLALVERRGRRRATVALARKLAVVMHRVWLSGQPFDWQRRTPAKSSV

SEQ ID NO: 515195 - protein, 393 aa, unidentified
MLTQEEAVSASEASGINGNIFVSVEMSRSKWVIGLHTPLADKIAIHTFACGDADAVLALVERMRTKVEAAGNSSPTVIVCYEAGYEGFWFQRRLDALGLRVVVIDPASLLVDRRAKRAKTDRIDARSMVRALMAFARGEQQVLSEVHVPTVEQDDARRVLRERQRLVKERTAHTNRIKGLLKTQGIMDFDPRAKGATLQLDEIMTGDGRRLGTCLKQEIVRELERLSLVMEQLVRVEAERDAVVEMGREQEVSAADHDRDAAMIAVLNRLKGIGTNDASILVREAFWRDFRNRRELGGWSGLAPSPWASGSVSRDQGITKAGPSMLRAQMIQITWRWLLWQPDSDLARWFRKRTEGAMGRMRRIMVVALARKLLVALWRYATTGTVPSGAIVT

SEQ ID NO: 515196 - protein, 347 aa, unidentified
MRFYTKSHQCYWGIDLHARTMYVCILNQAGDILLHRDMQASPEPFLQAIAPYREDIVVAVECIFTWYWLADLCAQHGLPFVLGHALYMKAIHGGKAKNDRIDARKIAVLLRGGMLPQAYVYPAERRATRDLLRRRMHFMRTRAELLTHVQQTNSQYNWPEIGKKLAYKTNRTGVTERFPDPAVQKSIEVDLTLVGHYDHLLRDVELSVLKTAKQHDANTLYLLRTVPGIGEILSLVLRYEIHDIQRFPRGQDFVSDCRLVTCAKESAGKYYGTSGAKIGNAYLKWAFSEAAVLFLRTNPAGQKYLARLEKKHGKGKALTVLAHPLARAVYHMLKRGTAFDMPRFLQS

SEQ ID NO: 515197 - protein, 346 aa, unidentified
MTIVEDARAITGGVDTHADTHVAAALDSLGGLLGVREFAATAAGYAGLPGWLGGFGTVALVGIEGTGSYGAGLARYLAAAGIRVVEVDRPDRQDRRRAGKSDPLDAVSAARAALSGRAAGAPKGRDGQVEAIRALMVARRSARAGRTQAINQARALLVTGPGDLRARFARHAPAQLAGGLAALRPRPGDMPGYATRAALRELGRRAGFLEAQIARLDELIVPLVAGRAPGLLALPGVGPHTAALLLIAAGDHPGRLRSEAAWAHLCATAPIPASSGKLTRHRLNPGGDRQANHALWRIVITRMSSHPATRAYVARRTAEGLTKPEIIRCLKRYVARQVYPHLRGTC

SEQ ID NO: 515198 - protein, 426 aa, unidentified
MKPTGFSSSRATAPLVVSCDVGMQSIHVVCPALGASSFLRVYAIDNYTDPIRRELTALRDAARAAGHGEIRLVLEPTGVYDRLLVQIARELGFEVKLVNGEDVAKMRQVIFGDFGKTDERDPRAIDAVATHGRLIEARDLPAVFRLMRGWGKIYQDAEDEIIEAKGRIHRCLKLLIPDFAFSTDFLYSASGDAIMRCYGWSPHRIVRDRPSRIFERLRKHSRIMRRSVERLLTQAQASATSTPDGALGELAQQQLALAWEELQRHDERRARARTKLEKLYLEARTADARLPEPVKGVFSSIGLARLFAEVGPLDDFASWRQVLRYGGLNLCERKSGKYVGQTRTSRKGRPQLRRILNELVLPLVRRGSLYGDYYHRKTGVEKMEGTKAMTAVSRKLVKMVWGWTRSKDGFNAARVFTCRAAYAKAA

SEQ ID NO: 515199 - protein, 406 aa, unidentified
MELIYERCCGIDVHKKMVMACIFVKGKKKEIRKFGTLTDELEEMLVWIREKNCEVVAMESTGVYWKPVYNLLESEGIKAIVVNAQHIKGVPGRKTDVKDAEWIADLVRHGLVKESFIPNREQRELREITRYRNDLVEERARQLNRIQATLEGANIKLASVITDVSGKTGTAIIKAIISGTTDNNALSLLAQGSIKNKIPLLQRALRGSVGEHQRQMLNHQIRHIEFLSGEIESLDAEIQKKTEFAAQEIEWLDGIPGIGRRSAERIIAETGIDMGQFQSAAHFASWAGLVPECNKSAGKKKSTKTRKGNKFLKSTLVECARSAIRNTDSFLHARYKKISARRGGKRAIVAVAHSMLLAIYGIFKNKEPFRDLSSNYYNEINHEKILNRNIQSLQRLGFAVTLEKTA

SEQ ID NO: 515200 - protein, 423 aa, unidentified
MTKLTSTPAGAVLVAIDMSKSRQEVLIERPEGGRRRRMTVMATRQDYDGFAEQLAAIGRPIIVGFEATGNYHRTLAHRLLTAGFELRLISSVALARTREALHNGWDKNDSKDAQVILHMLRIGATQRYVDPLVAGINDLQELSKTHETISRMKTQTWHRILTHYLPLYFPEIARFAGNSRSDWFLALIERFPTPATITALDREAFSAAAWPLIGRKVSKARLINDIYETASASTALPVPESSAAITMFRMVIAQGRSLIHQRDEIERLAHARLADDVDYQLLRNIPGIGPINALTILAEAGDLRRFNHHRQFLKFCGLDLATCQSGTFRGRTKLSKYGNARLRRTFWMAAQVAARQRDNSFRDKLGRYVAGHADDADRRRKAMTALTAKMARVAHAVIKTGTEYRPFLERSDARWKDPSLQVP

SEQ ID NO: 515201 - protein, 431 aa, unidentified
MKKSLKGKPVLPRGRAVVGIDIGKRKHAATALSPQGEVIAQLASFPNTRPGVDQLEKDVLRKAGGPGKVLVGMEATGHYWMCLYHELTRRGYACVVLNPLQTNARSSTRIRKTRNDKIDSQTIARLILSGDAKATRVTDPKITELRLLVRHRHRLLQATGNMERYAHTLVDRIFPEYADVFCKPFLPSAQKMIRQIGLAPDKLVKSAEQVRETLRSAGRGRIAAETIEQLLESAKESIGTRQAEAVIDTQLCSIFDYLKTVRQQIADIKKQLDDRAKKLNSPLYSLGLTSTLVATIHAESDPIDDFDSAEQYVAYVGLDPSLHDSGDTIKRRGKISKRGSPLLRHTLYLAAFVVYRRHDYFRRIYLKHRGRGKKHISALVIVAHRLARVIWRLLTDGREFTKRAPKPVSPSDKPRKSAKSTTTRKPANASA

SEQ ID NO: 515202 - protein, 318 aa, unidentified
MDATDQDLNTYVGIDVSKDQLDVHVHPAGECFSVSRDLVGLEELITRLKPFALKAIAVEATGGFESIVAASLVAEGLPVIVVNPAQVRHFANALGKRAKTDPIDAAVIARFVEATKPAIRSLPGAETLALADLMARRRQIVQMITAERQRAMRTNTSKLQKSIARLLKALQRELDSLDDDIDTSVRGSPVWREKEDLLSSVPGVGKVIARTLLAELPELGSLDRRQIAALVGLAPFTRQSGKWRGKSFIGGGRASCRTTLFIGALVAAKHNPDLKAFRQRLIDAGKPKIVAIVAVARKLLTILNAIIRDKAPWMPKTV

SEQ ID NO: 515203 - protein, 387 aa, unidentified
MTEQRRSYAGECVYVGVDVHKETYTVTCVCHKQIVKTATVQAEPASLAASLRRWFPGATLASAYEAGFSAFVLHRALTQAGISNIVVNPASLAVAANDKVKTDRRDSKRLAVDLADGRLRGISVPTEEEELARLLPRTRAQLVEHRATLARQIKAKLHQFGLIAPSSRRLLSHRYLREIESWTLPPELRASLQMLAEQWRFVTRQLIEMRRLLREQATAQAAIDKVYRSVPGIGEVVARTLATELGDMTRFANERALFSYTGLTPSEYSSGASVRRGHMSRQGSSRVRHLLVETAWRALPYDAVLQTMFERIAATRGKKRAIVAIARRLIGRIRACFRQGTMYAVGTLASVPRHPWQEAWLKRSHSLVARPHAEQLPTIMNRIEQEE

SEQ ID NO: 515204 - protein, 392 aa, unidentified
MEVMVETCCGIDVHQKSIVCCILSGPLDTNKPHKLYRTFGTTTKQLYQALNWLNENHVTHVFFESTGQYWVPLFNIFSDSSLELILANPQHIKNLPGRKTDMNDAEWIAQLGRCGLIQASYIPNAEVQQLRLLTRRRKAYTERITQCKNEIHNILQQANIKLTSYLSDIYGKTGTALLQLFIDGVVISVESIMPILHGKVKASPEKLVEAMDGKLSIEDRFLLGQSLDYFQFLKAQLNEVQILIEKYIQEHFPLEYALLLEIPGVSKIIAAVILGEIGPNVEAFVSEAHLASWAGVCPGSYESAGVKKSSRTTQGNRFLKTALFQAGGTAGRSKDEGFHSFYGRISNRGSKMKAIIACAHKLLRIIYKILSTKCHYDTKKALGLRQQTRAIA

SEQ ID NO: 515205 - protein, 358 aa, unidentified
MNRNAAQGAGQIIGQIEGRQVVGLDIAKNVFQLHTVDMATGEIVNMQLKRAKVLEHFANRAPCLIGIEACGAAHHWARELTRLGHHVRLIHAKAVRPFVAGNKTDATDARAIWLAVQQPGTKFVGIKNLAQQATLTLHRQRELLMKMKTMQTNALRGLLYEFGAIFAKGRNALLGEIEATLERLAGDMPQYVADSLREQAQRIKALSADIKAIEVRLAAVLRTDRDMKRVAAIPGVGLLTATAAIATMGQASAFKSAREFCAWLGLVPKQHGTGGRVNLLGISKRGDTYLRTLLIHGARSVLTHAKEPGPWLEQLQARRPAGVAIVAQAAKMARTIWAVTARQQDYQRGYQSTRPQAA

SEQ ID NO: 515206 - protein, 447 aa, unidentified
MSDLPNRPGPEFAAWIGIDWGDKKHAWAVQAEGSTQVEQGEMAHTPEAIQEWAMELRRRFPTGCLAVALEQSRGPLVFVLSKYEHLVLYPIHPTSAANYRKIFRPSGAKSDGPDAAMHLDMLVKHRDQLRPLHPDTVETRTLQLLVEDRRQLVNERTRISNRLVADLKSYYPQPLQWFEKPYAPVTLDFLARWPTLEELQKARPATLQEFFKQHQCRDDAKNQARIEDMHKTIAATHDGAVRIAGRAAVCAAVRLLRGLSQSIQDYDQKIEELAQAHPDFEIFVSLPAAGAAFAPRLIAAFGAQRDRYRDAAEVQQFSGIAPVTEASGNQRWVHWRWSCPKFLRQTFHEWAAQTIQQCDWAAAYYQVQREDKKKSHHAAVRSLAYKWIRIVFRCWKDRKPYDESRYEGALKRQHQKAAAKSVQPSPFELPVQWISCAGFQKLASKNG

SEQ ID NO: 515207 - protein, 356 aa, unidentified
MLYLGIDQHGKQLTVCIRNEEGDVTLRRQVSTEWKRVRAFFAEISRQAQGEGFVGIVEVCGFNDWLVRLLDEDEYDCRELILIQPERRSRRKTDRRDANALCETLWLNRQRLLTGRRVQGVRRIELPSREDAEARQVTEFRKRLGQLRTRTINRVKHLLRKHNLQQECPTKGLDTIRGRKWLAELTLDSMDRMEMDMLLKQWELHNEQIEQVETEIRKRQAKHEQAAILATIPGCGAYSSLALASRVGRIERFARPGSLANYWGLAPGCRNSGEVTNRLGSITKEGNATARFILGQLVLHVLRRDRVMKAWYQRIKKRRGSKIARVAVMRRLATIIWHMLKHGDSYTIGGPPSGKP

SEQ ID NO: 515208 - protein, 421 aa, unidentified
MRGFGLDVHRDFCEVAIAEGGSVRSAGRIATRVESLQLFAQSLVAGDVVALEATTGADKIVSLLQAQGVRVVVANTRKLRSISEAKAKTDRLDARTLARLLVSGLLDQVWTPDERTRTLRRLTNRRERLVRARTRAKNEAHGVLARNLCERPPLTDAFGTGGRRWLASLQLPVDERLTLDGCLRQVDFLDAEVAALDGEIAKQALAWPEVLRLMTVPGVNVQTAATFMAAIGDIGRFSSPRKLVSYLGLDPRVRQSGNTAARHGRISKAGASEPRHMLGEAAWKVMLTPGPLRAFFERVRARRGAQIAATATARKLAVLFWHLLSRGEDYAYARPAMTRHKTRRLELLAGAPPQKGRHGIAGGKSKAVFDAERELSRQAETAYRRLVSDWRASGPGKAGAGVTPGRASSRPSKAKAARQTP

SEQ ID NO: 515209 - protein, 343 aa, unidentified
MQTITTIGLDIAKSVFQVHGVDAEGNAILRRQLKRRYVLAFFQKLPPCLVGIEACASSHHWSRELQALGHTVRLMPAAYVKPYVKRHKNDATDAEAICEAVTRQNMRFVATKTPEQQSCLTLHRTRHLLIRQQTSVINAIRAHLAEFGIVAPVGRNGVEQLLGVGDDPNDKRLPEVARACVAALGAQLRVLKAQILQFDRMIMAWHRSSEASRRLDDIPGVGPVLATALVASVADPKVFRSGRDFSAWIGLVPKQNSSGGKDRLGNISKRGDRYLRSLFTTGALAVIRYAKIHGTKHRPWLTALLARRPTKVAAIALANKIARMAWAIMAKGERYKEPAALAA

SEQ ID NO: 515210 - protein, 383 aa, unidentified
MKSVCGLDVHKDSVYLCILSEFGELIEKVFGVLTYELEEMRDLMLHHHVVEVSMESTSVYWIPIWRVLSPHFKLNLANPYFIKQLPGRKSDVKDAQWIAECTMKELIRGSFVPPETIQQLRQYDRRIFDLNEEIVRKLSKLDAVLQRCNIRLSNYVSNVDSKSYKAVVRAISQGITDPEELVKLIHGRIIKHHGMDVITASLKGVVSLAEIDMISQLRDELDMAEAHKEKCQARMLEICEREFPEELKRLQTIPGIKERAATSLIAEIGTDMNKFETANHLASWSGLKPRNDESNKKIKSRSITHGNVYLRKTIIECAWAASRTKDCFFSRFSYHQTQVRKKNKMKVLVAVARKMLIAVWHVLHDNTNYIDFTTDRKTSRTKG

SEQ ID NO: 515211 - protein, 335 aa, unidentified
MNYIGIDVHKNDSLVAVLDDDGEVVKEIRVQNANLDDVAEEYVGAKAAIEATGNYYTVYDTLDEHLDVVVADPSQTKAIGYAEVKNDRLDAKLLAQLRRAGMIAESYVPPEELRERRALVRGRKRLVEKRTDFKNEVHSLLDKHGITYDWDPFSVNGREILASEDFSLDVVGDQLLESFLSIIDELTAQIEELEEVIEETAASLEETQLLMTIPGVSFYSSLLITSEIGDIDRFDEANQVVSYAGLDPVVRESGDSRTEGSISKRGSGDLRWILVQCVQTAVHRCNDPYLGRFYARLKQRKNHQIAIVATARKLLVSIFHMLEREEVYDPPEVSA

SEQ ID NO: 515212 - protein, 445 aa, unidentified
MASKRVGKRLTVLYPDCAGVDVGKKKHFVAVDPSRSESAVRSFDTFTDDLEDLAGWLKACGVKVVAMESTGVYWIALYEVLDRAGFEVRLVNPRATKQVSGRKSDVLDCQWIWQLMSYGLLDGAFRPSDEICELRSYARQRARLTRDAARSVQHIQKALTEMNVQLDSVLSDIMGQTGQRILRAIVAGERDGERLGSLRHSRVKADVATIARSLRGNWRAEHLFALEQALARYDFLLAQSAACEQKISTLVERLSDSQFSEAVTLAKPSRNLPERTLQMALSRLMGVDLTAIPTIGVETALAVACEVGPDFSRFPSCGHFCSWLNLAPGTRISGGHVLPGRSPKRTNPLGQALRLAAVSARHNNSFIGAAHRSRLARLDKGRAIKATAHQLARLIYAMVTRGEAYVEKGIETFEHERRVKQLTALRRNAKRLGFDVFETPNKTAA

SEQ ID NO: 515213 - protein, 351 aa, unidentified
MIIIGVDYHPSDQYIAFVDTETGEYGERRLNHSDGEAEKFYRELAARGISVRVGLEATGYSRWFERLLAEVGIEVWIGNAAEIKTKRVRKQKMDREDARLLLKLLQENNFPRIWVPSRENRDLRQLLWHRHRMVQMRTRIMNQLQALAMKEGLRRKKTLWSDQGRAQLEKLSLGTWTSRRRKDLLELLDRMNPSIEELTAVVEQEAKKWPEVLRLMTHPGVGPLTALAFVLIIGTPERFQCGKQIGSYVGLIPEEDSSANHQRLGHITKQGSSLLRFLLGEAAQAAARCDADWRRRYMHLAVRRQRNIAKVAMARRLAVRLYWMWRNGWEYAQWVAFGSHAGQLGTGHGVQ

SEQ ID NO: 515214 - protein, 370 aa, unidentified
MLDTTTFVGLDVHARSIKAVSLDVMTGEVRCATFGYDAGAVAEWVRSVDPKARCVYESGVTGFDLQKRLSGLGVDCVVGAVSKMIKPSADRRRKNDRNDAEFLARMLSVGNVVEVWVPDDECEAARDLTRALEDARDDLSRSKQRLSKFLLRHGLAFDERTPTGRRKGNWTRAHWSWIESIRFAEGADNDVLAYYVDAVRRAAEEKARLEGLVEAEARKPRWRRRVDSLRCLKGVDTASAADLVFEAGEFSRFRNARSFAAWVGLTPSEHSSGESDRRGAITKAGNKHLRKALVEAAWHYLTCSGRPKDLAKGQAPDRVARRHAAKGVRRLVERREALLARGVHGNKANVATARELACWVWAVGLMAEEA

SEQ ID NO: 515215 - protein, 495 aa, unidentified
MTKRTIYAAQSQDLLTLFEGAGHPSKVMCVALDYAKATHTALLCNGGGEYLRKPFPVWNSAEGIEFLLERVQAGCKKHGINPRHVFFGGEDAPSYALNFIHALRSRGWLVAAVNAFDAKKQRENMQASSDILDLLGIAKTLLNRRGNTSPAQTGIYRNLRNLVRHRRRLVHMRTEVSNRMHALVDQLFPGFLDEKKSGLVAFSGGSLWLMEDRFSARQIARRRTDGLVAGLQRYGVPHADQAVAKLKGLADQALGPASEYIDTLQMSLGQQVALYRCLSQNADQSEHEMAVLLAQTPGALLTTVRSIAVVLAAGVVAELGDPHAQRPVNNLCSYAGIVPRTKQTGGPEQDAKTGHVGKRANRILKDYVVQSGTLIGRQGPPELMADHHRRQSAGQHADFGIARRYLRLGMHLMRTGGIYLPPELRSDAATPEQRAAYYLQLWPRLTAKWRRVKALDAAFAPGNPLGQWRNMVEKLYGIKLPLTPTTGNGGDAENG

SEQ ID NO: 515216 - protein, 429 aa, unidentified
MSYRIAGIDVHKKMLAVVVSNVEVESEFQFERRMFGGNPEQLRLLAAWLLEQEAEEVVMESTAQYWKPVWGALERYWKPIREKREGAKRRSGTLHLAQAQSNRGRRGRKKDFVDAERLVKRLVARELTLSFVPDGEQRLWRAVTRKKYQLRRDLVRLNNQLESLLEETHIKLSSLVSDLLGVSARRMLKALADGETDPAALAALAHQRLRATPEQLCDALGACTDLKPVYRRLLKMTLEQLQLLEQQIGQLDQELATLLHPHQDAVHRLAEVPGFGVDSAQQIIAEVGPTAATFPSEKCLSSWVGACPGDEESAGVNYSHQSPKGNRHMRRLLNQAANAAVKVKGSIFEVIYRRCVPRLGHNQAIGVIAHRQCRLIWLILHNGALYEERGPAVTMQSKYKRTWRMIRQLRQLGYRIDPPNLQPSQAQAQ

SEQ ID NO: 515217 - protein, 378 aa, unidentified
MIRLVLASYDKIMLKIKAVIMLHKRGEPAMRNVTIGMDLGDTKHVITILDEEGVIARSCSLDNVRASIVKFFKKYQGSTVAIEAGTHSPWISREIKALGCNVLVGNPRKLRSIWNSDDKADVHDSEMLARIARFDPELLYPIAHRSKQAQTDLELLKARDMLVKTRTSLINHVRGAVKSFGERLPKCSAESFHKQCRDFLPENLKAVLQVIIETIEHITDRIKEFGRRIEKISREVYPETELLKAIGGVGPLTALAYVLILEEPGRFGKGRQVGKFLGLTPRRDQSGETDKQLRITKAGNRFLRRLLVGAAQYILGPFGPDCNLRRFGLRLAERGGKSAKKRAVVAVARKLAVLMHRLWRNGEVYDPFYKSAMIRNAA

SEQ ID NO: 515218 - protein, 349 aa, unidentified
MTNAAIATLGIDLAKYSFQIVGQNAAGVIVTTKKLSKTQLLAMTAKMPRCLIGMEACSGSHHLARELVQQGHDTRLIPAQYVKPFVKVHKNDERDAEAICEAVQRPTMRFVPIKTEDQLDLQALHRVRERLVSGRTSLINQVRSFLLERGITIAKSRRALETVLPKIMANTSAPISSRMRALISGLVDEWGHVDERIDKITDEIGLLAKAEEGAVRLTSIPGVGPITATAVVAAIGNGAAFEKGRDFAAWLGLVPYQHSTGGRQKLLGISKRGNRYLRTLFVHAARSIARFLIGKGTTPLGRWMTALAARVHGNVAIVALANKLARIAWAVLRSVSPFNANYGKARTAN

SEQ ID NO: 515219 - protein, 385 aa, unidentified
MQTPNDLSQSRIVLKQDSTLIAVIEMSLSSWLVAGIVPGVERQPLKKLAVDESALLKLLHRWREEAEKAGHVIKRIAVAFEAGRDGFWLARWLRARDIEVHVIHASSVAVSREHRRAKTDRLDTELLKRAFLGWLRGERDHCKMVAIPTLTDEDRKRPNRERESLVGEQSRIINRIKATLVRLGIRGFNPKLKKAAEFLASLRTPEGEPIPPNTLAELHRDMERRQLLRDQIRRIEVARLERIEQAPNDGPHAMMCLLPRVMGIGIETADMLSQEVMSKNLRDRRAVARYAGLTGSPDESGRKRREKGLARSGNPRVRRGMIQLAWRFLMFQKDSALAQWFRARTENARGTRKTMIVALARKLLIALWRLVTTGEVPAGVVLRAA

SEQ ID NO: 515220 - protein, 410 aa, unidentified
MEVQHPHCCGLDVHKETVVACVRLVIDGKTVKEVRTFSTTTASLIALSDWLTETKCTHVAMEATGVYWKPVWHILSDGGFELVLANAAHIKNVPGRKTDVKDADWISDLLAHGLIRPSFVPDPPTQEIRTFLRTRKQFVREKSSHILRIQKTLEDANIKLDSVITDIMGLSGRKMIEALIAGETDPAKLARLADRRVKASQDTLRQALRGRVTKSHRFLLRLHLGHIDALDAAIAKLDSEVEAAIAPFRTAVEQITTTPGVKSLAARTIVSEIGTDMNRFSTSGHLISWACVCPRNDESAGKRRSTRIRKGSPWLKATLVQCAWAATRTKGTYLNAQFHRIRARRGPKKAILAVAASILTAIYHMLKDGTFYQELGPNHFDARTKERQKNRLIKRLADLGYVVEIVPQAS

SEQ ID NO: 515221 - protein, 346 aa, unidentified
MYYCGIDLGSKHSQICIIDADDHVLYNKKLRNGIDSFVHLLQEYGSQIEVLVESTFNWDWIVDGLQAVGIQVTLAHAFGLAAITTAKVKTDKRDARTLAQLLRVNMVPQAYIYPAGERGYRDVLRHRMHLIRHRSAMYTKLRTLFYRFDIQQLTQIEMERLSAEEISSMIPHGAHAFLFTQTQERIEEIQGHIQVTEGYVKRHALGARQEEMNLLKSLPGVADILAMTILFEIGDIKRFATVKRFSSYSRVVPGCANSSGKQKKGRGNKQGNPFLKWAFTLAAQRAATFYPECKIFKEKQMKRHSGSAQKLISNCILAHRLAAATYHILTKKEAYKKELLFANISP

SEQ ID NO: 515222 - protein, 379 aa, unidentified
MTTTIDTRDVCCAALELSKTSWVCAFSAPGDSKATVHKIRPGDVNRLIDILNSSKEKAQCHLGRQLQIVLCYEIGYDGFWLARVLIARGIRTVVFDPASFLMPRRGRLAKTDRLDAEGMTRTLRTWLSGDREVARDVQIPSVEQEDAKRIERERKYLVEERISIVGRIKGLLALHGIWLSGKRVGKGLRERLDTMRTGDGRPLAPFLRREIERMLRRYDFVSQQIEEVVADRKEALADNSGRFPQAEKVRRLTTLDAVGETTATVLVAEVYHRSFETRRHVASFVGLAPSPYRSGDTDRDRGISKAGTKLARQTLVELAWFWLRYQPNSWLSLWWHERFGDKGMRGRKVGIVALARKLAIALWRFVEEGVVPEGATLKV

SEQ ID NO: 515223 - protein, 311 aa, unidentified
MNNTIGIDISKDTLDAHRLADGQHKQFLNGKTGHAQLVKWIGKQSDPLIIFEATGAYHRQLERVLGTHIIPFVKVNPKQARRFAQASGKLAKTDRVDCEMLAKMGAALQLVPKPFTAENLYDLKELLSARRALIKDRTAAKARKATVINALIKQQLEKRLRQIKNDIAKIDALMLDVAREDQYMSERLDILFSIPGIGVITALMILVDMPEIGALNNKQVASLAGLAPMSQSSGKWIGKARIQGGRPNLRNAIFMPALVAIRHNADLKTKYDRLVTAGKEKKVAITAVMRKLLVLANALLRDNRKWAEKAA

SEQ ID NO: 515224 - protein, 315 aa, unidentified
MKKVSTAVARQSRNISHQKLTVGLDLGDRNCWYCVLDEAGQVQMEQKVHTTAKALREVVGALPRSRVALETGTHSPWISRLLSELGHEVIVANARKVRLIGESRKKDDRLDAQSLARLARIDPELLCPVKHRSAQAQADLTLIRARAALVRTRTALVNTARSLAKSYGERLRGCNVRNMNPEKAEGLSPELQSALQPLLSEIESLSERIAEYNDRMEALAESSYPQVKLLTQIKGVGTLIALTFLLTLEDPHRFGKSRDVGCYLGLQPGRRNSGQSQPQMHISKEGDPYLRTLLVQGAQHILGPFGIDCDLRRWD

SEQ ID NO: 515225 - protein, 371 aa, unidentified
MKSILSVGMDVHKNSFSLCAYDGYTGEIVSESTFASDVKLVIKFIETLKSRYENDVEIKCGYEAGCLGYSLYKSLTARGVDCVILAPTTMQVSAKNKMVKNDRMDALNIAKNLASGSYKAVYVPDEEDVEIKEYIRMIHDFKKELKRVKQEICAFVLRHGYQYDGKSKWTIRYMNWIRELEMSEIQRETLNEYIAEMENLNDKINRFMNRIDEMYQSERYHEKVSKLRCFKGIETFAAMTIQVETADFERFPNAKAYASYTGLTTGEHSSGDKNNRIGITKQGNTVIRKALVECAQSLVKGNVYAKKSQGLKSRQKGMDVNIIAYADKATERLKKKYQKLIERNVPRNKAIVAVARELACFIWGMETGNIH

SEQ ID NO: 515226 - protein, 414 aa, unidentified
MALMRWVGRAIGLDVHRDFCVVAICEGGEVRAAGRVPSTPEGLSMLADSLVRSDRVALEVTGSCWEVARILEPHVDRVVVVSPDDTGITRARAKTDRLDARTLARLLWSGELESVWMPDERCRVLRRRLARREQLVRSRSRAKNEIHAVLQRRLQGKPPCSDLFGVKGRRWLAGLELPVEERESVEAGIRQVEFLDAEIAAVKRLIAQQALAWPEIRRLMTVPGVNLICAATFIAAVGDPRRFLTSRKLVAYLGLDPRVRQSGEAPARSGRISKRGSASARWALVEAAWSVVLQPGPLHAFYDRTRARRGHGKAIVATARKLAILFWCMLTRGQDYAHQQPSLTAQKLRRLEIAAGAPPRKGKPSGVWVTHQKMRAAEKQLAAQAQASYEQTVRDWKAASPKKNVGASVTAERA

SEQ ID NO: 515227 - protein, 416 aa, unidentified
MSLKKEVVCGADIHKRFLLATILSIDGQKIQTRFDTDLEGLQLFRKWLLDHDCRKLAVESTANYWQPIYLVVANDIEFVLANSYQIKHIPGRKTDMLDSEWIAELCLNNLISPSRIFSGEERDLRALTRTRENYIKMRSQIKNRIHHELESACIKLSSVLSDIFGKSGIHIIRGILIGKSIEDIVNSIPAKTLKANREEIRKAISVNISPIQASLIGQLLNSIEFISREIEYIDQQIQAVISKRQGDLEIALSIPGMGIVSASTILAEIGNFADFKTGEQLASYCGLVPSVYQSAGKLITGHITKQGSPHVRRMLIEVAHAISRTRGDSKLKRFYLKIKSRHGANIAIVALARKVICILHHLIINREKFENENVTKPKRTRPVSTSSPTRLNIAEAIHILVNAGYVVQKEDKTVGG

SEQ ID NO: 515228 - protein, 412 aa, unidentified
MQAIIERCCGLDVHQETVVACLLVGAPGARPMKEVRTFRTVTRDLDALRDWLREAGATHVGMESTGVYWRPVYAVLEGHFELIVGNAQHMRNVPGRKTDVKDSEWIADLVRHGLIAKSYVPPRPLRELRELLRYRRKLVESQAAERNRLLKLLETANIKLASVASDVFGVSGRAMLRALIAGEASPETMADLAKGLLRRKRADLILALDGRVEEHHRFLLAMQLRRLEAIEADIAALDQRVGERLEPYSAAHALLMQIPGVDWVVAAVLIAEIGVDMSVFVSVYHLASWAGVCPGNHESAGRQKSGRARKGNVHLRAILVGAAISASRTKGSYLKDKFHRLKARRGGMRAALAIAHKILVSAYHMLAKNLPYRDLGEAYLDQISQTRTVANLKRRLERLGYRVTLEPNVQAT

SEQ ID NO: 515229 - protein, 440 aa, unidentified
MQVVYRRCCGLDVHKDFITACVLVFNDRGEKEVRRKEFGTWWKELQRLKLWLYASKVTHVGMESTGVYWKPIWNVLRGHFQLVLANPYYVKNIPSDKTDPKDAAWIGDLLAHGLIRGSFVPPPEVEQWRDLTRYRVKLVGEYNRVHNRIHKVLEDANLKLDTVASDILGITGRDIVHSIIQGEDRPEWLADKARSRLRGKRDQLRLVLRGQITEHHRYLLRELMDDLERVEAKRIRIEVEIERRLLPQQALIERLVTIPGVEVVTAWTLLAELGTDMSVFPDADHAASWAGLVPGNHESGGKRHNTRTRKGNRWLRRALCQSAWAVTHKKNCYLTALFYRRARSHGIKKAIVAVAHHILIIAYHLLRDGGVYEEKGGDFFDRLNPQRTTKRLSQRLEKLGYDVILKPRAEAALQPPLPKRPRGRPRKASSMQVADNAPAT

SEQ ID NO: 515230 - protein, 394 aa, unidentified
MSVVQFTQVLLRGCGMDIHKKVVVATVQGEGICKETRSFDTFTRSLTQLREWLVSLGITHVAMESTGVYWKPIYNVFEGFIPHIWIVNARHIKNVPGHKTDKNDSEWICQLLMAGLLKPSFIPPKAQRELRDLTRYRRKLIQFVSANKNRIIRILEDGNIKLSSVLRDTSGATAVKLIDMLCDGKQITLSDIESVCHGRCQHTKEEMLEACTGCLDEHKVYMLGKIRECNASLKEDILDFDKRIKDVSSSYHDAIERMCEIPGIQNCVCEDLVAEIGLDMSNFPTSAHLCSWAGMCPGNNESAGKKKSGRTNHGDKQVKETLVEAAWAASRAKGTFFMERFNRLAPRKGSKKALIAVGHSLLKCIHYVLSTGGRYKELGDNYVPIRKSRSVRSI

SEQ ID NO: 515231 - protein, 432 aa, unidentified
MMTIMKTINTSEFAATIGLDWADRKHDLWICPEGQAKAEHLRLDQTPEALHHWVAKLRERFPNRRVAIAVETCRGPVISALMAYDFIVLFPVNPKGLKDYRGAFCVSGAKDDRTDAMRLEELVRLHRDKLHALEPDTELTRKLAGLVENRRHLVDERTRLVNQQHSTLKTYFPLALDLLEDQMNTLLAAEFLTRWPSLAALQKEKPKVLRAFFYQHNSRNAQRIEQRIQAVPAAQPLTTDAAIIEPACALVSARAGMLRPLLKAIAHLDEAIQEAMDQHPDAPIFRSFPGAGPALAPRILVAFGTNRDRFASADEVAQFYGIAPVVEQSGNSKTVHVRYRCPKFGRQSFHENAACAFKKEPWARAYYDQHKKKHDDKHHPACRALAFKLIRIYFACWRDKRAYQSDLYVQALRKNGSPLHKTLKTQRAPSCE

SEQ ID NO: 515232 - protein, 354 aa, unidentified
MLIIGADYHPGFQQIAFVDTETGELQERRLQHREEAEKFYRDLAAQGMKLRVGMEASGHARWFERLLSELQFELWIGDAAEISARRVRKQKTDRQDAQLILKLMLKDDFPQIWVPSWENRDLRQLLWHRHRMVQARTRMMNQLQAVALNEGLRCKKKLWREAGREQLEAFQLAPWASQRRRDLLEMLDHMNPTIAKLTQAIEEEVKRYPAAQRLRTHPGVGPLTALAFVLIIGKADRFQCGKQIASYLGLVPLEKSSGNQRRLGHITKQGNSLLRFLLVEAAQVTVRSLPEWRSKYCHLTMRRGRKIAKVAMARKLAVRLYWMLRKEWDYEQLTRFGSHAGKPGHRDGVKHNTE

SEQ ID NO: 515233 - protein, 343 aa, unidentified
MVHYVGLDVSLKQTSICVVNQAGSVVREAVVDSDPEAIDAFVRSKAPGAVRIGLETGPTSTWLWTELKRLGLPVICIDARHAKAVLKMQINKSDRNDAAGIARIMQTGWFKQVRVKDLDSHSVRALLASRALLVKIKRDLENQVRGLLKNLGLVIGRAKFNVFAVRAEELVEGRPELTAAVKPLLEARKAIEQQVDDLDRKVLKLARCDTQVRRFMTAPGVGPITALCFKATIDDPTRFRRSRSVGAYVGLTTRRHASGEIDWSGRISKCGDAMLRMYLFEAAGVLLTRVPKWSALKAWGTRLVKRNGLRKAKVAVARKLAVILHRMWIDGTEFNWSTKKVAA

SEQ ID NO: 515234 - protein, 353 aa, unidentified
MSEEKYIAFDVHQATTVVSVLNTAGRELNTAVLATQPQALIGFLGSLRGRLHLTFEEGTYSAWLYDLLQGRVAELVVCDPRHNALLKEGSKTDRHDARKLADLLRTGMLRPVYHGSRSVRDLQEMAHSYLAFVQDTTRVMNRIKAFYRSRGIDCAGRSVYRRKQQGIWLERLPAGASRLRGELLHDQLEQLRGLRRKARRALLAESRKHPVAARLCEIPGLGPVRVALLIAILQTPHRFRTCRQLWTYAGLGLIQIGSSEYRLVEGRAVRRARALHPRGLNRNHRPGLKEIFKSAALAAIRQPGPFKDYYDARVQRGVDPAILRVTVARKLAALVLSLWKKGGRYRADGVKQA

SEQ ID NO: 515235 - protein, 366 aa, unidentified
MHEGTTVIGLDVHKRSIAVAIRRPGAREAQEERLPNEAAAVARWAKRWKRRSGGQLVCAYEAGACGYALQRQLEGLGIACHVVAPSLVPRKPGERIKTDRRDARKLAEYLAGGHLTAVHPPTPAQEAARDLCRAREDAKQDRMRCRHRLSKFLLRRGIAYTAGRKAWTQAHRAWLQRLSFDDPTEQAVFDDYRLAVAQIDARIESLARQIEALAHEPAYRRAVGALRCFRGIETHTALGLVTELHGIERFGRPRALMAFVGLVPSEASSGERQRRGAITKAGNGHARRLLIEAAWHARHKPGLPVALRKRREGQPPEIIALADVAQQRLHRRYWRLVQRGKPTTVAATAVARELAGFVWAALRTEA

SEQ ID NO: 515236 - protein, 360 aa, unidentified
MDVHKDTIAVAYVAQDHGAEVTYVGTIGTRQCDIDTLIRKMQSKAQHLIFIYEAGPCGYWLYRYLQKKGYDCWVVAPSLIPKKAGERVKTDRRDAVQLARLARSGDLTLVYVPKVDDEAIRDLTRAREDVISDLKDAKFRLKAFLLRQDIRYAGRANWGPAHLRWLAEVVCPTPAQQIVFQEYVRTVTEHTERLGRLENELREQVTTWRLHPVVDALQALRGVQFTVAVTMVAEMGDLTRFDHPSELMKFLGLVPSEYSSGQRRQQGGITKTGNTHARRVLVEGAWAYRYPAKVSRHLQLRLENQPKVIQDISWKAQVRLCKRYQRLVAKGKHANVVTVAIARELVGFVWAIAKEVPLTL

SEQ ID NO: 515237 - protein, 337 aa, unidentified
MSVYVGIDVHRKRSQVAVVTGDGTVELNKNVVNGSEPMLRLIGDLPPGTPVAFEAAFGWGWLAALLEDYGFEAHLVHPLRCKAIASARLKNDKVDAATLAQLLRADLLPEAWIAPPAVRQLRALLRHRAGLVRLGTQQRNRIHAVVADFGFDRSGSYLSGPGRGWLAGLDLPPVSREVVADCLAVIDGLAPVIDRIDGELRQHAKADPRVKTLTTLPGVGQFTALVMLAEIGDISRFPSARKLASWAGLTPTVRGSDLHVRHGHISKQGSAWLRWVLNQAAQTAKRSPDFAATYSAIAKRRGKKIATIAISRKLLTRAWHLLAGMQATSTNEPPRRP

SEQ ID NO: 515238 - protein, 340 aa, unidentified
MEKRYIGIDLRRNRFTCCIRLENERTYVTEWELEDLGRFVKKLRGSDEIAVEITGNTRLFYDAVAPHVARVVVVNTNQFKVIRQSVKKTDPHDARALALYLSKNMLPEVRMKDKEHAQLASLTQTRDTLVKLRTALKNKVNNILSARGLNLAKEALSSEKQLAEVLELPFDEIVRIELRVIVEQIRGLNKSIAELEKTIGEEGSKLEGHKGLSSIKGIGKITGAILLSVIGEVNDFADEGHLASYFGIVPRVSNSNETERSGRIHKRGTKLGRTALVQSALIAANYSPYLKRFYEQVKARRGAGKAIIALARKFLGIIYRTLKNKWIFEDFPNFVLAEES

SEQ ID NO: 515239 - protein, 344 aa, unidentified
MNRTTIAVDVAKTVFEVAVSEHPGQVRERHRLSRAGFRQFLAERPPATVIMEACSSAHHWPRQAQSRGHEVVLVPPHAARPYVLRNKTDRTDAKGLLEAFRNDDLRPVPVRSETQQALAALHRLRSAWAAARTARLNTLREILREFGVLIPAGAHHVGPHVRALLEDVDAGVPGLLRVALGEAIREIGELEERIRAIERQLATAAEPALVVRQLRTIPGIRVLTATALVAAVGDVQRFPSARHFASYLGLTPREHSSGQRRHLGAISKQGDTYLRMLFIHGARSVLHHAKSKTAPTTDRLRTWALQVERLRGHNKAAVALANKLARIAWAVWRNGNDFAAVPAV

SEQ ID NO: 515240 - protein, 319 aa, unidentified
MDDACFVGIDVSKRSLDGCCRPGSTFQHDNTPDGIAAVVKLLAARTVTLVVVEATGGLEAPLVRALQRADIPVAVVNPRQARDFAKASGRLAKTDAIDAEALAHFAEAIRPEPRLLSDEQTQLLDALVTRRGQLIAMRTMEQNRLGSCFDDRMRADIQAHIDWLNGRLDHTDRDLAEAVRNNPAWQARDRLLQSIPGIGKVVSQTLLAALPELGALASRPLTALVGLAPFADDSGSRRGKRRIFGGRAEVRAKLYMAALTASRSNGALGAFYQRLVAAGKAAKVALVALARKLLTIANAVARTRQPYDPAHLPLALAGA

SEQ ID NO: 515241 - protein, 340 aa, unidentified
MSTPSHTPPSIVTEAATFIGIDYHKKYSVHHAVDAAGSELGKGRIEHHSPHDFATLVKRWSNARVVFEASMNWHWLYEVLEQSMPGEHITLANAYKTRIIAEAQVKTDKIDARILALLLRAGLVSSVHIPCKETRQRKEVLRQRCFFVRQRTMLRNRIHRLLGAQHDLKLPQCSDLFGKKGMGFLEKLELPAPAGLLLKQQFDMLKNVQARIKEDEAALVQMMSTTEAQQHVLSIPGMGPILAAVVVSEIDGISRFNSAQKLCGYIGLCPSTSSSGGKTYNGKLMKHCNKWLRWAFVEAAWVAMGCDSYCPGLSPYGVLFNEALRASQVATSAVETTSTD

SEQ ID NO: 515242 - protein, 442 aa, unidentified
MRFIGLDIHRDFCEVAIAAEGEVRSAGRIETAPAALELFAQSLGANDQVALEATGNALAIARILEPHVGRVVIANARALRALSSLKAKTDRLDARTLAELLAAGLLPAVWAGDEETRALRRRISRRAQLVKQRSRAKNEIHAVLTRNLKQRPPVSDLFGKGGRRWLATLELPLDERQTVDGCLRQVDFLDGELALIDRAIAGHALGSREIRRLMTIPGVDVTVAAAFMACVGDIARFPTPRHLVSYLGLDPKVRQSGIEPARHGRISKQGSSQARCMLVEAAWLAVRTPGPLRAFGERIRNRRGPQVATVAVARKLVVLAWHMLTSEQDYAFARPSLTRFKLRRLELRTGAERLTGRRPSVRIVPTPQQTAAEREVAAQAEATYRRLVKDWQQQAKSGAGAAPGRASLAARQGQAPDPALSLAVARAASDSRKGARNRPATT

SEQ ID NO: 515243 - protein, 358 aa, unidentified
MRYVGIDYHKRYSVLCATEERGQELKRRRISGNSATGFAQFFSELGEESKVVMEACWNWGWLYDLLAKIEGIDEVVLAHPYKTRLIAEAQIKTDRLDAQMLAKLLRGDLIAQSHAPSAATRARKHLLRQRLFWVRLRTMLRNRMHAILDRQHGLERPQLKNFFSRRGRTWLEEVQLPSTADQPLLEQNLEVAEVLEEKIKQLDKQIGQSQSEEEKLLESIPGIGPLFSVIATEIDGVGRFNSATKLAAYAGVVPTTHASGGRVFNGRLLWQCNKWLRWALIEASWSAIQFSGYFGSIYQCARARGKNKNIAITMVAHRMIKIIWLLLTEERPYTETLPDRSEDGMTVVVRRKVLGLAS

SEQ ID NO: 515244 - protein, 457 aa, unidentified
MESYYMGIDVSKGYADFVILDAEKNVVEPNFQLDDTFSSHCKLFEILKRFFDSHSESVLFAAVESTGGYENNWLHSLSGFQGALNIRSARLNPLGVRANSKASLRRVITDKISARDVAEYLIAHPEKVTYQQEDSLAGLRRQWGFVRLLVKQKTQILNQFESLLYTANPELISYCKSGVPAWLLKLLKQYPTAAKLAKAKSTSVARIPYVTTGRAKELIDQAKKSVASATDETTGSLITAIAEQIIRMEETIRIQSQQMAKRCAIPEVALLKTFPGISDASAIGLMLEIQSVKRFASVKKLAAHFGLHPAFKTSGDGTSGVRMSKQGRKEPRKILFMVAMVSLTANPHIRKIYEEHTDKGMKKMAAIGLCMHKILRIVYGMLKNNQAYDPQVDQKNRENRTSRKANHTAKNENRRYEMFDQQAPISRRQSNKRKEWKQSQGDNITQCGIGVPIPSAA

SEQ ID NO: 515245 - protein, 361 aa, unidentified
MHTTTVAVDLAKSVFQLAVADAHWRVTETHRLTRTQFERWFANREVSLVIMEACGSAHHWARWLNGQGIEVKLLPAAYIRAYVRRNKTDAADAAALLEAARAADIVPVRVKSVEQQALQGLHRTRSLWMGTRTSRINALRGFCREFGLAIPAGARTGVEAISRVLADPNSPVPTLIRRTMQLLVEEIRLLEARIGQLERELSILAKQSPACTTLLSVPGIGLLTATAMVAATGGEVGHFRSARHFASWFGLTPKESSSGSTRRLGRISKRGDRYLRMLLTHGARSVLRAATVARRAGRSVDGLRTWATALEGRSNHNKAACALANKLARICYATLRDGAPYGQPAARGPGKIARTSFAIAA

SEQ ID NO: 515246 - protein, 317 aa, unidentified
MQTILDLGADVDSRYIWVACAAQSFACHRITNERKAIQAWLRTVPRGSRLGMESTGGYHELLAELAHTAGLQVFVINPRELRRYAQGLGRRGKTDRIDAEVIARYVAKEHGELHAYVLPSKEQRMLTRLIARRAKLVSIKGSVTQSLRGLPSMEREVSQLISRLERLITKIELLMQSALQKLPAAHQAAEQIVTIPGFGTLSSTCLGHNFTRLPYSNSDAVIAQTGFDPRPADSGMKRGRRRLSKRGPSEQRRILFNCARSAAQMDVWRPYYQAQLTKGLSATAATVILARKMVRVAFAVYKLNQPFDAKRLGLNNA

SEQ ID NO: 515247 - protein, 403 aa, unidentified
MNAVGIDISKGKSMVAIMRPNGEVIKKPFEVPHNVGALETFGYSLKALEGETRVIMEYTGRYYEPVAMALHEIGIYVSVVNPILIHDYGNNSLRRVKTDRKDALKIAKYGLDNWSELREYTPMEAVRQQLKTANRQYQLYIKTKVSLKNNLIALLDQTWPGVNTFFDSPVRPDGRQKWVDFAYDFWHVDCVCTLTEAAFAEKYRKWCKQRGYSFSQLKAEDIYIESLGHFHILPKNTNTKMLIREAVAALNSVSKTAETFRAEMLRLAEELPEYEVVMALYGVGKATGPQLMAEIGDVRRFSHRGALIAYAGVDPQPSQSGKQSRNSDPISRKGSSILRKTLFQVIEAHLLKSPVDEPVYQFLDRKRSEGKPYFVYMTASANKFLRIYYARVKEHLNALDGSK

SEQ ID NO: 515248 - protein, 333 aa, unidentified
MSKFKHFLGIDVSKEYFDVVLIMNGEKEKPIHNQFVNDSKGVKALNQWLKKQRATNLETLVCLEHTGMYGKLIIKYLMLFNYSLWVEMSLKIIRSMGLQRGKNDKIDAERIAIYAMKNLQDAVIYKAPSKTIEKIRSLMSLREKLILTKSTLMRNSKEIKSLDPELSKLSEKFQKKTLKGITSDLKEIEKQLDVFIKGDENLNKIYSLAISVPGVGKVTTLYLICFTNEFKAYSSPRQLACYAGVVPFEYTSGKSIRSKPRVHHMANKKLKKHLHMCALSAVNHDPEMKEYFKRKVAEGKNKMLVINNIRNKLVHRICACVRDNKTFEVRKAA

SEQ ID NO: 515249 - protein, 343 aa, unidentified
MKLSRVGVDLAKNVYQLHGVDRFGKAVWKRRLKRHQWLKELLDKTEPGCVIGMEACASAHHWGRQLQCRGYTVKLIPPQFVKPYVKSNKNDARDAEAICEAMSRPNMRFVTVKRVEQQDIQATHRIRAELMTQRTAKANQIRGLVAEYGLVAPKHLSSLRAAIPCWLEDAENGLTGDFRALLQGVWADLLQLDDRVGEMDQKIKRLADNNEDCVRLQQLRGVGPMTSTAMIATVGDARQYQKSRQMAAAIGITPKQHSSGDRDRLLGISKRGDVYLRTLMIHGARAVVARAKYKDDRLSRWVTNIANKKHPNVAAVALANKTARMAWAMLRTETDYDPDFALR

SEQ ID NO: 515250 - protein, 438 aa, unidentified
MSNKVIFNLDDLFISVGIDVGADFSWMSIALPNQQFVGKPYKILHNSIDSLTTAVSKIKEAEELYSLESRIFLESTGIYHYPLFCYLRDKGFNCSVINPIITKNSTNINIRKVHNDRFDSKKAALVGLKPDLKVSLMPSDLALNCRNLCREYYDLMDNRSAYVNKLQGELRMAFPQYLGIFSKVTINTSLTLLETYTSPSAFLKADKQEIIDIIKSTARFGLTYAQNKYNAIIQAATDANQFGYIIDSNIKRIRLYISFIRKYDEEINNILESLHELVDANEDADFVKQIHLIETFKGAGFLSAVSIMGEIGDFSAFSKPKQLFAYFGLDPAVKQSGKFEGTKVQMSKRGSAIARRVIHTLTLQSISISRNGEAKNPVLREYYLKKCDSKPKLVAMGAVSHKVCNMIFAILRDNKSFEIITPQEHIKQYNASKCDMAA

SEQ ID NO: 515251 - protein, 343 aa, unidentified
MEVTTIGLDLAKSIFRVHGVDTTGEVVVRRPLRRAQMLPFFARLPSCLVGMEACGTSHYWSRELIKLGHEVRLMPPAYVKPYVKRGKTDAADAEAVCEAVRRPTMRFVPVKSPEQQAVLSMHRARDLLVKQRTQLVNMIRSLLAEFGLNIPKGLERALLMARRIVDGKAPDVPMEAAKIVSTLSQQVLDIHVRLRQIDRDLLVWQRGNDVARRLMTIPGIGPVGATALAASVTDPHQFRSGRQFAAWLGLTPLQKSSGGKERLGRITKMGDKYLRKLLIVGMTSRVRRAKQNPAVDPRLADLLARKPTRVATVAMANKTARIIWAIMARGETYLAGHRPALAA

SEQ ID NO: 515252 - protein, 380 aa, unidentified
MRRLILASYDKIMLNINAVIMLQKRGESAMRNVTIGMDLGDKNHIITILDEAGVIVKSCSLENVRASIVKFFRKYKGSTVAIEAGTHSPWISRELKALGCNVLVGNPRKLRSIWNSDDKTDVHDSEMLARIARFDSGLLYPITHRNEQAQADLELLKARDMLVKTRTSLINHVRGAVKSFGERLPKCSAASFHKQCGDFLPANLKTLLKEVVETIEHVTGRIKEFDRRIEKISREVYPETELLKAIGGVGPLTALAYVLVLEEPGRFGKGRQVGKFLGLTPRRDQSGETDKQLRITKAGNRFLRRLLVGAAQYILGPFGPDCNLRRFGLRLMERGGKNAKKRAVVAVARKLAVLMHHLWRNGEIYDPFYKSHKVVMKNAA

SEQ ID NO: 515253 - protein, 320 aa, unidentified
MSDSLDIGVDVDSKEFVPAVADRKAGDRVANTRAGIAKWLKTLPQRCRIGMEATGRYYELLARMAGQAGHVVYVIDPRLIKNYARATGSRGKTDAMDAQAIARYVKKESDRLREYVPRTDEQQQMHDLLRKRRALVETRARLEQSFGVSKSDPGELSDLFCALAGTLSELESELQRLGRDGEHGALYKRLLTIPGIGPAVASHLIYYMTRWPLANANAWIACTGLDPRPNESGGRTGRRRLSKQGAPMLRQMLYMAAMGLKRCRRGQPLYDELAKRGHPSTAVFNILARKLARIAWGVFKSGRDFDPAMLKVGQACFQQA

SEQ ID NO: 515254 - protein, 401 aa, unidentified
MKRLSGGIDVGSESHHIIILDEEDNFLYNQKVAHKLNEFSENIKLFKQIEKKEGGKLSFALEGKNGYSTPLDRILLDQGFTLYNVDNLKLKRFREAFAGEWRDDERDSLMLSKMLKLKDYINSERERVFIKIEKPSPVTESLKLLSRHQQTLIDEKIRLINRLGKKLLEVCPQILKLGKLKNKKIIAILAKYPDFSKYKRITLKSLLKIKGIGKKGAFFLLKRLNNIEYMPGLTDIYKTIILSYAKRIVQLQREIEDIDKKLDEIGKKNKEVNHLKTIPGVATKLASRFIGEIGDINRFPSEKQLAVYCGVACVDNNSGKVTKARAVYKANKICKKTLITMAGCSIRFSPQCKAYYLKKRAEGKSHNHTLRCLARQLIKVIYRMLTEDREYIVRKDLKKVA

SEQ ID NO: 515255 - protein, 401 aa, unidentified
MNAVGIDVSKGKSMVCVMRPFGEVVLEPFEVLHTAQSLNDLAGKLKALDGETRVVMEATGNYHKPVAFVLHDAGLFVSVVNPVLIHDYDNNSLRRVKTDRKDAVKIANYTLDKWTRLQQYLPEDDTRLALKNCYRQYQQAVAVRTMLKNNLISSLDLTFPDANKLFSSPAKSNGCEKWVDFIGDFWHSECVSSLSSDAFAKKYLKWCQKHGYNFTRSKSDTIYACAVNAASLPKSPTSKLLIQQQVAQLKAVSQSVAAFQQEMLRLSQQLPEFDTVMEMYGVGPSLGPQLMAEIGDVRRFSSKKSLIAFAGIEPQPNDSGKIVGNDSGISKVGSAVLRRTLFLIMTVILKTQPQDEPVFQFMNKKRSEGKPYKVYMMASANKFLRIYYARVKAVMDSKHSK

SEQ ID NO: 515256 - protein, 340 aa, unidentified
MCVYTGLDLSRKRLDWYACRVDGTLVDAGAVPPDLDGLAQLVHRLGGGEVVAVVETMNGARFIHDRLELAGWDVRIADAQRARALAPLACKTDRIDAQVLAELARRDLVPEVWLPDPRVRGERERARFRLHLVKHRTMLKNRINQTLVAHGLGRPTRHLYGPKGRLLLERLPVPEPWQGTLRASLVLIDSLDEQIDELERELRALGADHRYVPLLMTAPGIAWILAYTIASEIGDIGRFPTARKLIGYTGLCPRVYQSGQTDRRGPLAKNGPNYLRWALIEAAQTAGRTSHYRPIVTRMRDRHGRRRGSALAAVEIARRLTESIWWMLTRNQPFAPAGAL

SEQ ID NO: 515257 - protein, 353 aa, unidentified
MLYLGVDIHKKSCWVTVLDDEGREREQRKLSMDRATLLEYFGKIPKPAKLAVEATFNWYYFLDLIEPLGFELHLVHPQKTKAIASAKIKHDKLDSRVLAQLLRADFIAEAWIAPRPVREERQLLRHRTRTVRWATRAKNGVHGVLNREGIVAPLDSLFGPQGRAFLGEVKLKELDRWEVDDQLARLDLLQGQIDTLDQEVVKRGKTDEVTQALDAIPGIGPFIALLLVAEIGDVKRFPSAKHLVSYTGLAPSLYASGERRWTGQITKQGSSLLRWALVQAAHRAAVSARFAGYYEHQAKRHGKAKAAVALARKLATISYYRWWAVAARKSSAGGDKFGSAPRLAHGQNTDPQV

SEQ ID NO: 515258 - protein, 353 aa, unidentified
MKKVIMCSADVHEKNISVEIAVHRETPMVKDYPYAVKGRQKLLSDLKTLAKKNQADRIVVVYEASSLGYGFYDDCQAAGVECHVLAPTRMAKSAQDRKRKSDRWDAKKMMELLRGHVLAGNELPSVWVPDHPLRDDRELVRTRIDIGEKKSAVKAQVQMLLKRTRAKRPPECKNWTLAYRAWLKMVELPSGTRTALDSLLRQLHHLEEESDQMDVGIETLSQTPRYLKLVEALQKVKGIGVLAAIVYLTEMGDLSRFANRRKVGAYLGLAPACYESGERSDRKGHITREGPSRLRKILCQAVWSRVRCDEQEQVAYDRIVSRNPKHKKIAVVACMRRLGVLLWHKGLEVKAAA

SEQ ID NO: 515259 - protein, 335 aa, unidentified
MKHYAGLDLSMESTQVCIIDENGRKLSSEKAESTPDTIADVLRRHGPIERAVIETGRMSPAICLGLRELGVNVVCIDARQAHQSLKAIKANKTDPHDAAGLAQLARTGFYKEVHVKSPAAHGVRSMITARGHLVEARVRLDNMIRGLCATFGYRPGVGQGKAFVERIMEASHIPGLGEAITSLLTVRVQLVEQIKELDLKLRMLAAQSQACQILMSIPGVGIQTSAAFSAAIDEAGRFRQSRNAGAYFGLVPKRHQSGELDWTGRITKQGDSMVRKLLYEAANSILTRSRESFALKSWALKISKRRGLKKARVALARRLAVIMHAMLRDGTLFEA

SEQ ID NO: 515260 - protein, 398 aa, unidentified
MTSQLTTNANSVYRPQSNESIVGLDVSGRDIVYVVIDSQRKIRPPDRIRGQGRNATQRLIKKLVRGHDRNFVFGIEPCTYSKVIIETLRQAGFKVATLATNTVRSQSGPPIKNDKRDARKLAEALLHGNYIPNDMAEDGIIALRQAVNERARLSRMIVKYKDRTHALKALADLDYAEDEIDALCEVAEFEAGRFQEPRSEALQAAYITTNDSINLTIDSLKTQIEGQDQVIRGILSDRLDFTEAAAVMTLLPRVSETTAAALIAGIRNPDLIGSVDHLRGFLKLVPWQYCSGRMNIVRKQKKSESERTLEHLLVVAATFFKSDRPPTFTAIQAGQFDPEILDLAKREYERIRNRQQHLKAKKKLIGHVRREVGFLIAVAAWRLWRHNRQLRRGLTPAA

SEQ ID NO: 515261 - protein, 317 aa, unidentified
MENQLWFAGIDVAKDTLDVAFVRGNEEVVSQVANTPAGWGELIAACKEHPVDRMVLEATGGYERRTVAELMAVELPVVVINPRQARDFAKATGRLAKTDRLDAIGLARFAEAIRPPIRPMPDEKTTELQEKLARHRQLVQMHTAESNRLAQAHSKAVRRSIQAVVKIIEQQLEVVDQDIDQRIEECPAWRDKDCILQSVPGIGPHTARTLLSSLPELGQCSRQQIAFLVGVAPLNRDSGKMRGTRSIHGGRGDVRQALYMATLTATRFNPLIRKHYQHLLKLGKKKKVALVACMRKLLCILNAMLRDHEPWNLKAST

SEQ ID NO: 515262 - protein, 339 aa, unidentified
MSIITIGIDLAKNIFAVHGVNEFGKPVLIKPKVARADLLGLIVSLPPCLIGMEACSGAHHWARLFQQHGHTVKLMAPKFVAPYRMSGKRGKNDAADAAAICEAVTRPQMRFVPIKDEHQQAILTLHRTRQGLIQDRTATYNRIRGLIAEFGIVLPQKVERLRTGIGAYLEALPGVSNQCIGDLLKWANQLTESIDRYDGLIKQLNRDNERARRLQRQAGIGPTTASALVASIGHGHEFTCGRQLAAWLGLVPGQYSSGGKQRLGRITKAGDGYLRCLLVMGARSVLSSLGEKQDRYSRWVRALEARVGYWKAVVAIAAKNARLAWAILRYGDEFTVLAD

SEQ ID NO: 515263 - protein, 369 aa, unidentified
MNNGSTVIGLDVHKETVVAAVLPPDAERARETVTIENHPKAVERLVTRLAARGPVAFVYEAGPCGYEVQRQLTGLGQPCAVVAPALTPVRPGDRVKTDRRDAEKLARLYRAGELTPIRIPTRAEEAARDVVRVREDVLADRLRARHRLGKFLLRQGRLYRETKAWGVAHRGWLHSQRFEWAALQQTFAAYLRALEEVEAHLAVLNQQVVDLAQQAPYRLLVQALRCLKGIDTLSAVTLAVEAQEFRRFPRARAFMSYTGAVSMERSSGGTVRRGSITKAGNAHLRRILVEAAWSARHGTGVSPALTARRKGCPAEVVRIAKKAQTRLHRTFWRLTSRTKPAQVAVVAVARELAGFVWAIAHQVPEGGSA

SEQ ID NO: 515264 - protein, 371 aa, unidentified
MVVARNTLWRARRNLYLLPHTPMENPTPTQPSRPNTLGIDVSKAKLDCALLRQSTPGKRLDKSVANTPAGVNALLAWLDSKGAPAATTRVALEPTGVYHETATWLLHEAGCTVVLVNPARLRSYAGAIGVASKNDQIDAALLARYGATEPLSPWQPPSEAARTLSALLARRDTLCADIQRDQNRLEKAQCAMSTPKVVVNSINKTLKFLEKELTALDAQIKRHIDDDPTLKHNDTLLKSIKGVGPRVAQRMNALLSSKSFKSAEAVAAYIGLNPVQHLSGSSVRGRSTLSKRGPSELRKLLYLPAVTATTCNPHVKAIYQRMIARGACKMSALGAAMRKLAHLCFGVIHSGKPYDPTWHPDAKRAQHAVCV

SEQ ID NO: 515265 - protein, 449 aa, unidentified
MFLPVGSPGNLPACEHDEVEVIDIEETDEAVDLVERVCALDIGKAALTVCIRVPHDGKPGHRRQEVREHATTTRSLLDLAARLHAAGVTLVAMEATSDYWKPAFYLLEAEGFTCWLLNARHVKNVPGRPKTDRLDAVWLAKVVERGMCRPSFVPPAPIRRLRDLTRYRRTLIRERTREKQRVEKLLEDAQIKLSSVASDIFGVSGRHMLQAMIAGQRDPKVLAQLARASMRAKLRQLEEALTGHFDDHHGFLCRMMLERIDDLSAKIQELTARIDQQVAPFAAQVAQLDAVTGIGGVCAQELIAELGVDMAVFPTAAHLVAWAKFAPQANTSAGKAKTAATGRGNPWLAATLGEIAVTAGRSNTFLGERYRRIAKRRGKQRALVAVGNSVLTIVWHLLADPQARYCDLGPDFYQSHRNRQRQEHHLIRQLQQLTGKTVTLTPRPATPAA

SEQ ID NO: 515266 - protein, 374 aa, unidentified
MSNYNEAFVGFDTSKLRNAVAIADGGRTDEVRFLGEIDNTEAATAKLVKKLAAKYQRVTFCYEAGPTGYGLYRQIKGLGHECIVAAPSLIPKRPGDKVKTNRRDAMSLAKLLRGGDLSAVWVPDRHHEATRDLVRTREAAMLDLRCKRQRASAFLLRQGRPYAGRSPWTKAHMSWLASQTFDYPEQRIAFEEMMLAIRQAQERLERLEQAIRAAVPDWSLAEAATALMAMRGIDLIAATTFLTEIGDLSRFRTPQELMAYLGLVPSEASTGNTIKRGPITKAGNRRARRMLVECAWSYQHPPRVGRVKQQKVDAAAPAVREIAWKAQCRLYRRYRALIRRGKLKTVAITAVARELAGFIWAVGREITGARIAAK

SEQ ID NO: 515267 - protein, 413 aa, unidentified
MEQLIQRCAGIDVGQAESVVCVRVPDAVTGAPAELIASYGTTTPDLLELVDWLRGLGVTDVAMESTGVYWKPIYYLLEDDFTVLLVNAAHIKHVPGRKTDTIDAAWIAQLLAHGLLTASFVPPPPVRELRDLTRYRKALVNEKTAQVNRIHKVLQDAGIKLTTYATDVMGVSGRAMMRALIAGQSDSAALAELAKGRMRTKIPDLRKALTGRFREHHGFLLKRMLDHVEAQEAEIAALDERIEAALAPFAAQVELLATIPGVDRRSAQVILAEIGPDMSVFPTSGHLASWAGMCPGQRDSAGKRGSGKTRKGSKWLRGALVQSARAASRSKGTYLSERYRQVMRRRGDAKAIVALGHEILLAAYRVLATAQPYTDPGPTALSRLTTGRLTRQAVKRLQDLGYQVTIAPRTDAA

SEQ ID NO: 515268 - protein, 381 aa, unidentified
MAATREDEYSALAPVLYLAFELGNDFWKLGFTVGMGQRPRERNIAARDLDALQREIRLAKKRFGLPETAPVLSCYEAGRDGFWLHRYLVEHGVQNLVVDSSSIEVNRRQRRAKTDRMDVGKLLGQLIRYRSGERKVWSVVRVPSAKDEDDRQLHRELSTLKKERTRQINRIKGLLASQGVRLPVKADFAQRLESVRAWDGSPLLPRLQARLVREYERLEFVGKQIKQLERQRVQEIRQSADPKVEQVRALMRLNGIGVNSSWQFIMEFFGWREFRSGKEVGGLSGLAPTPYQSGSSYREQGMSKAGNRHVRAMAVEIAWGWLGYQPESELTKWYEKRFGQGSKRIRKIGIVALARRLLVELWRYLETGAIPEGAVLKTRLI

SEQ ID NO: 515269 - protein, 354 aa, unidentified
MSNKSNLTVATMGIDIGKNAFHIVGLDRRGAIVLRQRWSRGQVEARLANMPPCLIGMEACVGAHHLSRRLQAQGHHARLMPAKYVRPYSKGQKNDFRDAEAIAEAVQRPTMKFVATKTADQLDLQALHRVRERLVSQRTGIINQIRAFLLERGVAVRQGLRFLRAELPIILATRSDVLSPRMLRVIEELAGDWRRLDERIDGLSQEIEALAWQDPACERLMTVPGIGPIISSAMVAAIGNGAVFMKGRGFGAWLGLVPKQISTGDRTILGAISRRGNRYLRALFVQAAWVVLVRIKDWDRYGLKAWIDAAKKRLHHNVLAIALANKLARIAWAVLSKERAFECVKTRATSSQPA

SEQ ID NO: 515270 - protein, 345 aa, unidentified
MEKHTEIFVGLDVAKARHAVAAAVAEDGRQGEVRYIGEIGADAESVRRLVAKLEKRHSRLHFCYEAGPTGYGLYRQLATLGHRCTVVAPSLIPRKPGDRVKTNRRDALQLARLLRAGELTAVWVADEAHEAMRDLIRARQVAVEDIRRKRQAISSMMLRQGRTYPGKKTWGARHTQWLQAQRFDHLAQHLVLQELLLAVRHAHERRERIEAAIAELLPQWSLAPVVEALQALRGINLVTAVTVMAEVGDLRRFESPRQLMGYLDLVPGERSTGESVHRLGISKAGNGRVRQALVESAWCYRHPPRTGRANTMFMSVSRPRCVTSPPRRRPDCALGIAHFRSVARS

SEQ ID NO: 515271 - protein, 331 aa, unidentified
MKISDTVGIDMSKLTFDVRIHKSQSYEKFENSNKGFKKLLKWVHNNSSFSKENILFVFEHTGLYSHQLSVFLTEQNVPFSLVPGLEIKRSLGISRGKDDKVDATKIALYAYRLRDEIKTYKLPIEQVLSLKRLLSLRDRLVKQRAGFKASFKEQKRILVKKDNKTLFDIQEKMIKYLTKQIEAVEKEMKIIIQSDEKLNKQFKLIISIKGIADQTALFMIAYTHGFTKFKTWRKFASYCGIAPFPNTSGSSVRGRTKVSNLANKKIKSLLDLCAKSTIQYNSEMKTYYNRRLEEGKNKMSTINIIRNKLLSRIFAVVQRQTPYVDITKYSA

SEQ ID NO: 515272 - protein, 407 aa, unidentified
MEVLYPRCAGLDVHAGSVTACARIATDAQVTYDHHTVPTTTRGLLALAEWLTTHGCTHVAMEATGVYWKPVWHVLDAQFTLVLANAMHIRNVPGRKSDMNDATWIADLLAHGLIRSSFVPPAPIQELRDLTRTRRQLVHEVARHVLRIQKTLEDANLKLTQVMSDIVGVSGRAILNALIAGEMDPNRLADLTRGRLKATRADLVDALHGRVTDHHRFMIKLHLTHIDALETAVTTIEARIGDALGPCRAAVSLLTTMPGLSETTARVLIAEIVTDISRFPSAGHLISWAGLCPRLDESAGKRRSTRTRQTTPWLKPTLINAAWGATRKKDCYLRAQFLRIKSRRGAKKAILAVASSMLTAAYFMLRDGVEYRDLGAQHFVERDKEQLAKRLIQRLRDLGVAVEVKAA

SEQ ID NO: 515273 - protein, 385 aa, unidentified
MQKLNDLSRSLAPLNPDSTLIAVIEMSQSSWLVAGIVPGIERHPLKKLEPNEGELLRLLMRWRAEATKMDCTITRIAVAYEAGRDGFWLARWLRARDIETYVIHPTSVAVSREHRRAKTDRLDTGLLKRVFTGWLRGEPDHCHMAAIPTLAEEDAKRPNREREGIVRERTRIVNRMKSCLARFGVRNFKPTLRKTPERLATLVTPEGGHLPPNTLLELRRDMARLRFVTDQIKEVEQARAQRLERTPQDKTHAMVRLVARVIGVGIETADMLVHEILSRSLRDRRAVARYAGLTGAPDESGSKRREKGLAKAGNARVRRGMIQLAWRFLIFQKDSQLAQWYRTRTEHGGKKRKTMIVALARKLLIALWRLVTTGEVPAGVVLRAA

SEQ ID NO: 515274 - protein, 401 aa, unidentified
MAKLWAGIDAGKGHHYCVVIDAEGNRLLSQKVRNDEAELLQLLGAVLDLADSGQVVWATDLNHGGPALLIALLVGHGQELLYIPGRTVHHASKIYRGDGKTDAKDAAVIADQARMRTDLQPLRAGDEISVGLRLLTARRADKSADRVRAINRMKALLLEYFPALERAFDYTRSKGALLLLTKYRTPDGIRRAGQARIHAWLKKHGTRSSAALAKDAVEAAKSQHTIVPAQHVAEGIVAALAREIAGLNQELAEIDALIAEKVAEHRHTEVLLSMPGFGPVLAAEFLGATGGDLTVFQTADRFAGVVGLAPAPRDSGRVSGNNHRPKRYDRRLLRVFYLSGLSALKSCPASRTYYDRKRVEGKTHIQAMLSLARRRLNVIWAMLRDGTTYTPAPKMPQLLAA

SEQ ID NO: 515275 - protein, 339 aa, unidentified
MNKVSTVGLDIGKKVFQVHGVDAAGVVKVRRSLRRSQVVTWFAKLAPCLIGLEACATSHYWGRELRKLGHEVRLIPPAYAKAYVRRNKNDAADAAAICEAVSRPGMRFVAIKTEAQQAIGGVHKVRALLLKQRIMLINHLRGLMAEFGLVVATGPQHVGELLAILADPEEGGVAEPLRGALLGMTEVLRGLERRIEAIDRQVVAWGRSNTTYRHLITIPGYGPILASAVAALVTDPTTFRSGRDFSASLGLVPRQEGTGGKVKLGPISKRGNGYLRRLLVNGAMSLLGSKRGRQDPWIAKLLASKPRKLAAVAVANKLARIGWAIMMRQEDFHTQPAAA

SEQ ID NO: 515276 - protein, 375 aa, unidentified
MNSIIYLGIDVHSTNFTFCALSVTLGEAPKVIAENQSEADGICALEMVEYLKKQYGENTNVICGYEAGCLGYTLYHTLESHGIECRILAPTTMPSTRGKKRIKTDKRDAKVIAENLAYNTCSFVTVPEDGDMEIRDFIRMRDDHKLALKKVKQQILSFCMSHGYRCDSKHWTIAHIKWLRTFECTKMHREILNEYLLTFDSLMEKINRFDSRIEELSFGEKYHQDVKNLSCLLGIKTIGALSVLVETGDFTRFPTAQKYASFLGLVPGEHSSAEDVNRLGITKAGNTHLRKILIEASQSICKGSPGYKSKALRARQQGCDATVIAYADKANERMRRRYYKLISKGKKRNVAVTAIARELACFIWGIKTGNIEIAS

SEQ ID NO: 515277 - protein, 429 aa, unidentified
MNYTQNEKIEQVTDSTMVVGVDIGSQIHYARAFDNRGRELTKRIFSFHNDLEGFNSFNLWAETLKTENKKTAVLIGCEPTGHYWFAFAKYVNDHQKRLVMVNPFSVKKIKELDDNSPKKTDSKDPKTIAKLVVDGRYSIPYMPEGIYAEIRDLVYSRDRIMKQHNISANRIQRWLAIHFPEYLGLYTRFDAISGLAVLEKAPLPKDVIALGVNGIRKIWHDKKMRGRGVTEDRAKTLVEAAHNSVGLDGGIGTKSELYMLLEEHRLWTSQLEAVNKVLEEMILKVPHVEKLLAIKGVGSITIAGFIAEVGDIRRFDSPKQIQKYAGLELLENSSGKHKGRTRISKRGRRKLRKILYQVMVPLLARNKEFRGIYDYYVTRVKNPLKRRQAMVAVSCKLIRVFYAVLTKGVEYDRFKMMSDIHRKSDIIAA

SEQ ID NO: 515278 - protein, 309 aa, unidentified
MEAVVVGIDVSKQRLDFHILPTNEAFVEGRDAAGIEAAIVRLVPLNPRIVAVEATGGFETVVAASLSAAGLPVVVVNPAQIRAFAQALGKRAKTDPIDAAVIAQFVVATNPEVRPLPDAETQALADLVARRRQIIQMIVAERQRQKRAAARPARSIARLIKALEKELTSVDQDIDEAVRGSPVWREKEDLLSSVPGIGQTIARTIIAELPELGALDRRQVAALSGLAPWTRQSGQWRGKSFIGGGRSSVRAALFMGAMTAARRNPQLKAFHTRLIAAGKPKMVALIAVARKLLTILNAIIRDNRPWQSA

SEQ ID NO: 515279 - protein, 317 aa, unidentified
MERCKLNTIIAGIDVGKGRLDVALYGRSETLVINNSPAGIGSLLDWLKSHGVTRVGLEATGGYERAVREAMGFAGLEVVMHQPLEVRLFARLKRMKAKNDRLDAALIAAATAQVDAVRAASDPRLSQLAERLTAYEQMSDQAAQMKTYLEHVTLKDIIRSYQARIRSLENLKARLLKDILALVAVHPDLAQRLALLRSLPGFGPVVAVAVLIRMPELGALEPGKAAALLGVAPFDSESGQHKGQRFIQGGRSRPRRLVYIAALAAKRVDTGFRAFAERLRSRGKPPKLVLVAIMRKLIEAANLILRQQRPWRTRPAQ

SEQ ID NO: 515280 - protein, 418 aa, unidentified
MKVIPPIEAMYERCAGLDIHKKTVVVCVLITLANGMVEKFLRTFSTMTADLLALDEWLHSLGVEHIALESTGVYWHPIYNLLEDGRNIILVNPQHMKAVPGRKTDAKDSEWLADLLRLGLLKASFIPPSPIRELRELVRYRKTLVAERAQEINRLQKVLEGTNIKLASVATDILGKSGRAMIEALIGGEQDAQALSELARGRLRAKLPDLRLALEGRVQPHQQFLLKQILAHIEFLEQSILDVQQEIDQRLPLFEEILLLLERLPCVQRTAATAIISEIGIDMSRFPSHKHLASWAGVCPGNKQSGGKRLSGATTSGNPYLRAILCEIACCISRCKEPNYLTALYHRIARRRGRQRAIVAVAHSLLVSIYYIIRDKKEYQDLGADYFDKLDTARIERHHVRRLEQLGYTVTLTPKEAA

SEQ ID NO: 515281 - protein, 422 aa, unidentified
MDCTTVAGPWRVLNVAFDVSSDWLNWTYVAHVEAVTGECDNQTDAIRDQLGQIRQDAEQAGYSEVRVICESTGVYHRSLLRIATQLGFRTNLVSGEAVSQYRRVQFGDNSKTDAKDPAAMLTVAQVGRLIKHRQLDGHYAQLRELHRLVIRLECRRRLAKNELHAELRTYFPDLRLSKEVMFGPTGRALFTAFAANPQRIIEAGRDEFARRIKDLSPQTKQLTLDRIWEAARSSAWQEVDAGVRQILEESVSGLYAEIAAYSQKIVELERRMQQLYAELQQTNPRLPSARKGVISGRLLACLVAEIGPPEDFSSWRQLMRYAGLNLTEQQSGHWRGQTTISRRGRSEIRYVLNKIAWPLVRRSQLFGDYYWKKREVDRMPGNKAMTAVMRKVLKMFYGWSRSQAEFDRQRVFGTNVSLEAVA

SEQ ID NO: 515282 - protein, 317 aa, unidentified
MNDSPTFVGIDVSKDKLDVFIDSTGQSLTVANEPKGIASLLDQLRPLNIQLVVVEHSGRYERRCAIELMDAGLPVALVNPRQTRDFARAINWLAKNDRIDARLLMEFGKRVQPRLSQKTPENRVQLDELITRRRQLVEMRAMEQTRRQQAATKRIVMSIEKMIRQLDEQIQDLDRRISKLIENDDDWRGQAQLLQSVPGIGPVVSSTLLAELPELGKVNRQEIASLAGLAPFDRDSGRWKGKRSCFGGRASVRSVLYMAVVAARRCNPIIRSLADRLTAAGKPFKVVMIACMRKLLTILNTLLRTGQAWSPTMASAS

SEQ ID NO: 515283 - protein, 311 aa, unidentified
MGVGRYAEAASPPEAAESLQEGSMRHIGVDLHKLAFTACFLEEDDSQHLATFPLTPEGLAAFRAQLVATDKLALEVGQNAYFFHDQVRDAVGEIQLVSPYQFAVIAKSTKKTDRHDARALARFLKLGCLPTVVMPDDRIRELRQLFTAREAFVKVSRQLKNMGHAALVRNGVASRKSDFASGVGRRRLGLLQGLRPSDRRILDSVLRQLEAVEAELIELERAIIRAGKNLPGLKRLLQVRGLGLVAAIGVLSEIGDIARFASAKQLVSYSGLATAVHQSGGTERYGHITRQGRKRLRGFMVEAVLSLARFS

SEQ ID NO: 515284 - protein, 504 aa, unidentified
MVLGHARCGAVTAAVRAIQSGEHLPGHLDAIVERLRPAYLKANSVPGDLIDQVVRAQILGTVSALAHDGPLAALVNRGELGIKADVCVRLPPAREGGRRTSRIEALPATWRDITDLGQRLLDDGVQIVVMEATSEYRRSWYYLLEACGLNVWLASPSHARQLAGRPKTDRLDCQWLARLAEMGLLRPSFVPPPEVRALRDLTRTRLHLVRDRTRLWQRLEKLLEGALIRLSSAVGDMAGIKSARRILEAIADGERDPGRLAALAHAGVKGGRDGIRAALEGMMPGEHHIRLIRTLLGLIDGLDREISALEDEISAHLAAMAGAWGVTADGVPSPGPGPDPAVLPAGERLAEVPGISADLATAIIAETGLDMSRFPTAAHLVSWAGLSPVAQQSGKRGKKAKKGKGDAYLKGYCGQAALGAARTSTFLGERYRRLARRIGGARAQVAVARSILTIVWHLLADPSARYADLGPDWHARKVNRDRATRNHVEHLKALGYHVTLTPAA

SEQ ID NO: 515285 - protein, 341 aa, unidentified
MAILYAGLDVSDKKTHICIVDEKGGLRWRGVCVTDPEALSRTLKKRAPSLDRVVLEGGPLSCFLYHGLRERGLPAVCICARHAKGVLSTRLNKSDVNDAEGLAQLSRTGWYKEVHIKDKDTHLDRTLLRVRHQLIKSHADMLNQLRGLLKLFGLRLGRVTTPGKRTERLIYLFEQQPALKPMLLPLIKALDALEQEIAKLNRQLKRRTAVDPTCRRLMTIPGVGPIAALTFKASIEDPARFKRSTDVGAYAGLTPRRFQSGEMDASGHISKFGDQMLRRALYESANSILGRLKKGCALKTWGQKLAEHKGPKRARVAVARKLAILMHKMWISEQEFVWRKA

SEQ ID NO: 515286 - protein, 335 aa, unidentified
MKHYAGLDLSMESTQVCIVDENGRKLVSEKVESTPEALAAMLERYRPIERAVIETGRMSPAICLGLRELGVPVVCIDARQAHQSLKAMRANKTDPHDAAGLAQLARTGFYKEVHVKSLAAHGVRSVITARSHLVEARVRLDNTIRGLCATFGYRPGAGQGKAFLERIMQAAHIPGLGDAIASLLSVRAELVEQIKEMDHRLRIIASQSQACEILMTIPGVGVQTSAAFAAAVDEAGRFRQSRDAGAYFGLVPRRHQSGELDWTGRITKQGDGTVRKLLYEAANSILTRSRETFALKTWAMKIAKRRGLKKARVALARRLAVIMHAMLRDGTLFQA

SEQ ID NO: 515287 - protein, 437 aa, unidentified
MKQHDGSRLADFCQFRKEIRGSTEYLIVGLDIGKERHNAFFGTATGKTLHKGMFFDNTYEGFQKLLMRTDALKVQYGLRKVVFGLEPTANYHKPLGEYLIKGGYLVVLISSAATPKNRELLDGRWDKHDTKDSANVADLISQAKCLYYDCPGEDLLSLRGLLSLKRRLKKEEHGLRVRIRNQLLAQYFPEMDQHFGSAASLNVVQRCLDPSTISIMEYDEFCRTVAPGKTNMAQQRRLTQIWRVAKQSIGCSVGEAVAVEAQIMVAGLNRVRETIKTLEAKIEAICMKFPEYSFLLTIPGFGPDVSSKVLCAIGDPDRFTNGKQVLKMAGFDLCASRSGKTSNSATPVISKHGKAELRYALYQAAIISSLHYKEFIIYHMNKIKGREREKGIGTKMRVKLAAKLLIIAWTLMKKKETFDPKYLITGDSKAQPEKELK

SEQ ID NO: 515288 - protein, 318 aa, unidentified
MTQDLFIGIDISKAKLDVAASPGEHSWSVSNSEEGIQELIAKIRQLGTPKIVLMEATGGFERRALVMLNAAGLPATAINPRNARDFAKSIGLLAKTDKVDAKALALFALKIQPPCRPLPDPQTRALQDIIVRRRQMVDMLTAERSRLAIVENPKVKRELVQHIAWLKKRIHIADYDLDQAIKNSPAWQPKSDLLKSVPGIGPVTASTLLALLPELGTLTNKQAAALVGVAPFNRDSGTMRGRRCISGGRASVRNVLYMATLAATRFNPTIRAFYKRLCKLGKLRKVALVAAMHKLLGILNAMVRDQTPWRSNKVEISS

SEQ ID NO: 515289 - protein, 398 aa, unidentified
MTESSDYESVQVFIGVDVGKDTHHAVAVNRSGKRLFDKALPNDENKLRSLISDLKQHGQILLVVDQPATIGALPVAVARSEGVLVGYLPGLAMRRIADLHAGEAKTDARDAAIIAEAARTLPHALRTLKLADEHIAELSMLCGFDDDLAAQTTQASNRIRGLLTQIHPALERVLGPRLVHPAVLELLQRYPSPEKLASLGEKKLATQLCKLAPRLGKRLAADIIQALTEQTVVVPGTNAAVVVLPRLALQLITLRKQRDEVALEVEQRVLAHPLYPVLTSMPGVGVRTAARLLTEVACRAFASAAHLAAYAGLAPVTRRSGSSIRGEHPSRRGNKTLKRALFLSAFAALRDPISRAYYTRKMSQGKRHNQALIALARRRCNVLFAMMRDGTFYTPTAS

SEQ ID NO: 515290 - protein, 358 aa, unidentified
MVQSKGINFNGQNIYIGIDVHLKSWSVTIITESGYKRTHSQKPSAKELFEHLKKHYPNGKYQAVYESGFSGYSTYYALKEYGIKCMIIHAADVPTSQYENVMKTDAIDSEKLAKSLKGGLLRGIYVRGKEELDDRSLIRLPKTLQKQLGGYKSRVKHLLYNNGISYPDCFENSRSHWSNRFIYWLENEVRLLSSTRLSLDLLIDQVKLFRKNLLKATRMVRDLSKKPQYSRQYENLISIPGIGLVTAMCLLTEIGDVSRFHNQREFASFLGLIPSCHSSGENIYNMEKTFRGNKHLGPLVIESAWVSIRHDRAMSMAYGAYCKRMKGQEAIIRIARKMSNRILSVLKSGKKYQYDKVR

SEQ ID NO: 515291 - protein, 312 aa, unidentified
MVQHSVFVGIDVSKTHLDIHLHPSGQHWRCGTGSGELDALATRLARLEPRAVGLEASGGYEARLADRLHAAGLDVHILPPGRIRGFARSIGQFAKTDRIDAGVIARYLQAMCHDLAPYQPDPIRQRLHALTAHRRRILAERGGLAGQLDTVQEPLVRSLIEERLAGIVQEIKRLETAIARLVAEDRSVQQRQARLRQVPGVGPVLAITLLADMPELGRVSAKVAAALVGVAPYARQSGSSDRHGRCAGGRKHLRDIAYMAVLSAIKVNDPVLGGFYQRLRARGKPFKLAMIATVRKLITILNAIAKSDKAFA

SEQ ID NO: 515292 - protein, 468 aa, unidentified
MAERRIAGIDLGIASAHTVVVLTGDGREVCRRKCVPTAESLGWIEQQALQGAPEGARLEIVLEPTGPAWLAPVVFFGRRGHACYRVSSQKASDLRRFLSRHAKSNSIDAETLARLAIVAPETLLPIELPGANRASLDRRVRACDRLTNEATNHKVRIKDLVRQLLPITPLTGDLGKADLAVLERWADPNVLLKVGKARLTAVIAKTSNNHLGADRAEEWLAAARISVELYGGDSAVAFTDLAAEVATEVRLLRAIGRELDDHAEVREVAYRNVDPWELARSLPGLGEVGGPVLVAVMGRSQRFARGGQFKSFTGLVPRSSETGDSERKGQPMSKAGSSMLRSQLVRSAEHARHQDPQLAQIYFTQMVERGATHTKAVCVVAAHLAERAWATMVRGTPYVVRDTDGRAVTETEAKAIIAQHFTVPEEVRRRRRNTKKGKVPHQVLVGHVSGQRSRRDNEAAFPSRILGS

SEQ ID NO: 515293 - protein, 335 aa, unidentified
MLVIGCDFHTRFQQIAMVDTTTGEIVERRLEHETGEARQFYAALPSGARVGMEATIEARWFEKMLSESGHELWIGDAAKIRAAMVRKQKTDPRDARHILDLLVTDRFPRIWIPSWTQRDVRQMLRHRHKLVGFRTSAMNQLHALAMGQGVCRKKKLWTPVGRRELESLELDPWASRRRLELLQLLDQLNVWIEELNQAVEKEAASCPEARLLMQEKGVGPVTALAFVLTLGPVSRFPSSKRVVSYLGLNPSEESSGGKQRLGRISKQGNSMMRWLLVEAGHIAARFDPELRRDYVRLKFRRGTSVAKVAIARKLAVRLYWRLREQSHQTAGSHAG

SEQ ID NO: 515294 - protein, 391 aa, unidentified
MIFVGIDVAKDKHDCFITNSDGEVLFQVFTIQNNREGFDALFSRIQSVSPDTSNIKVGLEATGHYSYNLLGYLIDKGLPTFVINPLHTNLYRKSLSLRKTKTDKVDARTIAMMLMSDVNLKSYSDTSYHNEELKSLTRYRFDKVQERAQLKQSVSRLVTILFPELEKLVPTLHIASVYILLSELPSAGKIASCHLTHLTKMLENASKGRYSREKAIEIRDAARTSIGSNMPAKSLELKHTLRLIGELDSEISEIESEIKQIMDQISSPILTIPGMGYRMGAMILAEIGDFSRFDSPDKILAYAGVSPSTYQSGKLESSYSHMEKRGSRYLRFALINAAKYVCHWDETFGTYLQKKISEGKHYNVAITHAAKKLVRLIYAMEKSGKSYIKTE

SEQ ID NO: 515295 - protein, 323 aa, unidentified
MDAGTGRAATATSIVGVDVSKDKLEVFVDSTGESFSVDNTAGGVAELARRLLSLPAPAALVVVENTGGYERRCAADLMDAGLPVALVNPRRTRDFARAMQWLAKNDRIDARLLAEFGRRVGPTPAVRVPPERALLDELVGRRRQLVAMRAAEQVRLQQASGKAVVASVEKHLRQLSAQVHDLEKRIAKMVEDDDDWRGRAELLKSVPGVGPAVAATLVAELPELGSVSRQHAAALAGVAPYDDDSGRWRGRRHCSGGRAPVRCALYMAALTARRCNPQLRALSDRLAAAGKPFKLVMVACIRKLLTILNAVVRRGTPWVPQPT

SEQ ID NO: 515296 - protein, 374 aa, unidentified
MNFIGIDLHTNRFTCCYRNERSPVDKPSQGRITRTFELDAEGLAAFYRTLTDDTYVLVEATITTFSFVRLFKERVKEVVIANTYELKQVSLARCNTDKIDADKLCRIIKTQVLSGEPQASPVTLPPEEIQVLRGLFTTYRLFQKQNVQLKNRIHSLLKERLYGFTQEEIFDQRNRKKIRAITPGSALHFQVNLLLDRLERDEADMETLKDRILLEAAPFMAQIEILTSMKGISVFIAIAIIADIIDVSRFKNSKAFTSYLRSAPRVANSNTSVSIKGINKKGRKLSATLLTQSLNHVMDASVKLRVWYDRLCEYKKPGLVRTGLRRRVLAEIFQMLKKGEYHYGRNEQNHFAKMVQYRRFLEKQKNNAISKKIA

SEQ ID NO: 515297 - protein, 343 aa, unidentified
MNYVGIDLHKKTIVLCVMNQDLKVTHRRTFACCETEAILAFFRGLGTFRAVVEATASYEWLVELIEPSAEKVVLAHPGKLRVIAQSTKKTDRLDAQVLAEFLARGQIPEAFRPTQRQRQHRALVRHRQHLKQSVTALKNKMRRIASDYNADRKDLFTAAGWKALEAAGLSDADRFVLDQLHAGWQHLEGQLKALAARLKGFAAEAPAKEAEARAKLATIPGVGPVTVDVVVSELGDVTRFHSVKAVCAYAGLVPAVRQSAGKGKDLGITKAGSPLLRWALVEAAWRVIRQGAAWRRVYEQVKKKAGGKKAIVAVARRLLVVMAAMLRDGTNYNFLKVGEPQPT

SEQ ID NO: 515298 - protein, 405 aa, unidentified
MNAVGIDVSKGKSTVTIRRPGDVVLMPPRDIPHTQSAINALIEQIKSLDGETKACMEHTGRYYEPVANWLSDAGIFVSAVNPILIRDFGDDSLRAPKTDKADSKKIARYALDRWAKLKQYGSMDKTRNQLKTMNRQFGFYMDQKTAMKNNLISLLDQTYPGANDFFDSPARSDGTQKWVDFVYTYWHVDCVRSKSLQAFTEHYQKWCKRNGYNFSASKAEKIYQSSSDLIAVFPKDDSTKTLIRQAVTMLNTASQTVETLRLKMDQTAATLPEYPVVMAMNGVGPSLGPQLMAEIGDVTRFTHREALTAFAGVDPGKNDSGKHNQKSVRTSKKGSPSLRKTLFQIMDGLIKRSPVDDPVYAFMDKKRSEGKPYYVYMTAGANKFLRIYYGRVREYLASLEESQKS

SEQ ID NO: 515299 - protein, 395 aa, unidentified
MFIVGIDVAKRSHEVCMITSDGQTVQRPFSIRNNCTGYNLMLEKIRKHTNIKSQIVFAMESTAHYWLALFTRLRKDGYHVILLNPIQTSAMRDMFIRKIKTDAKDSFIIAELIRFGRYAESNVAQDRLLALKELCRNRFYLVDMAGDLKRKLIALIDRIFPEYEAQFDTIFCKSSVALLKKYPTPQRLSNAHLDKLTELLWNSSNGHFGEWKARELKDLARNSFGVEDCDGAYSTLILLMLDQIQSLSGKADALEKEISQLFQSFDTTVTTIPGVGPIIGAVILSEVGDISRFSSADKLAAYIGVDPSVNQSGEFQAAHAHMSKRGSPYLRRCIWMASQVAVQRDPMFRAYYEKKAAEGLKYMTIIGHVTRKMTAVVFAILRDHKVYEPVLPTAA

SEQ ID NO: 515300 - protein, 325 aa, unidentified
MSKNSFQAALTVDGLNFHGQEVKNNASEIPQYFRDLLIRFGFKPSQLIVCMEHTGVYCYPLLDYLVKHGIKIYVQPAIQIIRSQGLQRGKSDKIDSRRIAKYVFKNHSELKSWTPKRVVVQKLKALLVVRERLLKAKNQFEIPIKESKEFIEKSIRKQVEKSCKCSIQAIKKDIKSIDLEIAKIVKDDARISHQMKLATSVVGVGPIIGANMIVTTNEFQDIRHPKKYACYSGIAPFEHQSGKSVRGKTRVSHFANKTMKTLLHLGARSAVQSSPELKMYYQRKCAEGKPKMSVLNAVCNKLITRVFVCINNNRLYQKTYERAVA

SEQ ID NO: 515301 - protein, 344 aa, unidentified
MTTIDYIGFDIHKKTISFCVKAQDGTILEEGTIPALRNKLLAWAQARPRPWIGAMEATLFTGWIYDLLKPLAQELKVAHPPMLKAIAAAKKKNDKVDARMIADLLRCNLLPECYMAPVAIRDLRRMLRYRNLVVRQTTRMKNRMAGLLMETGVAYNKQRLHGKAYFSELLEGSLQEVPGSVVELLKLSRGQVEFFVAIQRRLLKGLREHPELSQRVMRLQSIPGVGEILALSWALEVGEKDRLPSMARAVSYCGLTSAQHSSAGKEQRGPISKQRNRHLQTVLIEAAKLAPRYNSQLAAVHERELQRGNRNRATLAVARKLVAYLMAVDKSGQPFQMRDKEAAA

SEQ ID NO: 515302 - protein, 356 aa, unidentified
METAYDGRQVVGMDLHRRRSVLVRMAEDGRRLATARIANSPAELRREIARAGKSPKVVLEATYGWYWAADTLAAAGAEVHLAHPLGVKAFSYRRVKNDEKDAADLADLLRMGRLPEAWIAPAQIRELRELTRYRQKLVGLRTSCKDQVHGVLAKLGIPVTCTDIFGVAGSAWLDQLRLPQPYAGKITSLRQLAGELSTEITMLSGVIGDLLAGDRGYQVIRQLPGIGPVLAAVIIAEIGDVTRFRRADQLCSWAGLTPRHRESDTKVTRGHVTKQGSRMLRWALIEAIVHQPAGSRPRAAKDAIIARRGKQARNIAKVAAARQLLTLVFYGLRDGQIRALAPRSAPPAATSAGPAA

SEQ ID NO: 515303 - protein, 356 aa, unidentified
MQKQVTKKIDFTGTTLFIGLDVHKKSWSVTIIVDGIEHRTFTQPPDPESLYHYLERMFPGGSYNSAYEAGFCGYGIHRELNSLGIKNIVINAADIPTSQKDKLQKRDPIDSRKIARSLENGSLKGIYILDRDLEELRSLNRTRFYLMRDLRRSKNRIKSFLQYYGESIPAEFDNNQWTLKFVSWLKQVQMKTFSGQDAFSHLIKSYEHHREQLVHLSRNIRIRIREYDNELYSLLKTISGIGPLTSSALITELGDINRFQCIKNLSSYVGLIPRVRESGETVHVGGITFRCNTFLRTLLIEASWQAIRMDPALMQYYQKHVINNKGHKVIIKVARKLLNRISYVMKNRKPYLTGVA

SEQ ID NO: 515304 - protein, 401 aa, unidentified
MISVGIDVSKGKSTVCILKPYGEVIASPFEVVHTESELKNLCQMIQRFDGEVRVVMEATGIYHLPVLLALQEQGLFVAVINPFEMKEYASRGLRRVKTDKKDSIIISNYGIDNWYRLENHRGRDDVYSELKLLGRQYCHYMELHVKALLELTHMLDYTMPGVKKEFRSWNESNGKDKLSDFVERYWHFDNITVMSKDEFIDDYIVWAAEKKYHQNQSKAAELYDLASDGIPTLSSNTPSTKMLVLEAIRILREIDSTLFKIITRMKELTKSLPEYETVRSMGGVGDVLVPKLIAEIGDIRRFHNGKALIAFAGIDAPPYQSGQFTGTNRKISKRGSKVLRKIGYETMRVLKTHKAPEDDTVYRFILKKESEGKSKRQAKIAGLNKFLRIYYARVNEVYQRV

SEQ ID NO: 515305 - protein, 417 aa, unidentified
MKEEFTFYVGVDWGVEFHQACILDAHGEKICQRRIEHSGPGMLEFCDFLQALTNGEASALAVAIEVPRGPIVEALLEHNYAVFSINPKQLDRFRDRHTVAGAKDDRRDALVAADSLRTDQHCFRRVRPEHPDVIRLRELSRTEETLGIDLRRCVNQLSQLLLRYFPQLLRFCSTPDEPWLWALLELAPTPQQAAKLTEKRLKQLLAKYRIRRWTAEKVGEILTAPPLPLAAGSAEAISEHALLLLPQLRLLHLQRKQVADRTQQLLDQMATSTNDFPMSQEHRDIPVLLSLPGVGRIITATMLAEGSHILSLRDYHALRAHAGIAPVTKQSGKSRQVLMRYRCNQRLRNAFYHWARTSIQHDPRSKHHYARLRQVGHDHGRALRGVADRLLAMLIAMLKSGQTYDPNRRSTANLTPA

SEQ ID NO: 515306 - protein, 369 aa, unidentified
MSTSVVYVGLDVHKDSIVIAVARDGREAAEKWKSIPYDGVRLRKALKMLVKNGQVLKVCYEAGPTGFGLCRRLREAGIDCSVVAPSLVPGKPGDRVKTDRRDARKLAHFLRSGDLTEVYVPDEAVEAIRDLERARDDAKCAERVARHQLSKFLLRHDRHWDGTTWTVKHRDWIRGQKFEYPAQQRVLEDYLKSVEDLAERVERLTAQVEELVQDTVLAPLVKALQAFRGISVVSAVTIAAEAGDLRRFATASQFMSYVGLVPSEDSSGKRRRQGAITRCGNGHLRRIIVEAAWHYRHLPLMSKELRRRNKGLAPGVQRIAWEAQKRLNQRLYHLIHAGKSVQKAITALARELAGFIWAVGQEETLLEAV

SEQ ID NO: 515307 - protein, 466 aa, unidentified
MTRPRKSTSSRRGRKPHHRAKLKPQDWTLGLSVVHPHAAGIDVGNQQHYVAVPPHLDQEPVRTFGCFTADLKALVDWLEQRGIQTVAMQSTGVYWIALYDILSERGIKVFLVNARDTKNMPGRKTDVQECQWLLKLHVYGLLKNSFRPEEEICVMRTLWRQRQQHIGDASRSIQRMQKALTQMNLQLANVISDISGWTGQAIIQAILEGERNPVELAKLRDPRVKASADQIVKSLEGNWRPELLFVLKQEWDSYQSFQRQIQECDGELAKHLRTIQQKANPTQLEPVPRNKRPHGNVPANLDLREELYRITGVDLIQIDGMNVLTAQTIIAECGCDMSAWATEGHFVSWLNLAPRNQISGGKVIGRDQRKVVNRAGQALRNAASTLLRSNSYLGAQYRRLKGRLGAPKAIKAMAGKLARILYRLLKHGQRYVDKGNDFYEQKYRAQQIKILSKKAAGLGLQLVQSA

SEQ ID NO: 515308 - protein, 419 aa, unidentified
MKIIKNQNTKNINGQTLIVAVDIGKSVHYGYLRTPMGEEVKPFPFSNTHQGFQEFWRRLSQFRRQQGLKECVIGFESTGPYGEPLFHYLRNQPVKLVQINPMHTKRLKDLTGNSPNKTDRKDPRVIADVISLGHALTLVVPEGAAAELRRLTHARERAMKRRTALLNQLHYLMAVVFPEFLEVMKKISTKTAIYLIKNYPAPQHLVAMGSESLSKVLKKISRGQITEQQAQRLFEVAQKSIGIHEGQQSMLLEIQYLVGAVEKENRFIADLEKQMIVSLNQIPYSQSILSVKGIGKITAAGLIGEVGDFGKFKTIAEITKLAGLDLYEISSGNHKGQHRISKRGRSLMRKLLYFAVVNMIRSSGLLHEPWHQMVQRGMPTMKIMVALSRKLLRLIFALARDNTVYKENYTQTNTYKLAA

SEQ ID NO: 515309 - protein, 387 aa, unidentified
MTKTTSSPSPAAIDYDATLILAVETSNKNWVLAAHVPGLGPVKAKQTIDPSAEALAKAIEGYRRRATGCGATVDRVIVVYEAGYGGFWLARWLDTRGVEAHVVQPSSVPVDRRKRRAKSDKIDADLLLRTLLAWLRGEPRVCSMVAIPDEADEDARRPAREREELIRERISLTNRIGATLATLGVDDYNPLRRDRRIRLEALRTALGKPLPEHAKAKIVRIIERLELVLAQIAALERRRDAVLEKEAPGRAERMIQTLARLRGIGAQSATVLVYEAFIRPFVSGKALGSYAGLTGTPFNSGGSEREQGISKSGNRRLRGAMGELAWLWLRYQPDSALAKWFRDRMAGANGRMKKVLLVALARKLLIALWRYVTNGVVPDGAVLEPAS

SEQ ID NO: 515310 - protein, 481 aa, unidentified
MKPKQREQRQPAIASKRCKWHEMNRKQRRETIRKLQSEDLSLEVIHPDAAGIDIGNESHYVAVPQKRDSQPVRRFGCTTAELRAMADWLKRCEIRTVAMQSTGVYWIAVFDILEEAGFEVYLVNARETKNLPGRKSDVQESQWLMKLHTYGLLRNSFRPAQEIRTMRTYWRQRNDLVRSACRHIQRIQKTLTQMNVQLANVLSDLSGVTGQAIIKAIVGGERDPHELAAYRDPRVKANEEQIAQSLEGHWQPDLLFVLQQEQDGYEFCQKQISQCDRQLEKYLLQREDRSHGAPLPEEKRKVRLKKKHGNQPQFDLRSELFRMSGTDLTRIDGVDVLTAATIFSEAGHDMSRWETENHFVSWLRLCPDNRISGEKIIGQGRLPTNNRATIALKMAASGLRKSHTYLGAQFRRLRTKLGAPVAIKAMAAKLARLVYRMLRYGMKYVDQGMEFYETQHRKLQINSLKRKAAQLGLQIIEAAAA

SEQ ID NO: 515311 - protein, 438 aa, unidentified
MRAKCNDDLSTVNFSTIGLDVHKNRLVACAVHVQHDAKGREVHEKEYFESTGTYSGRQRLTEWCSSQNADVILMERTGIFWKAPFRDLEKADLHPVLINPRIFNRGSDKRKTDKSDATWLANLARLGLYRASFIPAEPYRSLRLVQSQIKSLVAERQRLKNRLVKVLDDSGFRFTVAFADIGGASSQSLIAGILEDAPREELALMIDPLCKKSIEEILDAVSGELSQINKDIVQLILRLIETHTKEIETLEQTVIRELKKCEKVKQNIRLMTTIPGFSEKSAQLLMSMIGPDFVENFSSPHAFARWLGVCPGNNESAGQIKSGRTPHGQRLIKKVLTECAQAACHTKGSHLAVLFGGWKHKGFCKAVMAVAHKLALLIHWVVVNQKPYIDKEFDYTGVFKQDGQRRPRWIRALRRYGLMTLADVEKEKAARGWIIAKA

SEQ ID NO: 515312 - protein, 317 aa, unidentified
MEQRQTSTKIAGIDVGKSKLDGAVHGLEDTTQVDNAPAGFSELIGWLKARAVGRVGLEATGGYERAVRQALEAAGFEVVVHQPIEVRRFAQMKRWRAKTDRLDAQLIAAATAQVDAVRAAQDPRLQALAERLTTYEQITDQAAQLKTFLEHVTLADLTQAVRVQIAAMTALKAKLAAEILKQIKTHDDLLARYRLLVSLPGFGPIVAATHVIRMPELGQMRRGQAASLIGVAPFARDSGQYKGQRFIGGGRSRPRRMLYIAALAAKRWDPALRAFAEQLLARGKPPKLVIVAVMRKLVEAANLVLSRGQPWLRQPPA

SEQ ID NO: 515313 - protein, 448 aa, unidentified
MFIMHYKRLLTFIDGVSSYLSVGLDVGADFTWMSIALPNGSFVGKPFKIIHSDSRSRDLAVTKIKEAQETYSLKSRCFLESTGIYHIPLLCFLRDKGFDCSVINPIITKNSTNINIRKLHNDKFDSKKAALVGLNVSLKTSILPDDSVVDLRNLVRDYYYFKDLQSAVALKLTAELKVSFPAYAKTFSKVTTQSSLKLLSSYPLPADMLAAFKEDIVDIIRSTARFGEAYALRKYDAIIAAAQDAAVFGRALPSNAVRIRLYIDTYQEYQKHLDALLKTLHETVEKLQDTLIYDQICLLQSLRGIGFLSAVVLIAEMGNFKLFSSPKKLYAYFGLDPAVKQSGKLNGDKVHMSKRGSSLARRVLHMAALNNVKVDKGSGTPVNPVVYDYYTRKCSGKKKPVAMGAVMHKICNIIFAMLRDNKPFEIITPEEHCRRFATEHPDKIRKAA

SEQ ID NO: 515314 - protein, 351 aa, unidentified
MSLVMLGVDPHKQSHTATALVTGTHQQLATLRVSASPSGYRQLLGWARQFPQRRWAVENARGLGCHLTQWLLARGETVQDVRTTATARVRELSRGRGRKTDALDAAAAAGIAALQGDAEQLQPENATVVLAVLEERRSNLVGQRTRSVNQLHAVLRELIPGGAPRKLRADRAAALLRGVRALTAADRARKQVAWDLVAEVRGLDRRLAMIGKRIQDTVTALGSRLPETVGVGPIIAGRLLGRTGRASRFPTAAHFASYTGAAPIEVASGERARHRLSRAGDRQLNHALHIIALVQVRSPGCAGYDYFRRKLAEGKTTREAMRCLKRRIADHVWRVMLSDEQARHHPEPQAI

SEQ ID NO: 515315 - protein, 337 aa, unidentified
MLFCGIDLHSNNCLVVVSDDNDKVVYSRRLPNDLTTICAALSPYQQELFGVVVESTYNWYWLVDGLVAAGYSLHLANTTAIKQYDGLKHRGDESDARHLAHILRLGLLPEGYIMPQPVRAVRDLARKRMQLVQQRTTQLVSIQTCLMQQTGSAVAGNDIKRLTCAIVDDMSLDPGTTLGIKANLFVLQALQKQIDIVEEVLAAYCHGNPEYKLLTSVAGIGPILATIILLETGEIERFADAGNYASYCRCVSSTHISNGKKKGEGNTKNGNRYLAWAYVEAANFAIRYCEPARKFHQRKKAKRNNVVAIKAVAHKLARACFHMLKTGERFSVERCFT

SEQ ID NO: 515316 - protein, 367 aa, unidentified
MKKVSTVAAAQSRNISQQKLTIGLDLGDRNSWYCVLDETGQIQLEQRVRTNAKALQEVFGALPRSRIALEIGTHSPWISRLLRELGHEVIVANARKVRLIGESRKKDDRLDAQTLARLARIDPELLYPVRHRSVQAQADLTLIRARAGLVRARTALVNTARGLAKSYGERLRSCNVRNLNPEKAESLSPELQAALEPLLNAIESLSERIVEYNERIENLAQQSYPQVALLKQVKGVGTLIALTFLLTLEDPHRFRKSRDVGCYLGLQPGRRNSGQSEPQLHITKEGDPYLRTLLVQGAQHILGPFGVDCDLRRWGLKLAGRGGRNGKKRAIVATARKLAVLLHHLWVSGEVYEPLHNSSRTTVATAA

SEQ ID NO: 515317 - protein, 412 aa, unidentified
MQDILTCAMGLDVHRDIIVACLVKGAVDAEPEAETRTFSTLIPEMQKLRDWVIESECRNIAMESTGIYWQPIYEMLESCFDGEISILVVNARHMKNVPGRKTDMKDAQWIATLLRAGLLKGSFIPDKAFRELRHLTRYRKSVVHDITAQKNRIDKFLQSSGFRFTAFLSDTFGASGRNIVRHLIEHGSIDREALDKCLKTKTRNRIDEILVALNGSLSEHQRRFLNMVFRHLEDLEAHKHTVEDEITEEVLKHTDALNLLCSIPGIDVTAAAAIIAEIGTDMSSFPDSQHICSWAGLSPGNNESAGKRKSVHINKGNPYLKNMLCEVAWIMASHRKLYLSGWYWKVKQRKGAKRATIALARKILSIIYTMLKTGTPYNEECFEQRRLRCERKRANRLVNELQKLGYVVVAPD

SEQ ID NO: 515318 - protein, 349 aa, unidentified
MSDTKPGFARFVGVDIAYLDFTAATLLADAKPKLEAKPFSQTREGFTQFIERLLETGIAASSQLVVMEATGSYWIAPAIALHEAGFIVSVVNPAQAHYFAKAQLKPAKTDALDAQTVAQFAQALELPHWTPPPQSYHELRQRLTQRDNLVKLRNQVENQLQALSVNPVIIASVQAQLQELSITLSSQLKAMDKEIKEVLEADTSWNKSIALLQTIPGLGILTACWLVVATLNFTVCDSPEALGRYVGLAPIERSSGSSIRTHPQIGHSGHSRLRTLLYLGTLTSVRFNPAIKAFWQRLRIEKNKPMKVARCACARKMVHIAFAVVKSGKAFEADYQPKPKAKEVQAVAV

SEQ ID NO: 515319 - protein, 312 aa, unidentified
MTSEKFVGIDVSKRGLEVQVHGEAESRKFGNDPDGIRSLLEQMKALQPVLIVFEATGGYERRAAKALSEAGLAVAVVNPTRVRRFAEALGILAKTDKIDAKVIAHFASVVCPAPNGQHSDLEEQLAACVERRRQLLVELAAEKNRLATCPACMRENIEEHIAWLEEHVDSLEAEIHSCIMQKPEWQTRAEIIDSVPGVGPVTATTLIAELPELGQLNRQKIVALAGLAPFNKDSGPKKGKRKIFGGRSGIRRPLFMATLSATKFNPIIRAFYESLLKRGKEKKVALIACMRKLLVIINAMVRKGEAWRVSPA

SEQ ID NO: 515320 - protein, 392 aa, unidentified
MPDVSSNVSARTARVWVALDVHKNAITAAVLPAEGGQVELAQLENSEKAIRRLVRRLGGSQGLAVCYEAGPCGYAPYRLLVSLGVACDIVAPSLIPVRPGDRVKTDRRDARKLVRLYRAGELSFVRPPTPEQEGLRDLVRCRDDLRRARTAARHRVGKQLLRYGRVYREGKKSWTLQHRAWVRRQRLDDPLAQAALEHMLCALDALDAQLAAVDRHLEQVAASHPWSDPVRWLCCFRGISTLTALGLLAEIGDFCRFATARELMSFLGLTVSEYSSGERRLRGSITKTGNRHARRLLVEAAWHYRHPPRLSARIKANQPLVPPEALARAWQAQIRLHERHRHLTSNGKLQTVATAAVARELCGFIWAAMTRQPLREQQHPTQTTTPKQALAA

SEQ ID NO: 515321 - protein, 361 aa, unidentified
MEKVHFANWQRHPDSLEVTMTTIKYFVGVDIASATFTASVGATPWKVILKAHTFENTGDGYQAFLDWLANQQIGAKESVVCMEATGVYSEGLAYFLFAAGYPVAVQSPLEVKRTFKPYGPKTDAVDSLQIAEYACRHIDKLSFWQPRNEILEQVKALLATREQFVSQNVAHKNALQAIQRKPVRTLFAEQAHAQMIEQFKKQIQAIDHEIRRLIESDPTFKEMLSLLLSVPGVGLLLASHMILLTQISLDHKELASYLGIAPNEHSSGTSVFRHATSRHFGPAAVRKLLYLASCSVRTHPAQFTSYFARKTKEGKPAKLLLNNIANKLIKIICAVLLTKKAFIKNYHSVQPWTFQNTLTGS

SEQ ID NO: 515322 - protein, 348 aa, unidentified
MVMIGIDPHKRTHTAVAVDDHEVVLGEQLVHARAGQVAELVAWAGEFGCEPRTWAIESAGGLGYLLAQQLLAAGEHVVDIPATLASRVRLLGSGRSEKNDPNDARSVAIAALRAPVLVAVRVEDHATVLRLLARRHSQIAWARNKSVCRLHALVGELVPGGIAKEVVVSQAIGLLEGLEPEGAVARERHRLAFELLEDIARYDTQRKASQQRIKAAVAASGTTLTEVFGIGDVIAATLIGHTGDVARFANEDKFAAYNGTAPIEWSSGNPKRPTHRLSRRGNRTMNHALHIAAVTQLRHAHSPGRAFYDRKRDEGHTTKSAIRALKRRISNTVYRHLVADARRITNQR

SEQ ID NO: 515323 - protein, 421 aa, unidentified
MPTTLCVGGDIHQETLQLRTIDKTDGHEVGKPLTIQNNRRGADQAIAHLVQLLTQQGYTHLELGLEATGLFWLPFYVYLQQSPDLKPFQPTWVCFNPKLVAKFKEGVTLSEIKDDEHDALAVAERLRFGHLPATYVPSSEWLALRMLTRYRYRLSRQIAQEKLRALTRVFLKASEWQRGQPFCDVWGATSATLLTEFTVTEIAAMSLPQLTELIQEYGRKQFDDPQATARHVQRTLQNSFPVTPDLDAALTVVLQVAWTHIRDLEKLMHRLDRQIAARMEHFPNPLLSVQGLGPVITAGIIAEIADIHRFPDHPQLAKFVGLVWHKHASGQFVAEETRLAKTGDVYLRYYLIEGANLMRQHNLDYQAYYRRKFAEVPKHQHKRALVLTARKLVRLVFALLTQNQSYVRPQAKPTQEAVPTA

SEQ ID NO: 515324 - protein, 427 aa, unidentified
MKYTQNKKIEQVNESTLIIGADIAKQKHIARAQDFRGIEFGRALTFDNSRDGFIRLLNWIRNLKEEQDKQQVIFGIEPTGQYWLPLAQFLRQHGIKIVLVNPLHVKKSKELDDNSPTKNDVKDARVIAQLVKDGRYSEPNIPAGIYAELRVGMNMRDRLTEDMQCIKGRIDNWLDRYFPEFNTVFKSWEGKAALLTLQSFPLPQEITDKGIEGILECWKQEIKRAVGKKRAVELLEAAKESIGLTEGLIMARQELKTLLSQYRVLKREIDQLMEQIENILKEIPGTQEMMTIPGVGIVTVAGFLAEVGNLENYHHPRQIQKLAGLNLKENSSGKHKGQTRITKRGRPRLRALLYKCTMPLVAKNPEFKALHRYYTTRTKNPLKKKQSLIALSCKLIRVLFALGKKKISYDGGKLLKDSTIVSLQEAA

SEQ ID NO: 515325 - protein, 344 aa, unidentified
MEDSKHLNSDSQLGLEPVSARQGQLIMNSKNNQKEINIGVDTGKHQLDIHIRPLDITFSVSNDEKGIKEAINLIKQHKATRIIIEATGRLEHAFILACAKHKLPFVVANPVHVRRFAGAIGQLAKTDPLDAQLLAHFGEAIKPPLSQLKPAVLQRMSDLLSRRRQLMTMQTMEKNRLQIMPKDIAGFIKPILTAIKNQIQKTDQKLLKLIDSCDEYKERNDIIQSMPGVGNVVAFSLLSNMPELGYITNKQAAALVGVAPINKESGTYQGKSRIRGGRHQIRTVMYMAMMSAMQCNPIFKATYQRLLAEGKPKKTAIIACVRKMVVILNSMVRNGTYWNPEMGR

SEQ ID NO: 515326 - protein, 347 aa, unidentified
MSDREIILGVDTHKDIHVAAIVDQVGRLLCTSEFLASERGCRRMLAWARRYGAVRLAGVEGTGSYGYGLARLLEAAGVEVREVNRPNRSLRRLRGKSDPADAEVAARAALSGEASAVPKDRDGPVGQLRALMVARRGAVKARTQTSNQIKALLVTCDEAVRGRLEGRRDGELARCCGRLRATDGTKTALRSLGRRWLHLDEEARALQAEITQIICSVAPKLILRPGVGVLSAAQLLITAGDNPGRLRNEAAFAALCGATPVDASSGKTTRRRLSRGGDRSANAALWMIAHVRMVRDPRTRDYAARRVRRGNTRKEILRILKRYIARELYPIVLESLSPTGMNGRCLT

SEQ ID NO: 515327 - protein, 341 aa, unidentified
MREVSTIGLDIAKSVFQVHGVDAMGSVVIRKRVSRAKVLEYFGELPPCLVGIEACPSAHHWGRELQGLGHTVRLIPPSYVKAYLKRGKNDANDAAAICEAVTRPSMRFVPIKTKEQQTALMLHRARQLLVRQRTMLSNALRGHLAELGIVSAKGRNGTAELLRIIADGRVSPAACGILKVLARQYSAIGIEIVSIDKSIMALHRRCEASRRLAEIPGIGPIGATALVAEIGDWKTFSSGRSVAAWIGLVPKQNTTGGKDRLGSITKQGNRYLRWLLVVGAMAVIRYARKHGTEKRPWLGRLMERRPTKVAAVALANKIARMAWAIMVRGERYKEPKLLLAA

SEQ ID NO: 515328 - protein, 337 aa, unidentified
MEYFAGLDVSMAETQVCVMSRDGTVVYEAKVASMPADIATALTLAPTCERIVFETGRMAPMLYHGLSQLGLPIVCIESRQAYQALKSLATHKTDRNDARGLAHLARTGFFKPVYVKSLPAHALRSLIIARKKLVGQRVTLENQIRGLAVVFGVRLPRALTAAFIRQALCASEGITGLSAAMRGLVAARTAVLAAVVAIDADIRQLVRASAACRRLMTIPGVGQLTALAFTAAIDDPSRFRRSRDIGAYLGLVPRRYQSGEVDYTGSISKCGDRRVRTLLYEAANVMLTRYKPALKLKDWAFAIGKRSTMRKARIALARRLAIIMHAMLRDGTEFHPA

SEQ ID NO: 515329 - protein, 416 aa, unidentified
MNAVGIDVSSRKSTVAVLRPLGEVVCLPFDVTHDIAGLASLAEKLKAIDGETRVVMEHTGRYYEAVAKALHEAGFFVCAVNPLLIKEYGANSLRRVKTDKADAVKIARYELDNWADLRDFTPMDAIRYDLKTLNRQFQLASKQRTASANNLIALLEQSFPGIRKCFDSPVRSDGTQKWVDFAHSFWHVDCVRKQPFAAFCERYRKWCKLHAYFFKLRNAEKVYALAKSAVVLTPKSKVVKVLVQEAANQLISISRSVEVYRAEMDRLAAMLPEYPVVMAMYGVGKSYGPQLMAEIGDVRRFERKQALVAFAGIDPMPNQSGDKNVRSNKSSKRGSPYLRKTLFNVIRTYLQCAPQDEPVFQFLNRKRAEGKPFYVYMLAAANKFLRRYYAKLRDYFASLDTLQPVAPIPTILKATL

SEQ ID NO: 515330 - protein, 453 aa, unidentified
MKGKRRSKAKVAVMTHVTEANAAGIDVGSTEMYVAVPPDRDEQSVRRFATFTADLIRLAEWLKQCGITSVAMESTSVFWIPLFQILEEHGFRVCLVNARHVKNVPGRKTDVLDCQWLQYLHSVGLLRASHRPSQSICALRSIWRHRESLVQSAAVHIQHMQKALDQMNLQLHHVISDITGTTGMAIVDAILAGERDPQKLSELRNKQIKASPDTVRQSLIGDYRAEHVFVLRQSLTAYRQYQTWIADCDREIEKQLAKLESKVDPVEKPLPKSKDRHKPRRNEARFDLRTHVYRIFGVDLTAVPGVSSITAQVLLTEVGPDLTKFATPSAFASWLGLCPDNRISGGKILSVRTRHVVSRLSAALRMAAQSLHRSHSYLGDCFRRMRTRLGTPAAITALAHKLARILYHLITTREPYAESVFAAAEQRGQERKLNHLKKQASVLGFRLVENCVP

SEQ ID NO: 515331 - protein, 315 aa, unidentified
MEQPSAALTFIGIDVAKDRLDVHLRPSDEAFALSRDGAGLDALIERLGALAPALVVLEATGGFEVAVAGALAAAGLPLVVVNPRQIRDFARATGRLAKTDRLDAEAIARFAEAVQPAPRPLPSAAAQALGELVARRRQLVEMIVSEGQRRRQTRDPRLQRRLEAHLTWLQKELSALETDLDDAVRGTPAWRATEDLLASVPGIGKTSARTLIAELPELGSLDRRKIAALVGVAPINRDSGTFRGRRMVMGGRASVRTALYMPTLTAIRHNPPLQAFYQRLVGRGRPAKVAITACMRKLLTILNAILRDHRPWQTA

SEQ ID NO: 515332 - protein, 386 aa, unidentified
MKKVKSNIECAGMDVHYKFSNVTFRDSGGKVVSRQRLNHPDRNQLTMRMNHWPKGIPVVLEASFGWGWLSDLLIEAGLEPQLSNCYKLEQMRKARGWVKTNKKDADMLSLLPFETTDWWQVWRAPVDVRNRREQMRFRGDLVGLQTVVKNRIHAIFHRQGIFHEFSDLFGGKGRKFLAELCLENPTELSSEALLALRGQVILLDHLRRQLADVARILRKQLVKTPLIKRLKTIDGIGLILAHVLTAEIGRIERFRTHKALASYSLLAPRSHDTGQDDPSRSPQGRHLGTHGNRTLKWAFIEAAHGAVRSGGRWRAMFDRVTDGGKKDRNRGYIKVARELVKVVYVVWKKGVDYQPVAPVRPGCRKKEKSRSGTGQLLHPMVHALTA

SEQ ID NO: 515333 - protein, 355 aa, unidentified
MTSTQYIGMDVHKESISIAVMNAAGKIVMECVIETKASILLQFIHGLRGDLHVTFEEGTWAAWLYDLLKPHVTEVVVCNPRKIALLKDGSKSDRIDARKLTEQLYMNKLKPVYHGEHGLRTLKELARSYLTITKDLTRVMNRLKALYRSWGIPCAGNEVYAPRHRSEWLSKITEAGVRRRAEHYYQQLDALRSLRQEVRRDLMVESKKHKAWKLLRQIPGIGPIRAALLVALIQTPHRFRTKRHLWTYSGLGLETHDSAQYRVVEGQLQRSKKPVTLRGLNENHNHDLKDIFKGAAMRASTAAGPLHDFYEALLAKGRKPTMARLTLARKIAAITLIIWKKEVRFDANYLKQQAA

SEQ ID NO: 515334 - protein, 388 aa, unidentified
MERVVIGVDPHKLSATIEVVDHQEKLLGSGRFTTDKAGYAAMRKYAKTWPERVWAVEGSNGTGRPLAQRLLEDGEQVVDVPAKLAARVRLFDTGHNRKTDARDAHSVAIVAVRTETLRVLQLDGELEALRLLCDRREALTRRRVQTVDRLQALLAELLPGQVKRDITTGQAKAMLASVRPRDIAGKTRRRIAVEELAELIAVEVKIKTTTAELKEIVLARGSRLMDLHGVGPVVAARILADVGDITRFADRNRFASWTGTAPLDASSGEQNRHRLSRAGNRWVNHMIHIAAISQIRLNTDGRVYYRRKRAEGKKSLEAIRCLKRRISDAVYRQLVEDTAEATPRDVDTGPGGHCGASQESSAADSHPLIDTSDQPLPGPAKETLRPTG

SEQ ID NO: 515335 - protein, 343 aa, unidentified
MQAITTIGLDIAKSVFQVHGIDAEGQVVIRRQLKRRYVLAFFHKLPPCLVGIEACASSHHWSRELQALGHTVRLMPPAYVKPYVKRHKNDATDAEAICEAVTRANMRFVATKTPEQQSCLTLHRTRHLFIRQQTSVINAIRAHLAEFGIVAPVGRKGVEQLLGVVSDASDKRLPEVARGCVAALGAQLQTLKAQILQFDRMIMAWHRSSEASRRLDDIPGVGPVLATALVASVADPKVFRSGRDFSAWIGLVPKQNSSGGKDRLGNISKRGDRYLRSLFTTGALAVIRYVKIHGTRHRPWLTALLARRPTKVAAIALANKIARMAWAIMAKGERYKEPAALAA

SEQ ID NO: 515336 - protein, 342 aa, unidentified
MRRPKYYVGIDISSASFTAAAGTTPWKVVIKAAEFENTTDGFVAFMDWMKERSILADNVVLCMEATGVYGEKLAYYLYANHYRLAVEPPLKVKRAFMPHGHKNDRVDSQQIAEYSCRFYDELRYWEPKEELLEQIKVLLATREQFTVQKTTHQNILKALKRKVVATPLAEQLHQQSIRQIKQNIKQIDAEIQRLIDQDPKYGQMIKLLMTVPGVGLLLASNILLMMETTPDDPTNPRQLASYIGISPYECHSGSSVYRPASSRHYGPAMARKLLYLASLSVRTHNQTFKKYFLRKVAEGKSKKLVLNNIANKLLKIMCAVVRTNTPYISNYRSVHPSLLLNP

SEQ ID NO: 515337 - protein, 346 aa, unidentified
MQHYVGLDVSLKQTAVCVVDQAGKIIREGMVASEPKAIADFIAANAPQVVRIGFESGATSTWLWTELKKFGLPVICIDARHAKAALKMQINKSDRNDAIGIARIMQCGWYKEVRVKDLDSHAIRALLSSRALLVELKRDLENQIRGLLKNLGLVIGRCKLNTFTTRATELIDGKPALVAAVEPLLKAREAIGRQIADLDRKVLRLARSVPQVRRFMTVPGVGPITALCYLATIDDPTRFKKSRSVGAYVGLTTRRYASGETDRTGRISKCGDGMLRSYLYEAANVLLTRVAKWSALKAWGMRIARRRSLSKARVAVARKLAVILHRMWIDGTEFSWSSEGTAMHAA

SEQ ID NO: 515338 - protein, 374 aa, unidentified
MSGFVWTSGNRGRVIIIPVTAIRAECARFAGWEIIMTKYVGLDVSQKTTVLCIVDGEGHRLWRGECSSSPDQIVHTVLQHAGAGASIGVETGPMTPWLVHELRARGLDVICLDARHARAALRMQLNKTDRNDAEGLAQIMRTGWFRAVHVKSFDAHRARALLGARQQLVGMVTRLSNHIRGVLKTFGMLPGSVRGRSFAERVELLVAERLDVAPIVRPMLTAWSKLREQIAAFDKAIRAEVKQSRECRLLMSVPGIGPVTVLAYVSAIERPDRFRRSRLVGAHLGLTPRQYQSGDVDRSGHISKCGDTLARLCLYEAATVIMTRVKRPLGLKIWAMKIAKRSGTNKARVALARKLAVILHSIWRTGEAFCWGAH

SEQ ID NO: 515339 - protein, 343 aa, unidentified
MKQYIGLDVSMKETAISIRQDGKRIWRGKCASDPQLLAAVIRKRAPYARRVVFETGPLSVWFYHALTAEGLPVICIDARHAKAALDMAANKTDANDADGLAHLAEVGYYREVRVKGFDSMLIRTLITARRQLLKMRLQISNQIRGLMKTFGLVVPKGAGSVFERNVRNLLQGEKKLARIVAPMLRAWSDIRQQTAELSKQLAAMAREDQHCRLLMSVPGVGTVTATAFAAAVEDPANFRNSRAVGAWVGLTPRRYQSGEVDNDGHISRRGDNQLRGLLYEAAAVILNRSTDTSTLRTWALELKERLGFKRAAVALARKLAVIMHAMLRTGELFDPHGGTHAAA

SEQ ID NO: 515340 - protein, 321 aa, unidentified
MITRIYVGVDISKNWFDVCMSLDENAPVKRFSNTPDGHAKFISEDSLSCGEIRVCMEYTGGYEIPLALACRKAGFIVSLIDGGKFSLYRKSFGRAKAKTDKQDARLLARFAQERKPAQWFPVPDEYRTLRELIRHRQCLLEGKKAWGCRSAFTVESEMVTAQRRTHCELLALQIKELDREIAARILAHVSLNEAMGLLVSIPGIGGVAGARILAETGPITNYNSARDYAMAAGLRPIVLHSGMKTPPGKLPVYGNAELRSALYFPVITSIRHKTGVFEFMQRIEANGEKVKMTVITAGMRKLAHIVFGVLSSKTKYDKDKK

SEQ ID NO: 515341 - protein, 363 aa, unidentified
MIVIGADIHKSTHALAAVSGDGGTMAGELEIRADEAGHRAALHWARELGPERIWAIEDCRHLSRRFEQALLAAGERVLRVPPKMMGQSRRGEREPGKSDQIDARAVARAVVREGAERFPSAFLDQRALEIRLLHDHRSDIVAERTRMINRLRWHLVDLCPELESSIPARRLDSDATLGRIARRLRHEPHTARARVALKLVAGIRAISREAKEIERELRSLIIDYRPTLLAEQGLGVLTAATLIGRTAGAERFPSDAHFARQAGVAPIPVSSGRKDRHRLHRGGDRQLNRALHVIAITRARIDPQTRAYLERKRAEGKTNREALRCLKRHLARQIHRLLSMPPANLDSRTRIQLNAAISVPCLT

SEQ ID NO: 515342 - protein, 349 aa, unidentified
MLADELDYVVGVDTHLDEHVLAVVAAPAGAVIAQQSVRASARGYAAAVQFADTHAMGARVWAIEGTGSYGAGLARFLTGRGETVLEVSRSPRAERRLRGKDDSLDAIRAARALLSSETLALPRSGERREALRLLLSARRSAVDVRREALVQLRSVIVTAPDRLRDDLRGLPVGRLLERCSRLRRSRCASADELATRLVLRSLARRIEAATAEAGELEAEILGHVRALAPTLLDEPGVGPIVAAQVLIAWSHPGRVRSEAAFARLAGVAPIPASSGQTTRHRLSRGGDRQLNRALHTIVLHRRQHDPATKDYIARRIAEGKGRREAIRCLKRYLARHLYRLLQQTEPQMA

SEQ ID NO: 515343 - protein, 395 aa, unidentified
MFIVGIDIAKRSHEAIIIAEDGQVVRKAFSFRNNCTGYNLLLEQVRKLTLVKSQIVFAMESTAHYWLALYARLLKDGYTVMVLNPIQSHSLRELYIRKAKTDARDSLIIADLVRFGRCKASNVPQDKILALRALCRSRAYLVDMAADLKRKLIALLDRIFPEYESLFDSVFSKASIAVLCKYSTPQKVKNANLRKLTDLLMESSNGHFGEWKAHQLKEAACSSFGIDDSGGVYSTLLGMFLEQILSLTAQADSLEKQISVFFQEFNNPLTSIPGVGTVLAATILSEIGDITRFSSADKLLAYAGLDPSVKQSGEFKSNQNRMSKRGSPYLRRAIWLASTVAVHRDPMFQTYYEKKISEGLHYMNVIGHVSRKMTAVIFAVLRDGQPYQPILQSAG

SEQ ID NO: 515344 - protein, 349 aa, unidentified
MSEPYAGRQIVGIDLHRRRSVLVRMTEAGERLETVRISNDPEYLREVMTRAGEAPEVVLEACYGWYWAADTLAELGATVHLAHPLGVKMFSYRRLKNDERDAADLADLLRMGRLPEAWIAPPATRELRGWVRHRAKLVGLRSNLKCQVHGILANAGITVPMSDLFGASGQRLLATADLATESRSRIDSLQRMITALDFEVELFAKLVAGRLRTHPGYQAIQQIPGVGPILAAVFVAEIGDITRFRRPEQLASWAGLTPKHHESDTTVHRGRITKQGSRLVRWAAIEAVQRLPGHTRIGQVRDRVAARRGRNIGVVAAARELTELVFYGLRDHHVHALAVHSPARTPLLA

SEQ ID NO: 515345 - protein, 403 aa, unidentified
MAKVFIGVDPHRLSATIEVVDERETVLATGRFGTDKAGYSAMRKHVAGWPDRTWAVEGSNGAGRPLAQRLLADGERVVDVPAKLSARARLFDTGHNRKTDAHDAHAVAVVAVRTHGLRVLSYDVELEALRMLADRREELTRQRVQTVNRLQRLLSELLPGQAKKDITALQAKQMLTGVRPRDLAGKTRRRLAVEQLTDLVILDKKIKASTTELKAMVLARDSRLMDLPGVGPVVAARILADVGDVARFADRNRFASWTGTAPLDASSGEQIRHRLSRAGNRKMNHMLHIAAATQIRLDTEGRAYYRGKLAEGKTRMEAMRCLKRRISDAVYRQLRADTQRASGAEPATARGTGPGEHCGASQESSAVDLPPHIDTSDQPLPGPAAPTLQPPRRARQATTPATA

SEQ ID NO: 515346 - protein, 449 aa, unidentified
MSRPQVIDDEEHERVHDRVAAIDVAKDTGMVCTRTPHPSRPGAQRASVWTVRARMNAIRVLGRQLRKDGIEIVTLESTSDYWRIWFFVLEACGLAVQLVTAAQAKNLPGRPKTDKLDAMWLARLTEMGLLRASFVPPKAIRDLRDYTRARTRLIHERSRCWQRLEKLLEGALVKLSSVASKLTTLSAQDMIKAMIAGQRDPEILAGLARRTMKAKHDALVEALDGMFDDHHGELAALLLDQIAALDAKVAQLGARAAELAAAIPGGWGIDPDGTTGPGAGTGPDAPALNAVARLAEIPGLSPDLARTIIAETGLDMTRFPDAAHLVSWAGLCPSARQSGPRTRSGRKGRGDTWLRGALGQAAVNASRTATFLGERYGRIARRRGKAKAQVAIARSILVIIWHLLANPEARFTDLGPGYYQTRLDTDRKLRNHLRQIQALGFTVTLTKAG

SEQ ID NO: 515347 - protein, 413 aa, unidentified
MSQILVGVDVSLKTHHVHFMDGDGQSLDSFSVPNNREGADTLIQRLLLRAKKAHVSNLRIGMEATDQYSWHIAHYLQAQFKSYEPDYQTSVYVLNARKVARFKKGYDTLPKNDHVDAWVIADHLRFDRLPRAMQEAVNYEALQRLTRTRFHFMKDLARNKTFFLNQLFLKFSGLRQDNPFSNTFGTTSLAVIEELEPEEIADMSLESLVDFLQEKGKHHFSEPEEIANYLKRLARSSYQLSKSMKDPVNLSMSVTLSLIRHIESQVKRLDKEISRLMQAISQRLVLTSVKGIGDVFAAGLLAEIGDVKRFNSHHALAKYAGLVWSQYQSGEYESEDTKRMRTGNKYLRYYLVQAADSIRKHDSDYQAFYQKKYNEVTRHQHKRALVLTARKLVRLVYSLLSTNQLYTPPERRS

SEQ ID NO: 515348 - protein, 446 aa, unidentified
MSKGSGLSRGDRNRNARLVRLRELVPPRNAIVGIDLADDTQAAVVTDHDSRVIARRRVSARAWELGEVLDWALTRAAGAGFASVTVACEPTGHRWRVLDQLAAGRGLALVCVQPLLVYRAREGEDLTRDKSDPKDAVLIARLASELRCYEPERADAVWARLRHLGARRSQLTTGATAAVNQIRDLLECAWPAVLAASGSPFRSVSWCASLAVVLDRCAGDLSRVRRLGLDRFTAAVRRELPRWGGIRPCLRIIRAVFAALSDPAGVTAHRPGALERAHLALGDWRDVRARLADTETRMCAVMDELGLADLVTTIAGLTVIGAAAILAETGDPARFATARALVKHAGLCPRDNSSGAAQGKTSISGRGRPGLRLAAWRAVWAAMPNNTVMAARFAYLTTRQDNRLARQQARTACAAALLRWIHVVITRQVAWDPAIAAGCAPAQQAA

SEQ ID NO: 515349 - protein, 409 aa, unidentified
MQKFNAATHRIETASAQVALSAAGASGETKQHAAYSGLDVHKETIAVAVAEPGRGEPIYRGEIANTPKKVAKLIVKLSEAYDGGVLLFCYEAGPCGYGLHRQLIASGHDCQVVAPSRIPKQPGERIKTDRRDALKLARLLRSGDLTAVWVPDQEQERMRDLSRARDDLKAQERKARQQLNAFLLRHGQHWPKGKSRWTPAHENWLAALKLDDPWQQVVLQTYIDAERAAGERVAQLNDQLMRALPEWSLAPVVDALVALRGIDKLAAIVLLAELGDISRFDSPKQLMAFLGLVPSEHSSGGRRRQGAITLTGNSHARRMLIESAWSYRFPARQTKHLKAKASNASPVAKQIAWKAQVRLCGRYRTLTRAGKNTKLVCVAIARELAGFLWDIVRQEMPRLVQGQAAATSA

SEQ ID NO: 515350 - protein, 344 aa, unidentified
MDHSAGLDVSVKETSVCIVDDTGKIVREVKVASEPEALLAVLKNPAYHFKRVGLEAGPLSQWLFSALAEAGLPVICVETRHMRAVLKAQINKTDRNDARGMAQMMRVGIYRPVHVKTLRSQKLRMLLTHRKLLQSKAIAIDNDLRGTLRNFGLKVGMVGTVRFEARIRELVENLPDLAALIEPLLIVRRTLREQFCILHRRLLAIVRDDEVCRRLMTTPGVGPVVSLTYRATIDVPARFRKSKSVGAVVGLTCAKYQSGEVDWDGRISRCGDEMMRTMLYEAAQAMLRSKKWSWLKAWAMQIARRRGMKKAIVALARRLAVIMHRIWVDGTEFRWTREQATAAA

SEQ ID NO: 515351 - protein, 364 aa, unidentified
MSNCITWVGIDDSAKKLDVAFVFNQEENPREQFEVMNDPDGLGRFVKKLKAQRGEVRCVYEAGVCGYTLQRLLKKKGIPCDVVAPSLTPRRPGDRVKTNKRDARKLAKLYRAGELTSILVPNEQQEALRDFLRAREDSLEDLTRQRHRLSKFLLRNGMKYRTGKAWTKGHWGWLRTCHFDDALKQEVLMQCRTTVEETQERLKTFDEKIEEIVKRPEYARLASYLMALRGVKALTALTIIAEAVDLKRYVSAPAMMSAIGIVPSEYSTGDSQRQGGITKTGNGHWRRVLIESAWHYRHSPVTSGALKQRRKNLPEEVVAIAEKADRRLHKKYVKIVNRGKRATVAAVAVARELAGFVWAIGQLA

SEQ ID NO: 515352 - protein, 338 aa, unidentified
MELYAGIDLHSNNSVVSVLDEQDRTVYAKRLPNDLGAIVAALRACAGTLRGVAVESTFNWYWLVDGLQAAGFTVHLVNTAAVKQYDGLKHGGDFSDARHLAHLLRLGILPVGYIYPREERAVRDLLRKRSQLVRQRSTQILSIENLIARNLGARVSGNEVKRWDAKCIEAMELLDEQKQAVKANLVVMNCIDGQVVQLERRILAKVKLREDFKALKTVSGIGEILALTIALETGDIGRFAGPGNFASYARMVDSRRESNGKKKGVGNAKCGNKHLAWAFIEAAHFAVRYDAAIKRWYQKKCASSLSVVAIKAVAHKLARACYHVIKDGTPFDVAKAFG

SEQ ID NO: 515353 - protein, 424 aa, unidentified
MLENSVVGIDVSKKFSDICILSPSNEIIKRLKISNNSIGMESTLKILEELERDYKTKVVIIMEATAHYHQLLANFYRTRDYKVVVINPIQSGALKNINIRKVKSDKTDAYNIALLYRLKNYNETTTNSELVESIKGLCRQHKELTDEIVEHVNRLTGFLDISFPELKKVFKDLQGKTALMILEKYSSTDIILNTDKNEIIESIKLSSHKSIIYAEKKYNELYDAALKSDKICISRASSNILIQTTVNVILSLKNALKVIDDEIKILSMENKVFKNNVELLKTIPGVGEYTACVILSELGDISKFSKPKELVAFFGLDPSVSQSGTFNRKNNRISKRGSSYVRSTLHMLAKSNVYHNRNKEYINPVMRAYFEKKIVDKPYKVVMCAVMRKMVQIIFAVLRNQKAFELRSPEEHQKLIRENHKLVA

SEQ ID NO: 515354 - protein, 308 aa, unidentified
MNSVYHTELSSLEETRGQFNGGKADIKLGIDVHQDFYVVVMQVGGSNPKPPQRFHKQAFLLWAAKLKSRSAEVHAVYEACGFGFSLQRQLSQLSIHCYVSCPQKLDEHNKRVKTDSLDAKTLCLRLDRFVRGNREALAMVRVPSEEEERSRAIHRQREQLVKVRKILEAQGRSLMLNHGIEPVKNWWKRNNFAALPLPAWIKELLQNSQPILIALQQKISALTLQLQVAAAFNQPRGLGAMTSVMIDREIGDWHRFNNRRQIASYTGLCPGEYSSGHTRLQSCVTKARQPAPACGPSGVGLATGPLPA

SEQ ID NO: 515355 - protein, 420 aa, unidentified
MGFIGGGVREQFVARIKDADPGRLLAVPIDVGRHSAAAMVCDFWGEVIAAPFDFDLDENGFKHFSVTMARAEAERDATWTRIGLESAGHYHRPLQARLEAAGIEVTLFNPAQVKENRNQDLLRSLKSDAIDLAAMAELLIRGKGRLATTRSDAVAIQGVLCLHRARKIRARTALKLQIHAQLDLVFPGLSRCVWNPIEAKVGRIMLDEGLTPERVRRLGNERFLRFCSNRGVRVTRIKAAEIVACAQGAFALDATMSQVHLRLLMADMDLLDKLDQEVKDTEEQLAEILPETPADILMTLPRVSVVRASNYGGALGDVDRFKSAAQVYRLSGLVPRRYESAGKIWTTTKISREGRVELREAILELGKALRQGHPNFARYAASLKARGKAGGVIQCAVGSRANRLAFAMMRNQTPFDPSRW

SEQ ID NO: 515356 - protein, 343 aa, unidentified
MQVSTIGLDLAKNVFQAHGVSAEGKVVLKKQLRRGQVLSTFAKLPPCLVGMEACAGAHYWARELRKLGHDVRLMPARDVKAYVKRDKTDAADAAAICEAVSRPSMRFVALKTPEQQGRLMQHRVRDLLLRQRTQTINALRAHMAELGLVAATGRQGLGLLLAILADARDERLPQDARASLQLLASQITALQAQIDSLDKRLHAQHRQCPASRRLETIPGIGVIGATALAATITDPKAFKSGRDLAAFIGLVPRNNSSGGKQRLGPISKQGDRYLRRILVVGAHSILKQARTRPDKHPWLARLMARKPGKLAAVALANKTARIAWAVLARGESYRAPTAPAAAG

SEQ ID NO: 515357 - protein, 468 aa, unidentified
MKQSPPRRHGKRPASGLSLLERINPNAAGIDCGAEEHYVAVPADRDPAPVRAFKTFTAELHRLADWLTACGVTTVAMESTGVYWIPLYEILEARGLDVVLVNARHVKNVPGRKSDVVDCQWLQELQSVGLLRGSFRPAAALAALRAYLRHRDTLVQSAATHIHRMQKALVQMNLQLTVVLSDITGVTGLRIIRDIIAGQTDPHRLAQHRDARCQASEADIIAALTGHYRPEHLFVLQQNLELFDMYHRQLAACDAAIEAHVAMLAAQAPPPAGPLPPPRTKTKPKARDNAPRFDIRTPLHQLTGVDLSQIDALGPYSALRLLAEIGTDMTRWPTEKHFTSWLTLAPHNKISGGRLLSAKTPPSANRAAGILRLSALSLGRTETALGAFYRRLAYRVGKAKAITATARKLAILVYRSLKEGLLYQDPGAAAYDAQHRQRVIRRLRQRAAQLGFALINRTTGQVLEGAVS

SEQ ID NO: 515358 - protein, 347 aa, unidentified
MTIVGNPDAVVGGVDTHADVHVAAVVNHLGGVLGVESFTTTSNGYRQLVSWLRSHGELVLVGVEGTGSYGVGVSRYLQREGVTVVEVDRPNRQTRHRKGKSDPVDALAAARAALSGSATGSPKTRDGNVEAIRVLMIARRSAVDARIETLNQLRHVVFTATSEIRTKFTGLTAVGLVNKATALRPREGDDPVRYTTYMTIRALGHRVQYLREETKRLNRMLRPLIRQTAPTLLEVYGVGYDTAAKLLVAAGDNPERIRTEAAWANLCGVAPIPASSGKTKRHRLNRGGNRQANSALYHVVITRMRHDQKTRDYVARRLTEGKTMGEIARILKRYAAREVFKHLPHPA

SEQ ID NO: 515359 - protein, 421 aa, unidentified
MQKPISEYAAIVGIDWADKKHDVCVRLRGEDRVERSVLEHRPTKIKEWANGLRERFGGAPIAVCLELSQGPIVSALLEYDFFVIYPVQPAMLARYRKTFTPSGAKDDPTDAEYALDMVRRHPEQFKPLRLESAEMRSLRKLVEARRDLVDDRVRVTNRLTYALKAYFPQVLSWFRDKDTEVFMAFIERWPSLQAAKRARPSTIEDFFRSHNVRRRATIERRVEDIKVALPLTTDGAIIEPAQLVVATLLSQLRVLVQSIHRLDTEIEKLCAQLPDHRLFASLPGAGKVLSARLLAAFGGQRERFPNAASLQKYAGVAPVTERSGNSHWVHWRWSCPTFLRQTFIEWTAQTIPRSFWAKTFYERHRAKGASHNATIRALAFKWIRVLWRCWVDRVPYDESRYLDALRKRHSPLLKYAADSST

SEQ ID NO: 515360 - protein, 355 aa, unidentified
MPITLGVDGHKQQHTIVALNAVGQPLDERTIPNTSAGYQQAFDWACQLDEIRTWGVENSGHLSRGFAQFLVAQHERVFEVSPNLTSRQRRRSKASTKSDSHDALAVGRIALQEGDKLPVVPLEDETMQVKLLVEHRDNLVREQTRLINQLHRHLMDVDPQYKQHIGEVNRMRTLRTCQSYPLDENDPIQQVRGQLIQQLATLILQLKQPIKALEAQLKTLVQSIAPTLGTILGINTLNAAQLIGQVGRIEQVASAAALAQYAGLAPIRHGSAGPYYHRVNPRGDRQLKTVFHLIAQTQSRCSPHAQAYLAKKKAEGKTPKHAFRCLKRRMVDIVYAVWKKGQPYQAPVLAAAEVA

SEQ ID NO: 515361 - protein, 320 aa, unidentified
MAKQVEQCTIGADVAKGWLDLYVADTGHLERIDNTDEAIGVWLRGVTGPIQIAVEATNRYHELFIERAHEQGHRVYVIDAFKLCRYRDAVGHRAKTDYHDAELLARYVQQEQAHLQCWQPRDPRQTKLWRLLKRRATLVQTNVRLRQSLADIGTLDAAAKELIGHCQQLIRQVDRELHAQARRLGWQQDLQRSSGVPGVGPLTSLALVATYHRHRFRNADAFVAFIGLDVRVRDSGKFRGRRKLTKKGDPEIRRLLYNAAMSACRQPHWKSYYQSLRARGFSGTAALMALARKLLRVCYALLKKQVWFDPQVRYSPCNAT

SEQ ID NO: 515362 - protein, 427 aa, unidentified
MPYRIAGVDVHKRMLAVVVSDVEIDGEYHFERRQLGSNPAQLRLLADWLLEQQVQEVVMESTAQYWKPVWAALERYWKPICQKREGAGPMSGTLHLAQAQSNRARRGRKNDFADAERLVKRLVAQELTLSFVPDPEQRLWRTVTRTKYQQRRNRVQLQNRLEALLEEAHLKLSSLVSDLLGASARRMLKALADGETDPAALAMLADYRLRAPQELLRDALGACQELNPVYRRLLKAVLEELELIEKQIGQLDQEIADLLRPHQNQVQRLAEIPGLGVDSAQQILAEVGATAAAFPSERNLSSWVGACPGDDETAGVSRSHRSPRGNRQMRRILNQAANAAVKYKGSIFQILYRRYVPRLGHNQTIGVIAHRLCCLIWKILHQGVHYEERAPEVNKKSQQYRAARMIRDLRSLGYRIELPNSQAPVPA

SEQ ID NO: 515363 - protein, 341 aa, unidentified
MNKVTMIGVDLAKSVFQAHGATAAGEPVFRKKLSRGQFLKFLSEQPPCVVAMEACASSHYWGREIMKLGHDVRLIPPIYVKPFVKRQKNDANDAEAIAEAAVRPTMRFVPVKSAEQQSRSMVFKTRDLFVRQRNSIINALRGHLMEYGIIAPPGRNFVKKLAEQIDSPDCDLPSTVIELSRVHLDQLSIITDKVVAIERRLKAESKSDPETIRLQTAPGIGPFSAMAIKAFAPPLEGFKRGRDFAAWLGLVPVQKSTGGRQVLGRTSKMGQRDIRRLLIIGAMTRIRWAIKNGPPKGSWLEQMLDRRPRMLVAIALANKTARTIWAMMTKHEDYRDPIAAA

SEQ ID NO: 515364 - protein, 394 aa, unidentified
MTAAYTGNVSTPGGVLHLAFELGWTHWKLAFTIGYGQKPRQRTIGARDLSALEQEIAKAKKRFKLGDTAPVVSCYEAGRDGFWLHRYLTARGIANVIVDSASIEVNRRKRRVKSDKLDANKLVNMLIRYHAGESKVWSVVWVPSVVDEDQRQLHREMQELKDDQTRHSNRIKGLLASQGLALEVVDELLPNWLGAARLWDGTALGSDLQRRLVREYERWQFVHRQVLDLSRERRRRMLCDETAHVGMVRRLLGLAGIGVNGAWLLVYEFFAWRKLQNRKQAGALVGLTGTPYHSGGSEREQGISKAGSKRMRKMLVELAWCWLRWQPESALSYWYARRFGTGKGPARKIGIVAVARKLFIALWKYLERGEIPAGAKLVDWRSKLIRCKVKKPAA

SEQ ID NO: 515365 - protein, 367 aa, unidentified
MKKVSTVVTKQSRNISQLRLTIGLDLGDRNSCYCVLDETGCIQVEQRVRTSTKALQEVFRAMPHSRIALEIGTHSPWISRLLSDLGHEVIVANARKVRLIGESRKKDDRLDAQTLARLARIDPELLSPVQHRSRQAQADLMMIRARAGLVRTRTAMVNTARGLAKSYGERLRGCNVRNVNPEKAESLSPELQTALQPLLAAIESVSEGIAEYNERIETLAQERYPQVALLTPIKGVGTLIALTFLLTLEDPHRFRKSRDVGCYLGLQPGRRNSGESQPQMRISKEGDPYLRTLLVQGAQHILGPFGADCDLRRWGLKLAERGGRNGKKRAIVATARKLAVLLHHLWVSGEVYEPLHNSTPVRVATAA

SEQ ID NO: 515366 - protein, 413 aa, unidentified
MDVLHPRCCGLDVHKSSISACILLREAGRVQKHQRRFGAMTQDLQELAEWLGRFGVTQVAMESSGVYWKPVWNILEGQFTVVLANAQHIKNVPGRKTDQKDAEWIAQLLQYGLLRPSYVPCEIIRDLRDLTRMRASLSQEAARLSSRIQKVLEDANVKLASVATNVLGKSGRAMLEDIISGEDDPERLASLALGHLRVKIPQLRLAFEGKIRSHHRFLLRRLLDQVQFVEQEIALLDQRLEDIGGQRPELAQAVERWDTIPGIDRVAAWALLAEISDNMAQFPTAEHLASWAALCPGNHESAGKRLRGTTRQGSPWLRRMACQCAWAAARTKNTYLSSQFRRLAARRGKKRAIIAVAHTIIVIGYHLQTNQSNYEDLGGNYFDRIHSDGLKRYLVKRLQQLGHKVTLEPMEAA

SEQ ID NO: 515367 - protein, 425 aa, unidentified
MNSNRNQKINQVSEKTLVIGIDIAKRTHYACAVDERGRVLHKSFPFSQTREGFDAFYERLLALRATHEKSEILVGFEPTGHYWMNLAAYLQAHGIPFIMVNPHHVNRSKELDDNLQTKNDQKDALVIARLMRDGRFSYPRILEGVEAELRNGTTLRAKIQEDVNALQNRMIRWLDRFFPEFTQVFKNFGKMAYAALEKTPLPMDIQGKTPEELLFLYRQVDGMKSPQLPKAKQLVEVAQSSIGLTEGLVMARIEIATLLSQYQLMQAQLDELTVQLIELAKQMTDYAYLASVPGIGDVTIVELLSEVGSLTQYEHPRQLIKLAGLTLRENSSGQHKGQKRISKRGRRKLRALLFRVMIPLIRHNEAFKQLHDYYTTRTINPLRKKQSIVVLCGKLLKILHTLCKKKVHFDVSQMMKDLYCLGEAA

SEQ ID NO: 515368 - protein, 326 aa, unidentified
MEHELHYIGIDTAKEKLDVDVLRPDGRHRTKKFANTTKGHDELVSWLKGHKIDHAHICIEATGTYMEPVAECLYDAGYIVSVINPALGKAFAQSEGLRNKTDTVDARMLAEFCRQKRPAAWEAPHPLERALRALVVRHQALTDMHTQELNRTETAREVQRPSIDAHLLWLEAELKRLDKQIKDLTDDDPDMKHRRKLLESIPGIGEKTSAVLLAYIGLKDRFAHARQFAAFAGLTPRRYESGSSVRGASRMSKAGHVSLRRALYMPAMVATSKTEWGRAFRDRLAANGKKGKVILGAMMRKLAQVAYGVLKSGVPFDASRHNPVAA

SEQ ID NO: 515369 - protein, 434 aa, unidentified
MRQQNISTPSTPPVYAAFVGLDWGDEKHALSLCAADATVIERTTLPQTPEALADWANVLRSRFPSGKIALCLEQARGALLAGLMQYEHIVPYPVNPKTLACFREALYPSRSKDDPIDADLLLDLLLKHREHLRAWQPDTVQTRQLALLNEQRRHFVDHRTALTNELLSHLKAIFPQALELVGQSLASRLATDFLKKWPTLQAVQKVKPAVLRQFYYGHNSRSQELITGRLERVKNAVALTSDPALLAVHSLAIQTLAGQLQALRPFLDQHEQQIAELFAAHPDAALFDSLPGAGSALAPRLLAALGSDRSRFPDALSIQCYSGIAPVTERSGKTQYWVHLRWSCPKFMRQSWHEFANCSLKFSTWARACYQDLNKRMDHHEAIRKLAYKWQRIVWRMWQERQPYDETRYLRSLQKRGLKIYADLVPQPIAPAGE

SEQ ID NO: 515370 - protein, 338 aa, unidentified
MSKYSGIDLHSNNCVVAVIDDDDKVCCQKRVPNELERIVALLEPHRDDLVGVVVESTFNWYWLVDGLIEHGFAVKLANTAAIAQYSGMKYSGDEHDARHLAHLLRLKLLRFGHIFPPEWRAARDLARKRLQMVQTRTEHILALETLYARQTGKSIKSNAVKQLTMEQVAQWEWLTDAAVAAQANLAMVQAADVVIATLEQQLRQRVKLQPDYAILRSVPGIGDILSTVIMLETGPVERFTSAGNYASYARCVSSTRASNGKKKGEGNRKNGNAYLAWAFVEAAHFALRFNASAKRFYDKKKARTNGAVATKALAHKIARACYHMLKEQTVFDEKRCFT

SEQ ID NO: 515371 - protein, 429 aa, unidentified
MTRRDDTPQRLTLVAIDIAKHYHDVLIEPPTPKPRFRLRVANQLEEFEHLAGYLRGLKCSVVIGFEATGNYHRPLAYFLHRQGFELRLISTLALARTREAMHNSWDKNDPKDAQVILHLLKTGLAQTWHDPMVNGINDVQELSKTHFQVTLARVRVWHTLRNHYFSLYFPEIDRFVRSDHSVWMIQLLASFPTPASITALSEAEFQTRAWNLVGRKVSKRALLAEIYAVAKQSIGVPAALDSAAVAMFRLVLEQYLALNQLRERIAEQATILLGDNPDSRRLMTVPGIGPANALTILAEAGDLRRFRHHRQFLNFCGLNLSTLQSGKSRGQSHISKYGNARLRTALWMAAQTAVRMRENSFRRKFDHYVRGNLFDADLRRKAYTAIAAKLARVIFGLIKSGTDYRPFFEHKFQVEEPSRASAVGAVATP

SEQ ID NO: 515372 - protein, 420 aa, unidentified
MKAYNVDDFAALIGIDWADKKHDICEHPTNTEQYHYTVIKHKPEALHKWAMELKLRYPDQKIAIVCELKKGPLIYALAKYDHLVLFTVNPSAVANYRKAFTPSGAKNDPTDAFIQTEIIKLHMDKLSVIEPESSSMRALAQLVEYRRSLVQDSVNLSNKITVTLKNYYPQALEWFKEKDTFIFCDFISKWPSLTAVKRARKQTLVDFFNRHNSHYETVNNARLLSIKSALPLTEDEGVIGPNQLLIEVLIMQFKVLLKGIEQLDKTIKQMYKKQNDKAIFDSLPGAGPQLAPRLLVAFGHNRERYTDASQMQKYAGIAPVIESSGKKTWTHWRYSCPTFLRQTFVEWAGFSIRYSFWAKAYYEQQKSKGKPHNSIIRSLAFKWIRIVFRCWKTNTPYDESKYLEALKRRGSPLLKFAINS

SEQ ID NO: 515373 - protein, 425 aa, unidentified
MNYKQNEKINQVKESTLVVGIDIGSTTQYARAFDWRGIELGKVFPFSNSREGFEAFKAWMRHLQDKYRKSDVIAGIEPTGHYWFDLGAYLEDEGILLVMVNPYAVKQTKELDDNSQSKNDRKDPKVIAKLVTEGRYSAPYTPDGVYADLRIMVANRKRLIREMTQIKNRFARWFAIYFPEYTDVFGDYEAQSSMLLLKKVCTPEAIVELGAEKINQIWRDAKLRAVGMKRATTLCETAKRSIGLKKGSSAARYEMKLLLEDYEYKKAQLDAVMEEIEKLCRKIPESEQMLAIKGIGVITVAGFLAEVGDVRRFESPRQIQKLAGLSLRENSSGKHKGQTSISKRGRSKLRAVLFNAAIPLIAKNPEFKSLHEYYTTRANNPLKKKQSVIAISCKLIRVFYAILANGVTYDAQKMLSDIHRQPQAA

SEQ ID NO: 515374 - protein, 342 aa, unidentified
MGEITTIGLDLAKHVFQVHGIDAAGQVVVRRQLRRGELLKFFAKQPPCLVGVEACGTSHHWAREIAAIGHTVKMMPPAYVKPYVKRGKTDAADAEAICEAVTRPTMRFVPTKTMEQQSVLMLHKVRDLLIKQRTMLINALRSHLAEFGIVSAQGPAGLQAAIVSLHEMQDQWPELARAALHGIVDQLRDLARQIEKAETRLQAWHRKDEISRRLAQVPGIGPITASAIVATVPDASIFRSGRQFAAWLGLTPKAHSSGGKEKLGAISKQGDSYLRRLLVVGATSVIRVARKETSSKLWATRLLERKPARVVSVALANKTARIVWAMLKRGEDYGAPPPAMVA

SEQ ID NO: 515375 - protein, 298 aa, unidentified
MQAIELYLGLDVHKDSTTIAIAEPGPKGEIRLFGTVSSDIDRLEKALRRIGKAHPHAQLQVAYEAGPCGFVIARRLKQLHVPCLVAAPSLIPKQPGSPFKTDQRDARTIARLLRAGELTGVYVPEATDEAIRDLCRARTDAVDDMRRCRLRLKSFLLRHGYRYQGKANWSQPHMRYLRELVLPHPAMKAILEEYLQGIDAAHDRVQRIEASMLSLLETWRLKPAVQALMAFRGFQLVAAMVTVSELGDIHRFAHPRQLMTYLGLVSVEHSSGPKQHLGSISRCGNGHQRWMLTECAEH

SEQ ID NO: 515376 - protein, 370 aa, unidentified
MKTNTTPSVVSTTPAATVVPGGFTLGLDLGDRSHHVCVMDATGQIVREGALTNTRPALAQLLVEFPHATVAVEAGTHSPWISRYLTELGATVLVANPRKLHAISRNERKCDRRDAQMLARLARADPALLHPIQHGSAQAQHDLLGLKLRDALVRTRVNLINAVRFTLKSLGHSVRNPSSESFHKTVLADVPADCLPVVQPLLTVLAQVTEQIKGMERDLVQRSKRDYPATQRLQQIAGVGPLTALCFVLKIGDPQRFSRGRDVGAYLGLCPRRDQSGGTDKQLRISKCGDGLLRRLLVSAAHYVLGPFGPACALREHGQRLTGTGSAREKKRAVVAVARKLAVLLLSLWKHGTDYEPRVTTSPALVMTPA

SEQ ID NO: 515377 - protein, 363 aa, unidentified
MFTERTSVGLDVHARSVAAAAIDGVTGELSQARLTPSPDHIRSWVQGLPWPVAVTYEAGPTGFDLYRVLTAAGVRCVVAAPSKLQKPAGDRVKTDARDAIHLARLLRLDEATPVAVPSVDQEAARDLVRAREDCRGDLMRARHRLSKLLLRHGIVYCDGDACTGKHDLWLRHQAAAQLTARATRLTFDSDYENVLVAKARRDRLDVAITEMAANSEFTPLAHRLGCLRGIGTLTGFGLAVEIGDWHRFTGNSIGSFVGLVPSEHSSGQSRVQGSITKTGNTHVRRLLVEAAWHHRTRYRVGKTMRDRWELAPVAARVRGDEGNRRLHQRWVRFIDHHKRPTIANVAIARELAGWCWSLAMLEQ

SEQ ID NO: 515378 - protein, 432 aa, unidentified
MFARLSGVPWLLIEICARSLGYGCVSGVFHGPLLATGTNGWRSVVAQRDIAWIGIDVGKTHHWACMVDAEGKKLSSIKVANDEAEIVALITNAGSQARQVVWAVDIIGAPSALLLALLARADHAVRYASGRVVAAMSAAYVGEGKTDAKDAYVIAETARLRGDLPVIDTGTDLVRKLAVLTGHRADLIADRVRMINRLRDLMTSVFPSLERAFDYSSHKGAVVLLTGYATPDGIRRIGQTRLTGWLRNRNVRGSADVAARAIAAAKAQTVVLPGQDLCASIITELATAILALDDRLKALDAQIEATFAEHPQAAIIQSMPGFGPFLGASLLVGSNDLRAFPSAGHLAAAAGLVPVPNDSGRRTGNLHRPLRYSRPLRHVFYLSAQTSMMRAGPNRDYYLKKRSQGATHSQAVISLARRRIDVLWALLRENRM

SEQ ID NO: 515379 - protein, 340 aa, unidentified
MRKYIRIGVDIAKNSFQVRALESEDCSATKRKLSRSGIVKFLAEVEPCTIGMEACGSAHYWARRFRAMGHEVKLTPPIYVKPYVKRGKNDAADAAAICEAMSRPNMRFVAVKSEDQQATLMAHKTRELLIKQRTMSVNALRGHLAEFGVIAAKGISHVEELVERAAAADLPAMVQATLGVLLAQLRSLDAATDELERAIVANHRRDPVSRLAASVPGVGALAASAILASAPDPQAFKSGRDFAAWLGATPKQNSTGGKEKFGSITKQGNRYIRRLLVLGAISVLRAAPKRKGALCDWLASLRARKPAKVVAVALANKLARMVWAIITTGEAFRTSIYAKA

SEQ ID NO: 515380 - protein, 352 aa, unidentified
MMIIGCDFHPRFQQISFLFEETGECGQRRLMHTAEAEQYYRRLSGARVRVGIEATGSYGWFRRLLSELGHELLVGDATQIRASNPRRQKTDKRDAEHILGLLVSDRFPAIWQPPAENEQLRQLLLHRSRLVRLRTRVTNQLDAMAKNEGLLVPGGWSGKRRKAIEALPLPGWYGERRKDLLGLLDRLEERIAPLNKAVGQAAANNAEACLLMTHPGVGPVVSLAYVLTIGNWQRFARGKQVGSYLGLIPSEDSSSDKRRLGHISKQGNTLLRWLLVEAASTAQRYDPSWHRQYLRLSMTKHHGVAKVAIAHKLAVRLYWMLRSGQDYQQVRERGSHARQSECPGGRSKRPIE

SEQ ID NO: 515381 - protein, 312 aa, unidentified
MTEIICGVDVSSDALDARIGRDGAKTRMAATPEGVAVLAAFCREHRVTLAVMEATGGYEKLVHALLWSHGIPAAIVNPRSVRRFAQSMGFLEKTDRIDAGVIAWYADTKHIVAQEPASQAQEHLKALVTRLRQLTELRTMQSNQRRLVADPDVNGSFSELMALIARQTRALEAKITALIGSDPLWQKLDQCFRSIKGVSDRTVARVMAEMPEIGTVSNKAASKLTGVAPLAKDSGKSQGKRSIHGGRANLRNILFVIAENVRRHNPVFAAFHKRLTDAGKPKKVIRVALAHKLLVQLNAKARDARKELAMSA

SEQ ID NO: 515382 - protein, 408 aa, unidentified
MNTLYVGIDVSSKSNVVYLMLPNGDKHSNFSVANSHEGSTLLVKKIYSALTSHSLDTVLIGLEATSVYGDNLVYFLREDATLAPFNRKIHVLNPKQVKKFHDTYNDLPKNDYVDSFVIADCLRFGRINKEVYMGDYRYKALQNLTRARFFAVQNLVKEKQRFMNVLFKKYSTMTQEKVFSDTFSTTALAVYDEFESAEALANMDLHELTDFIIEKGKNRFPDPVAVAKAIQKAARSSYRLPKTVNDSVNQVLSISITSMKALESQIKEFDKAIKALMELLPNVLISIPGIGPVYSAGIMAEIGDINRFDNQASLAKYAGLAWKQHQSGGFEAEVTRLIPSGNRFLKYYLCEAAFSLVRCDKEYSDFYHLKYKEVNRCQHKRALALTARKFVRLVFRLLKDNRLYCPAK

SEQ ID NO: 515383 - protein, 316 aa, unidentified
MVGRVCIGIDVSKAELEVALGSAGVVRRIANHDRAVAELAAQLLELKPEVVAMEASGGYERMVAVMLWEAGLPVVIANPRHIRQFSRGMGQHAKTDRIDARMIALWAEHKGPQVRPLPDAEARELTELLSRHRQLMEMLGAEQNRLAQVVSVAIRKELKASIKSLARRIAQLNDEIGRRIEQSELWRRTRQLLESVPGVKRVTSFKLIVGLPELGTSDHRRLASLVGLAPFARDSGKWRGQRTISGGRGEVRSALYMAAVSAARFNPALHPFYQRLRQRGVPKKKALIAVARKLLTILNAIVRDATPWRAPCPAAI

SEQ ID NO: 515384 - protein, 338 aa, unidentified
MTIETLGIDIAKNVFQLHGVNFGGRVVFKRRVIRDQLLEVVSRLDRCTIAVEACTGAFYWARKFERLGHRVKIISPQYVKPFVRRQKNDGNDAEAICTAARQPHIPFVPKKTVEQQDIQALHRARQRMVNHRTAVVSQIRGLLLDRGFAMAKSITRARRLVPEILADTTNELTALAREAILELYDLFRDLDRRIASFDKKIDRIFLESEPCRRIASIKGVGPKTATAIIAAIGDGSEFKNGRHLAAWIGLVPRQFSSGDRKILMGISKRGSQHLRSLLVHGARAVVRTAPSKMDPNNTWVNQLRERRGFNRATVAVANKNARIIWAVLQTGEPYRAAF

SEQ ID NO: 515385 - protein, 340 aa, unidentified
MKEAMVVGVDTHKDSHSAALLSELGAMQGGLEVPASEEGYRELLGWARSKSSARVWVVEGTGSYGAGLSTYLSGEGEVVYEGDHPKRSWRGPAGKSDQLDAIWVAKDALARPHHGLPRKRGEREMLRVLLTARAGAVNAEKQGLNQLYALVVSAPESLRRRLGKLQGPALVRACLQLHSGGDPETALTAATLRSVARRVRVLTGEAGDYEKQIRQLVTTLAPSLLAERGVGPLTAAQVLVSWSHCGRIRDENAFAKLAGVAPIPASSGRVQRHRLNRLGDRQLNRALHTVAITRARLDPRTQAYVARRTAEGKSSREIRRCLKRYIARRLFRLLEALDKT

SEQ ID NO: 515386 - protein, 349 aa, unidentified
MIYIGMDISSKSFTVHAINEAKKVIFKGDIKPTRAALRGMIKELGPQSKLIVFEAGNQLKWIALTLRKIKGVHIHVVHPNEIKWINQSSGKTDKIDARKLAYLARGDMLPRAVHIVEGKARQLRELISARRTIQSKRIALINSIRGCLKQEGYKLAKGFFNNGKWRDQLKRMRIGNTQKLILEKFMQSIESMVKAEAELTASILAIEHQDIELLETIPGIGGLTSRVLVSAIDDAKRFDSKKSVAKYGGLTPRIYQSGGVTHLGRINRDGRMEMRKVLLQCAHTVARMKSYESRPLRAFFERIRKRRGKKVAVVALARKLLTVAYGVLKAKRVYEPEVLLSGAERLCKT

SEQ ID NO: 515387 - protein, 383 aa, unidentified
MDVHSSNFTICSFEPGYGIADDRIFGQVQFKEDFIKNTEKYISNLKKQRKDIDVVCGYEAGCLGYVPQRELSKKGIKCIILAPTTMAVQKGGKKIKNDFRDSIEIAKCLASGAYKPVYVPDTEDEDVRDYIRMRDDHNTALKHIKQQLNAFLLRHGFKFDGKSKWTMKHIDWIKKLSCTDKQREIFNEYLATYQTLSDKIDDLDVRIEELSQTERYADTVKKLTCIKGIKTHTALSFVTEVGDFNRFESAEKFAGYIGLTPGEQSSGDSDRKTGITKAGNRHLRRLAVESAWTYMRGCIGQKSAGLKKRQKNMPQEVVTYADKASTRCQRKYNRLTTKGKNANKAVTAVARELCCFIWGMATSHYEGTAQPKDNSVLKESALD

SEQ ID NO: 515388 - protein, 347 aa, unidentified
MTTLARSVTGGVDTHLDVHVAAALDEKGTLLGVEYFETTRAGYKKLLAWFENFGPVVLVGVEGTSSYGAGLTRHLHAEGVAVVEVDRPNRQRRRRKGKSDPEDAISAARAAFSGDASGAAKTQDGNVEAIRVIRLARLSARRSRTLALNQMRSLISTAPDPVRDELRHLSVPRMLERAASYRPGTKTDVVSLTKWTLRTLARRAIDLENEIKSLDDILKPLVVETAPKLVSALGIGTDSAAALLVAAGDNPHRLRSEAAFAHLCGTSPIDASSGKHQRHRLNRTGDRQANSALWHIVITRMVYDARTTAYIERRMKEGLTKKEAFRCLKRYIAREVYGLLPMDRLTA

SEQ ID NO: 515389 - protein, 362 aa, unidentified
MMTGPVGGIDPHQHQFTVGVVDANGVEVAHATFPNSAIGFTAAIDLLTTHGVHLVGVEGSASWGAHVAIGLVAGGFDAREVPAQRTAAQRRSRRLDKTDVVDAIATARALLAEPTLGPVQALEVFDPLIAKIEAVLEHRRALVAPRTLLLHHVADQIAKLPIEIRYQLNAQGKIESRLRRLETIDISCVSSAAGEYRLSWLLPLIDQDRQARREIRRLERLIDQLLDEHGTTLRDEPGIGPIATATLICEVGDPFRFASESKFARWCGTGAVALSSGEGDRQPVKHRLDFHGNRRINSVLYIASVTQQRDRQDARTYIDRKTADAKTRREARRAHQRHLANRVIRRMWRDEQARTARPTTAA

SEQ ID NO: 515390 - protein, 360 aa, unidentified
MKEYIAFDCHKRYTFVEFEEVETFKAKQQRVEHSPGAIRDCLQGRERGTPVAVEAIGNWYWIIDEIEQAGLEPKLVHPRKAKLMRGLINKTDKLDAHGLNQLQRAGTLPTVWIPPGELRDLRELTRTRMVMSAQRTRLKNRIQATLGKYAWSGSKWSDPYGEKGRAEMIGWMSRLPPHTVYVTDALLRQLDFVQGQITEVEQRLREVIRETPEMKLLMSLPGVGWVLTAVIVLEVGDITRFASAERLASYSGTTPRVHSSGGKTRYGPLRSDVNHYLKWAFVEAAQSVCLGQKSHPYRHVTRLYRQIRQRKGHAKAIGAVARHLAEATYYVLSTGKPYREPVLKKLKKGSIQGGVSAKVS

SEQ ID NO: 515391 - protein, 378 aa, unidentified
MPSENTVHIAIELSFSSWLVAARLTGAKKSRLHRIEGGDTGALLALIAELRSRALTELGGAAEVACCFEAGRDGFWLYRLLTAHGILVYVLEPTSILVNRRSRRAKTDRLDAEGMLRVLAAWLGGDRQVCSMVRVPTPEEEDGKRPHRERERLVQEKLRIENRIEALLFTQGIRARPSLRSWERELTELRTGDGRTLPPLLRAELDRLRRRLVLILELIRELEAERAAALAAAPDEAMAQKITSLQRVRGIGANFSAVLVREVLYRSFANRRQLASYVGVAPMPFQSGGMDRDRSISRAGNPRARTTLIQLAWLWLRYQPGSALATWFRERVGTLQGRTRRIAIVALARKLLIALWRYVEAGVLPAGVEIRTGTVPAA

SEQ ID NO: 515392 - protein, 435 aa, unidentified
MEEVTDEPLYRDRVCGIDIGKAELYATIRVPSDKNPARRASETRSFATTKRGVLALADWLHCWQVPAVVMEATGDYWKGPFYRLEAEGFECVLADAKQVKHLPGRPKRDTSDSAWLAACFERGAVRPCFVPDPEFRIIRLHTRYRRDLTDERTREKNRTEKLLESAAVKLSSVVTDLHGVTGRDIMDHLIAGERNPKVLAQLARARARRKITELEHALDGAEFFTAEHAALLRTMLERIDRLTAGIARLTEVIEHLLAPYEEQLAQAESMPGWGRRSAQDAVAETGVDMTKFPAGGHLSSWAGKTPLDRQSGKRTGRARHKKGNKYLAAVTGETAVAAGKTATREGARYRKLARSRGKGKAQVAVGNTQLRVYHKLLSNPGMRYQDLGPDYYQRQAALRRKIAYHVREIEALGLEVTLARIPEPDPDGPASTQAA

SEQ ID NO: 515393 - protein, 371 aa, unidentified
MRFYNTPHRFYCGIDLHARTMHVCVLAHDGSVVLDKNLPCHFETLLAALAPCRDGLVIGAECMFGWYWLADRCAAGHIPFVLGHALYMKLIHGGKAKNDRLDAHKIAHLLRGGNFPLAYAYPQGMRETRDLLRRRMYLVHKRAELITHLEILNAQNNLPPFGKKLSSAANRAALDMPQRFAHPSVQQSATLDLGLIDKLDELIAQAEGYLTRAAKVDDVQTYHRLRTIPGVGPILALVLLYEMHDLGRFEQVGQFLSYARLVRPEHESAGKKLGWGSRKMGNAHLRWAFAEIACLFLRSSERARAWKQKQEKKHGTGKALAILAARLARSVFHMLRKHEAIDEERFWNGQVAPSPTEPSQAKPAKAKQKAS

SEQ ID NO: 515394 - protein, 342 aa, unidentified
MEQVSVVGLDLAKTVFQVHGVNAQGEAVLRRRLARGQLLKLFEKLPPCLVGMEACASAHHWARELAALGHEVKLMPPQYVKPYVKRGKNDAADAEAICEAVTRPTMRFIGAKSPDQQATMMLHRVRTILTRQRTQISNALRAHMAEFGITAAIGRRGLDRLIAVIADQEDARLPDKARACLGVLSTQLEMIKEQILDNDRRILADARKTEAGRRLMKIPGIGPLLASAIVACVPDPSTFGGGRSLSAWIGLTPRQNSSGGKERLGSITKAGNTYLRELLVVGAMAVVRRAKQGSTKRPWVTQLLTRKKPKVAAVALANKNARIIWAMMASGEAYREPKLAAA

SEQ ID NO: 515395 - protein, 353 aa, unidentified
MITIGVDAHKRVHVAVALDDAGGELGHWQGANSPDAWHHLQQWAGAFGPERRWGVEGAWCFGRGLAQFLVTADEEVYEVNSRLTALGRRSARRRGKSDRLDAHSVAAVVRQETTSLPRINAEDETSVLELLTRERQNSLAEVTRLRNQIHALLMHIDPEYAVSIRNRRGKTRFPLLEQFSAPPGSNALQHERAAAVRRLAQRMCLAFEQAEELAGRIRALAKERFAPLTNLCGVDLLRAGELAAVLGPARRFRSEEQLAAYAGAAPLEASSAGLVRHRLNRGGNRRLNSLLYGIVLTQSQHSVDARTYLQRRTQQGKTKREAFRALKRYIVRAIWRLWNQCPGAQPATNLVAA

SEQ ID NO: 515396 - protein, 413 aa, unidentified
MEVMLERCAGLDVGKREVVACVRTPDGAGGRRVEVRTFSTFTEDLEALAAWLAENQVTAVVMEATGQYWKPIWYVLEEAGLDELKLVNARHVKMLPGRKTDVGDAAWLADLFEHGMLRGSFVPPAPIRELRDLTRYRKRLVQDRARETQRVARILEDAGIKLDSVASDIMGVSGRAMLDALVAGERDPGVLAELAKGRLRSKRHELRQALRGQFREHHAQLIGLQLGHIDHLTAAIAALDTRVDEVIDPFAAARDRLDTIPGVAKRAAECIIAEIGTDMTVFPTPAHLASWAGVCPGNNITGGKRRSGHARPGDQWLREILIESAWAAARSRDTYLAAQFWRLARRIGRKRAALAVSHSILTIAWHLLATDTVYEDLGADWFTRHDHQRSKQRALNTLQALGYTVTIEPAAAA

SEQ ID NO: 515397 - protein, 362 aa, unidentified
MNKKRMPTSQDPKSLAPHQVDPCGTEVSAEELIVALCRKGVQQPLKSFPNTPEGHREIGRYLARPGRLVRVCLESTGVYGLDLALALAAQAGIQVMVANPRAIRHFAQALMERNKNDRVDAGVLQEFAARMPFEPWQPPSRPALHLCALARRLEAITDLCAAEKNRLHANAAAQALPAIIRQDLERSIRFHQRAAERLTREALKIISTCSNLQQHYTLLVTIPGIAQTSALRILAELVMISSHLDVRQWVAYAGLDPREYSSGTSVHKKVRISKAGNRHLRRGLYMPALVAVCHDPHLRAFYEHLLARGKLKMQALVAVERKLLHAIYGMFKHQQAYDGTKVYRLPIGLAVESLTPAQMEAA

SEQ ID NO: 515398 - protein, 350 aa, unidentified
MKYYAGLDVSIKETSICILDETGKVCRETKVMSHPEDIIQALNCPALRLERIGLEAGPLSQWLFSCLAEAGLPVVCIETRQAKAFLKAQVNKSDRNDARGIAQMMRVNLFRPVHVKTLTSQKRRALLTARKLLQEKAIALENDIRGVLRNFGLKVGVVGAVKFEERISELVEGARELAEIMTCLLAPRRTLREQAAKLHRMLLSIVRDDDVCRRLMTIPGIGPVVSLAFVATIDIPARFKNSRSVGPALGLTPILNQSGESSRIGRISQCGDAMMRALLYEAAHVMLTRTIKWSWLKAWAMNVAKRRGKQKAVVALARRLAVVMHRMWSDGTTFRWTRQQEQHRDDRCGG

SEQ ID NO: 515399 - protein, 325 aa, unidentified
MQTQTNYTGIDISKLFFDVAISNQNKYLYYKFSNDEPGFKALIKLLCPDSHIVMEASGPYYLKLACYLDDQGLAVSVFNPLVVRRFCQMRMSKTKTDKKDAGMIAEYGKTEKPGLWQRPQQHVITLQQMDALLAHLNKEHTALSNQLESFKNSGLLDGQLEKKIVKELAHKQSFLKETIAAMQLLAEQHYAQMLANLESIPGVGKKTAMMLVIISGGFSRFNDYRKLSAYIGICPRIYDSGTSVKGKARICKMGMSKIRASLYICSWSAKRYNKACKELYDRLLAKGKAKKQALIAVAGKLLKQAFAIATQKTKYNENYSNIICF

SEQ ID NO: 515400 - protein, 319 aa, unidentified
MAQNDLHVVGIDVAKDKVDACVRSSAQRQTFPSSAEGRRELIAWLRRHQVGKAVMEASGGYERDWAKALRIAGIEVRIVDPKRVRNFARSAGRLAKNDAIDAEMIAWFAETFGNAPNQVHDAERERLSQIVNARQGLLDVRTELQNRNEHSVPEVVQKMHARLLKKIAVEIAKLEAAIAAMIKATRHFSELAAIIESVPGLGEGTSAGLIATMPELGHVSNKVAAALLGVAPYDDDSGKRRGERQIKGGRRKCRNLFYMACLGAATRHNPALNAFYRRLIAKGKEKKVALVACMRKLIVILNTRIARGQKWDANLHLAS

SEQ ID NO: 515401 - protein, 401 aa, unidentified
MECVFGIDVSKENANVAVLVDNVVIKQFKIGLDRLGFSLLSDELNSFNAPLIIYEATAMYSRRLRAFLQRDGWKYTELNPLAAKKVMEEFRHTKTDALDAVGLARAMIKNHFRPTYQESPVYTELHDLERTYQQFNKDIVTNKNRLHRALQLTFPEIEHFMSSTDGVLYWHIVQRFPHPAIVLSHEENDELTEIILTETSKKIGLKRAMKLANRLLALAQNSAPAKEPQSHAVRAVIALAKEVERINQLKAQIIVEMTTLGENLSEVPLLVSIPGIGIKTALCLIAELGDVRRFHSANAINAYIGIDLIRYESGQYEAKMHIRKRGNPYARKILYRAILNIISVSQYQPTLISANYKRKKQSAQSHGTKKIAIAAMSQFNRLMHHLILNNELYDSTTFMPE

SEQ ID NO: 515402 - protein, 366 aa, unidentified
MKKLSTKGVCRAGKLQDQQLTIGLDLGDRSSFYCVLNGAGEVILEERVATNPEAVKKTFSTMPRSRIALETGTHSPWVSRLLSDLGHEAIVAHARNVRLIGESRQKDDRLDAQALARLARIDPQLLSPIQHRSAQAQADLSVIRARYALVRARTALVCAARGLTKSFGERIRGRNPKGFSPATGETLSPQLQVALAPLLSALETITARIREYDAQIEKLAEESYPDVALLKQVKGVGTLIALTYILTLEDPRRFRKSRDAGCYVGLQPGRRNSGQSQPQLHITREGDSYLRMVLVQGAQHILGPFGEDSDLRRWGLKLAERGGKSGKKRAIIAVARKLAVLLHHLWISCEEYEPLQNTRKRRLAAA

SEQ ID NO: 515403 - protein, 506 aa, unidentified
MALGTAQQADISVAVIHERAKQPATARRSEVVNNCAADDNCGGGRPALVRSRSQQAHPQRVRRRLPGEPVAHAQTSNRKRPREGHYISSMGGMAKRRKQHQPPQQTMNDSPQWQQYQAFGALDWGSQTHSVIVIDAAGKVMEDFAIEHSALGWKQFRQKLQVYGSIPFAIETSQGAAVEQLLEAGMIVYPLNPNRAQAYRQRKAPSGVKDDRLDAWSFADALRVDGHGWKALQPEQPLTKELRLLCRDEVSLIEQRTALIQQLRQALAEYYPAALEAFEDWTSVSAWMFLQRFPTADSLAQAGRRQWQKFLHSRRLWGSDQGPRRMEIFAHATELAGSEPTVKAKSLLALSLVQMLFAVQKQLELYRQRIEELFARHPDHDLFGSLPGAGSKLAPRLLSEIGDDRQRFEADAQALQCFGGTAPVTIRSGKDRKYWPVHQRQACNKHLRHALHLFAEQSLSRCVWAHIYYQHHRQKNQSHANALRRLAHRWLKIIHKMWLDRSPLQR

SEQ ID NO: 515404 - protein, 345 aa, unidentified
MPIVGGLDIHRKQITFDYLDTATGEVGRGQIAPADRAHLRAWLARFAGRDDAAFALEGCTGWRYVAEELAGAGVTAHVAEPADTAFARGRKRHAKTDRTDSRHLRVLLEQGRLPECWIPPAQILECRALLEAYHDLRREHTAWIERIHAVFFHQGAPRLGEGALRTEHGLAALREAAAIHLSPAGQLQVATALDMLAAIEARMDTLRQQLLHAARHLAGARALQARLYGVGPLAGLAMTCWLGGAGRFSSSRKAVRFAGLDVTVYSSDGRRSPGHLSRQGPEILRWVAYEAGKTHGRASAPGHDYYAAVKDRTDGKIAALAQARKLIRQACHILAELGDDALTAA

SEQ ID NO: 515405 - protein, 307 aa, unidentified
MDVIINKGCGLDVHKESVVACVMGPGIKKEVRTFDTMTGSLLRLKSWLIDLSITHVAMESTGPYWKPVFNILEDSFEVILANARHIKNVPGRKTDVKDSEWICKLLRSGLLTASFVPPQAIRDLRDLTRYRRKLIQAISAEKNRIQKVLEDANVKLSSVASDTFGVSAGKMVRAIISGNTDPVSLADLAVGRLKSKKDLLRDALQGHFRDHHGFMIQASLDHIEYMEKVIASLDQQINDKLKDYKRERELLESIPAVKEQGSASIMAEIGADMSVFPSADHISAWAGMSPGNNESAGKKKWQNNPRQ

SEQ ID NO: 515406 - protein, 408 aa, unidentified
MKTLHQRCAGLDVHKAEVVACLRVVTNRKVGQEVRRFPTTTQGLLALAEWLENAGCTHVAMEATGVYWKPVWHILEGHFVLILANAAHVKNVPGRKSDVNDATWLGDLLAHGLIRSSFVPPPEIQELRDLTRTRRQLTREIVQHVQRIQAVLEEANIKLCSVITDIMGASGRRMLKAMIAGETDAEKLAALGHERLGCTRAELVEVLTGCVREHHRFLLGQHLRTIEQLEDSIAAFDARIEGALSPFHDIVERLKEVPGLAATATETVIAEIGTNMSPFPTAGHLLSWAGFVPRLDESAGKRRSTRIRKGAPWLKPVLVQAAWGAARKKNSYFQAQFLRLKARHGAKKAAIAVAASILTTVYHMLRDGTCYQDLGPEYFTRRNPAKAAARLANRIRNLGYHVEIRAAA

SEQ ID NO: 515407 - protein, 357 aa, unidentified
MIIVSHSKNHKAKEAAMVFYCGIDLHAKKSQLCIIDKDGKKVKEGNLNNDLSLILEFLEPFGKDVHIVIESTINWYWIVDGLMEEGYDVRLAHTLGLYMITGAKVKTDRRDAFKLAKLLRMGEIPEAYIYPKEKRPLRDLLRRRAGLVQQRAEGYASLRVQFMKYNLNTMSGNDVKQLLPADIYIMPIPQELKDYCVMILERIDLLSSQIEEIDTRLKAVTVEDPRFKLLLTLPGVMYVLGLTIYYEIGDIGRFRDAKQFASYCRLVPGISQSAGKVKKNKGKKQGNHYLKFAFTQAASIGVRYYPTLRKFRDKHANRRKGKVATMVANCILAHKIANATFHMMKKGVPFDDAKLFV

SEQ ID NO: 515408 - protein, 352 aa, unidentified
MISSQITATPKLFIGMDVHKKSWTCHFKTDLFDHKTVTMPADASCLKEYVFKNFSDHEVNCCYEAGCCGYWIARTLQQLNWNVLVVNPADVPRTSKQDWQKTDKIDCRNLCDHLRKNSLHSIYIPEEEQEQLRSLFRRRNHLSRQLRTIKNHIKSQLLYYGIKLPDEFDNPNWSHEMKTWISNIKWKFTSASVAMQSRLKQLDFLWYEILHISTALRAYCRKHYKKDYYLLKSVPGIGGITAAGLLAELGDIRRFNRLDDLAAIVGIVPGIYESSDNKICLGLSKRSNRYIRSLLVEATWVAVRTDMALQAYYRKHSAKEPNKAIIKVAHKLLSRIRAVIITGVPYQTGLMK

SEQ ID NO: 515409 - protein, 363 aa, unidentified
MTIAMREQRNEISFRGQKIYVGIDVHLKSWSVTVLSETSVLKKFSQRPSPEALHGFLTRSYPGAEYRSVYEAGFCGFWIHERLTALGIDNIVVNPADVPTKSSEKLRKSDAVDSGKLARSLRANELKGIYTPDSVSLEMRSLIRLKNSITKDTTRQKNRIKSQLRYLGIGIPQEFLEPFSNWSKRFFAWLKEVETLTPSDRQALDIQLRHLEELRRQKLEMTRALRALAKADRFREPQRLIMSVPGFGQTTGMAFLSEICDITRFRNAEQLAAYIGMIPMCHSSGEKDGTGDITVRKHAVMRCNLIEAAWVAIRQDPAMNLFYTEQCKRMPKSKAIVKVARKLVNRLYFVLKHQTEYVNSVVS

SEQ ID NO: 515410 - protein, 326 aa, unidentified
MQKSLKFIGIDISKFTLDICALDKDSSVHYQIKNQALEIRKFFKPFSKNSTRICFENTGKYGWVLIEVLSNLEFKFYQINALHLKRSMGLVRGKNDVVDALRIAQFISKNHEETPLYQTSDKNIKKIQVLISKRNLLVKQRAQHKTLKKENELIKSLKLPALEKHSNTIVSLLNKYIKEIEKMINTIIAQDLVLSKNHRIATSVPGVGKIVSWNMLVKTNGYKGICNSKKFACYAGVAPFSQSSGTSINKKARVSHLADKTMKRLLHMAAMRAIQLENDLKKYYIRKVNQGKNKMLVLNAIRNKIIHRIFEMIKSEKLYDFNLHLS

SEQ ID NO: 515411 - protein, 363 aa, unidentified
MKRSLQAIQSAAAPQPHAGNTIGIDLGDHWSRHCVLDASGAMVEEDRVRTTADAMREKFGKLAPARVVIEAGTHSPWVSRLLEEFSHQVIVANPRKVRLIYESDRKNDRLDARMLARLGRVDISLLSPVWHRSAEAQADLAVIRSRDALVAARTQLINAVRGMVKSIGGRLPTSTTAAFAAKIAGLVPTQLKLAVAPLLNSIRALSDQIRCYDAQIERLAAKKYPQTKLLRQVKGVGPLIALTYVLTVDDPSRFQRSRQLGSFLGLRPEQRESGESAPQLGISKCGNNHLRWLLVQAAHYILSRLAPDSRLRRWGLQLASRGGKNGKRRAVVAVARKLAVLLHRLWTTGEVYEPLYGLEAEAA

SEQ ID NO: 515412 - protein, 428 aa, unidentified
MDELNLSRLEEFRQLRQEVRHSGEYLIVGIDIAKDRHHAFFGTATGKTLLRRFVFRNDYEGFRKLLDQAEALRVRHDLKEMVYGMEPTANYHKPLGEYLITQGRTVVLVSGVTVKRNRESLDGRWDKHDVKDSANVADLISQGKCLYYEHPSAELRGLRGLLSLKRRLKRQEQSYRVRIRNHLIAQYFPEMDSHYGRSETEGLAIVRWCFPPSQITELDVEPFIQRVTSRRIRMEQRRRLEGVWEKAGMSIGCDVVPGVDHEARVMVEGLKQIREMIKETEDKIEELCNAFPEYRFLLTIPGFGPDVSAKVLGAIGEPDRFQNGKQVLKLGGLDLSADRSGKDSDKATPKISKRGKADLRYALYQAAFIASTKNRDFMLYYTSKLQGREKEKGIHTKRLVKLSAKMLLIAWTVMKKKEAFNPAYLKAE

SEQ ID NO: 515413 - protein, 381 aa, unidentified
MNRSYDYFVGLDVSQRTTSVCVIDADGKKFCEGKCNSRPEDIRGWLVNRVAEDKTLKIGLEAGNMSSWLYSGLVKFGFDVICMETFQAHRFLATYRNKTDKNDARGLAQLVRMGGEDFLKVVSIRSQASQETRVLLAMRDHLVSQKVGLENHIAGVLKPFGVLVERGNVTADTFYKRTLEGLAEAEKNGVHVRSYVLPSLNLYMEAVEAIAPLTEKIHAIAHSIEMVKRFMDIPGIGPVTALSFYAAVDNPQRFQKSSDVAAYFGLTPRQFQSGETNFMGAISRRGDPATRRVLVIAATFLLSGTLEWNSLKAWGVRLAKRIGFSKARIAVARKLAMIMHKIWVNNDRFRPKNLSAQERIKLKQELIVVASKSGRVASAPV

SEQ ID NO: 515414 - protein, 421 aa, unidentified
MEEITEEPVALVERVAALDIGKAVLTACVRVPHDTKPGRRLQEVRTCTTTTRSLLGLRDWLVCQGVTRVVMEATSAYWKPPFYLLEDDIAECWVVNARDVKNAPGRPKTDKLDAVWLAKLAERGMIRPSFIPPRPQRQLRDLTRYRRTLTQERTREMQRAEKLLEDAQVKLSSVISSMFGKSGRDMLDALIAGQRNPYVLADLARGSMRGKKSILAEALTGHFTEHHAFLLAMMLARVDALTAQINTLTTRIEQAVAPFARQVAQLDEIPGIGIIGAQEIIAEIGTQMSRFPTAGHLVSWAKFAPKARQSAGRSKAATTGEGNPWLGGTLGEAAISATRTSTFLASRYRRIVKRRGKKRALVAVGNSILTIAWHLLSDPSARFTDLGPTWHDHLAPLRRKRQLIAELERLSGMKVTLHQAG

SEQ ID NO: 515415 - protein, 422 aa, unidentified
MSKKKSSLAGLQALYGRVCGLDVHKKVIVACVRILDPKDGTVQSTQRKFGTMTADLLELRQWLAELKVTHVAMESTGVYWQPVFNLLEGHFKVWVVNAQHIKKVPGRKTDMKDAEWIAQLLQCGLLRPSFVPERQQRELRDLTRQQTKLVQQRNAVDNRIQKVLETANIKLGSVASDVLGVSGRKMIEGLIAGEKDVTALADLAQRQLRGKIPELQRALEGELTEHHRFLLRQLLGQYDFLEKEIASISERLGAVAPPSFRAAVEQLDAIAGVGERGARALLAETGTDMSRFPTHKHFASWAGRCPGNHESAGKRRSGKTPAANRHLDAVLTEMAHAAVRTKNSYFKAQYHRLAGRRGKKRAIGAVKHSLLVTVYFMLRDNRPYKDLGVDYFDKLNPQQRIRYHVRRLQELGQEVELSPIAA

SEQ ID NO: 515416 - protein, 272 aa, unidentified
MAHFVGLDVSVKETSVCVVDDVGKVILEQKVPTEPSDIIALLASLGVSFGRIGIEAGPLSQWLVNALTAAELPVICVETRHMKALLTAQQINKTDRNDARGIAQMMRVGLFKPVHVKTLAAQEQRMLLTSRKLLQRKLLDVESDLRGTLRNFGLKVGVVSRSRYEVRIRELVEGFPVLAAIAEPLLAVRRVMRQQLAVLHKILLDTVRGDPVCLRLMTAPGVGAVVALTYRATVDQPQRFVHSRAVGAHVGLMLIPTEVARGSGMISPTIPI

SEQ ID NO: 515417 - protein, 375 aa, unidentified
MKNFSTFIGMDVHKETIAVATAGKHGAPRYYGEIANTAEALTKLIKKVVPTGGRAVFCYEAGPCGYGVHRQITDMGHRCDVVAPSLIPKKPGDRVKTDRRDAVTLVRLLRAEELTAVWIPDQQQEAMRDLSRIREDLKSMERCARQRLSGFLLRNKKVYAGQSNWTQAHFRWLERIIFDSPIQQIVFQEYVDVVKHLQGRVASVQQEMMKALAGWSLGVVVEALMALRGVNLVTAMTIVAEIGDMSRFESPRQLMAYLGLVPSEDSSGKQQKRGGITKTGNGHVRRVLVESSWSYRMPARKTAHLRRKAGKASEAVQAIAWKAQKRLCSRYWHLTQKGKLKVQACTAVARELAGFIWAISREVMGKNNTPVVKVA

SEQ ID NO: 515418 - protein, 330 aa, unidentified
MDKTSYIGIDIARNKFDAVIYRKTGKPRHKVFANNLEGFTQLLQWVNTPAKNLHIGMEATNTYWEDLAYFLKDQGSCVSVINPKCLKKYGESQNMRCKTDKTDAAIIARYTAKEQPEAWKPQRHEERTLLLQMRQLEHMKQCEQKERVRISMMKDAASREVAKRIADYIQTEIVQLEKQIAALIHADKKLNKSAQLLKTVPGIGAKTLPWLVAYLGDGSRFKNGKAAATYAGLTPIKHDSGDTVAGKTKISKIGHSEIRKAMYMPAMIYGCGRMKDGVFRAFTQRLRVNGKCSMEIITALMRKMLCIAQAVLKSGQPFNPELHEKSFNNA

SEQ ID NO: 515419 - protein, 412 aa, unidentified
MTVTNQFAAHVGLDWADKKHDVCVQFKNCERVFDVIEHTAEALDAWLTELHQKVKGRIAIALELKKGPVVYALQKYPFITVFPVHALSLARYRQAFSPSGAKDDPQDAELALELMLRYPQKIKAIEPDNADIRLLQQLVEQRRQLVEDKRRFVNRIINTLKQYYPQPLEWFSHRGSLLLCELIIRWPSLQQLKRARRDTIRNFLNAKGGRAMALTEQRVASIDNAIPLTTDPSVIEANALMAAALATQIKVVSEIIKTYDERIETLFDTLPDAGLFKSLPGMGPCMGPRMLAALGDNRDRFNSAEEIQNYAGIAPVTERSGQKSWVHWRWQCAKFVRQTFVEWAAKTVNSSYWAKLYYQGLREKGKSHQSAIRALAFKWIRIIYRCWKARTCYDEAKYLLALEARHSPLLKP

SEQ ID NO: 515420 - protein, 358 aa, unidentified
MARFSLSALKSFVAPHQAEPFWIGVDVHKRSYHLAFHRADAKTFTVVTPACPEKFIELCCRLAIIIAGVVYEAGPTGFSLARSLEAEGISVIVAAPSKIPRSITSGAKTDRLDCLKLAHFAAKGLIRPIVIPTAQEEAHRALSRRRHQFVDSIRRCKQRIKGFLLYHGFKETESIRNWHADYPEQIAELPLEVKGRLTIESHLRELNFHQDELSSVTLQLDQVNLEPRHRSVIKALTSVPGVGKVVATTFHTELFRPERFDRGEEVASYLGLAPSVRQSGERKSRGYLVPVGQTRLRSLLIEAAWIWRGKDAYAHARYNKLLSKTGIPQKAIAALARRLAIILWRLSIEQRAYRPINT

SEQ ID NO: 515421 - protein, 342 aa, unidentified
MANATVIGIDLAKSVIQLHGSDASGRCVFAKKMQRKKVLPFLAKQPPCVVGMEACGGSHYWAREIKSLGHDVKLMPPQYVKPYVKTHKTDAADAEAICEAVIRPNMRFVPIKSVEQQAVLLVHRERDGLMKERTSIINRLRAVFSEFGITIPAGAKKLHVWLRDEYPEQEKLPVLVDRQIQRIYKKIDLIEQEVKDLDREIDLYNKEDKRCKRLLEVPGIGRLAASAMVASVGSAKEFRSGRQFAAWLGLVPNQHSSGGKQNLLGISKRGDVYIRRMLIHGARAVVRHRTENNAQYLWIESLMTRRPTNVVVVALANKLARIAWALLNKEEKYRKEVIPKVA

SEQ ID NO: 515422 - protein, 358 aa, unidentified
MAGKVTETAVVGGVDTHKDLHVAAVVDQNNKVLGTQFFSTTRQGYRQMLAWMTSFGALKRIGVECTGTYGSGLIRYLQNAGLDVLEVTAPDRMERRKRGKSDTIDAECAAHAAFSGIRTVTPKTRNGMIESLRVLKTCRKTAISARRVALQIIHSNIISAPDELREQLRNMTRMQLIRTLGSWRPDASEYRNVTNVYRISLKSLARRYLELHDEIADLDVMIAAIVDELAPELIKRNAIGYESASQLLITAGDNPQRLRSESGFAALCGVSPVPVSSGKTNRYRLNRGGDRAANSALHIIAIGRLRTDDKTKEYVARRVAEGHTKMEAIRCLKRYISREVYTLLRNQNRQINSIPITA

SEQ ID NO: 515423 - protein, 365 aa, unidentified
MLLGSELVPSTPYMEILGMERTLNHHWCVGIDLHKDTLTACVFCGCCGEVSFQKIPCKCRKQIAAYFADLPRPHTVAIESVGFYRWLWEMLEPIAQQLVLADATQARALAGRRLKTDREDALNIAQLLAAGRLPTSYAPPMEVQILRDLSRHRNGFSRQHARVLCRVKSIMNANNRPGPARIGSDGLIRYLKAQGEKLPTRHVAMLWQCVDQLALSERQIAQAERTIGELVRRDLFHEVYEILTSFPGVAMVTAATVIAEIGDFKRFPDAKAIGRYAGLNPRVFASGGKQRLGHIAKTGPSDLRWILQQAAWTAIRTDEHVRRVFLRIAKRSGRKAAAVAVARKLLTWMHSAVVKGEPYRTRVAA

SEQ ID NO: 515424 - protein, 386 aa, unidentified
MRPTPLFQISQLLAFSQNLFKISIFCLQNLQKFAQSGFKEGDFDNLNVLLNACLIYFLYIFFGIDISKLTFDVTALIETKVCHKKFANTETGFKEFKQWIKTFESEHYFCMEATGIYGVCLAQYLIQQNYKTIVANPFIIKSYSRMQMNRNKTDKADSFCIASYCKNLFLEEKIDVNLYKPKSKYYQQLQSLVTRLEQVKLPKNQEVNHLESSLEKTVVKIITQSIGSLDRQIKAIKTAIKKCVKKDKTLRKHVQLLVTIKGIGDLTAWSILAYLGDISLFLTSGQVASFVGLNPCVETSGTSINNTSLSKSGNKRLRKALYMPAIVAKKHNPILAEFYDRLIKKGKPKKVAICAVMRKLLVLSFGVLKSETAFDPNYRKEKASQY

SEQ ID NO: 515425 - protein, 340 aa, unidentified
MEHVAGADVPKRVTQLALLRNGRPPSQVRFANDRVAVEGALTQLPTGTTIAVESTGSWWWFVDTARRLGHEVVLSHPKRTKAIATARLKSDTGDAVMLARLLKADLLPMVWIPAERERHIREWLAHRGRVVRTRTAVINELHALSSKRNLEVPRYRWHRQAPEPWQPEALGGDGPQIVHEHVALLKALHEQIRGLDQALKALAQEDPEARRLMTHPGVGAITAVAVRAWVGDIRRVASAKPLVSDCGLAPRVRQSADMERHGHISKEGNRMVRALLVQATLSAMRHTGGPVRRQYLGVVKRRGKQIARIAATATRLGVLFQMMKQGLTYQELYQRGGSAQ

SEQ ID NO: 515426 - protein, 411 aa, unidentified
MIKENYIYVGIDLHKETHTAVMIDCYNQKLGEITFPNRPADFPKLVAKVKKCNTDGKTIVFGLENAYGYGRALAVWLIDKGYFVKDVNTAISHRQAKHRGAMYRKSDSDDAEAIALATLNMLDKLPDACPNDAYWSLGQLVHRRDNIMKQRTRLVNQLHEQLCIAYPSYKQFFNDISRPTALYFWEHYPSRKYLKGKSVEDLRAELVPVSHNKCSTKTCEKILDAVASDKVKNNAYQDARDMVTLSIVSDLQHYDKQLAEVDKMLEQMYKMLGCTLTTIPGVNVITAVKILAEIGDIKRFSNANKLAQFAGIAPLHLSSSGKGKDVATKQGNRRLQATIYFLAIQMVQVSSKGTPRNSVVRAYYEKRKAEGKTSQQALICISRRLISIIYGMLKHGTEYRMPVVESAGENR

SEQ ID NO: 515427 - protein, 319 aa, unidentified
MFVGIDVAKAELVVSILPSVERFTVANDERGLRTLVERLRAVVPTLIVLEATGGYELLGVAALAAAALPVVVVNPRQVRDFAKATGQLAKTDRIDADMLARFADVVRPTVRPIADDAVQELDALLTRRRQLLEMLQAERNRTGQVFGKGKRLVKKSLKAHISYLERELRITDTDLGAMITASPVWREKDELLQSVPGVGPVLSRTLLADLPELGRLSRRAIAKLVGVAPLSRDSGTLRGRRFVQGGRATVRAVLYMAALVATKRNAVIRTFYQRLVAAGKPKKLALVACMRKLLTILNVMVRTAQPWCLANAVDARMPA

SEQ ID NO: 515428 - protein, 337 aa, unidentified
MKYSGIDLHSNNSVVVVTDDSDRILFQRRLPNRLQEVLDALAPHRGELAGVVVESTYNWYWLVDGLQEDGYRVHLANTAAIRQYDGLKHSGDVSDAAHLAQLLRLGILPTGYIMPKAERAARDLARKRLQLVRCRTAQVLAVENLFARSTGARPSSNVVKRFSPEDIECAEFDPDVTLAIQANVGVIRTLNQEIERLERRLQERVTLRPGFALLKSAPGIGETLATTIMLETGTVARFAKVGNFSSYSRCVDSAKMSNGKRKGEGNVKNGNKYLAWAFVEAANFAVRFCPEAKRFYERKRARTNGIVALKAVAHKLARACYHMLREQQPFELKRCFV

SEQ ID NO: 515429 - protein, 368 aa, unidentified
MVTIARIGIDTSKGSFQLHGVDAAEQVVLRKTLRRKQFLEYLAKQEVGEIGLEACGASHHWARALRQHGHRVVLVPPQYVKGYVARGKNDKNDAEAICEAMSRRRVRERLVPVKTLDQSAGQMMMKVRSSLIERRTQLTNSIRGHAAEFGLVAARGLDKIGPLLQRIAADENLPAVAREMFAMLGEDYAELAARIVRIDKRLLAFQRDNELARRLMEVPTIGPIGACLWVTKVVDPHAFRSGRSCAAWLGLTPKDRSTAGKQRLGGITRAGDESLRATLVLGATAYLRHVRSGRIAATPWLAGMLARKPPKLVAVALANKTARIAWKLMISGERYDRAHQPTREGLDASQWGGLRAEPLTAGGVEAVA

SEQ ID NO: 515430 - protein, 398 aa, unidentified
MKVVYPICCGVDVHKTFLVATIITTQGITPHYSKRRFSTFNNSILQSKQWLIDNNCFDVCMESTGKYWIPVFNLLEDVIRIIIANPKWVRAIKGNKDDVNDSKWIGDLFRLGLVPGSYIPDKPIRILREYTRYRSKLVSCRTSEKNRFQNAFTVCNVALDAVVSDMFGKSATSITDYLVSSDSFDPDYCSSLLQKSLKKKSDIVIESQMTKQQKERIVMVRSHLDFIQQSIAKLDEKLDKMVSPYDSAITLLCTIPRVDRTSAITIISEIGTDMSQFASSKRLCCWAGLTLGNNESAGKKKSVRITRAGVYLKPALVQVAHAAVKSNKSSYYKTKYERISKRRGKKRAIIAIARMILTAIYHMFVTGEEWNPSDLYKIDMPQEIQEKQKEKAVIQAEL

SEQ ID NO: 515431 - protein, 342 aa, unidentified
MTAIGIDTHKATLAACAVDELGRAIGEATFANDPAGHVAFIAWARSIASEATIGIEGSSSFGAPLAWAVHHAGLSVREVPPHLSRAERQRTRRPGKSDPGDALAIARVTARETNLPPIRLPDRTSELKLLLEAREDLVAETTRVRNRLHAHLLALVPGYGGTVANLVAARHRITVGRLLRGNTAVQAELARALLARLARLERETGALTRRIGALVDGHPLLGLPGAGPITVARLIAEVGDVRRFRTADAFAALAGVAPIPASSGQIQRMRLNRGANRQLNRALYVIAVSQSRFHPPAKAYVTRRIEVDGKTWREAIRALKRLLVRPVFRLLVQGSIVPAEAA

SEQ ID NO: 515432 - protein, 389 aa, unidentified
MKIFVGIDIAKLNHFAAAISSDGEILIEPFKFTNDADGFQLLVSKLESFDKNSIIIGLESTAHYGDNLVRYLVAEFYQVCVLNPIKTCQMRKNNVRKTKTDKVDTFVIAKTLMMQDDLRFITFFDLDMMDLKALGRFRQKTIKQRTRLKIQLTTYVDQVFPEIQYFFKSSLHQNAVYALLKEAPSPKEIASMHMTHLANLLKVNSHGHFTKEQAKELRVLAQKSVGANDSAISIQITQTIQQIELLDSQLEKIEAEMTDIMKFNDSVIMTIPGIGYINGGMILGEIGDIHRFSNPNKLLAFAGLDPSVYQSGNFQAKTTRMSKRGSRVLRYALVNAAWNVVRNNATFKAYYDAKRSEGRSHYNALGHCAGKLVRVIWKMLTDEVEFNLE

SEQ ID NO: 515433 - protein, 339 aa, unidentified
MGEYIGLDVSLKETAVSIRCSGKRIWRGKCASDPALLAELIRKRAPEAERVVFETGPLSVWFYHELTALGVPAICIDARHAKAALDMAANKTDANDADGLAHLAEVGFFREVRVKGYDSMLMRTLVAGRSKLVRVATGLSNQIRGLMKTFGLVIPAGQGGVFEKNVRRLLDGQEALARIVFPILAAWRATRVHAAELGRQLTAAARHSQPCQLLMSIPGVGVVTATAFTTAIEDPTNFAKSRSVGAWIGLTTWRYQSGEVDYDGHISRRGDANLRALLYEAATTILTRVHADSDLRTWGLKLRERLGFRRAAVAVARKLAVIMHAMLRSGELFNRAAAT

SEQ ID NO: 515434 - protein, 345 aa, unidentified
MKRITIGLDIAKSVFQVHGEDASGKLVLQKRLRRSQILGLFAGLEPALVGLEACGSAHHWGRELRALGHDVRLIPAAYVKPFVRRNKNDARDAAAICTAVGRPDMRFVAIKSVESQAARGLERSRDLLVRQHTQLMNSVRSQLAELGIIAAQGRRGFAELSQLVAAGDERIPEILRSVLSLLLQHIEQLAAASAAIAAKIMAAAKADPAMRRLATIPGVGGLTAHAIVTAIGDGKQLASSRDFAAWCGLTPRGASSGAKRRDGGISRQGDIRLRKLLALGASTIIRNARSRDDRATQWQRGILARRPVKVAVLAQAAKTARIAWAMLIAGTAYRQPAGTTPAQPV

SEQ ID NO: 515435 - protein, 336 aa, unidentified
MSSVVGLDVAKHSLDIATLQANGKHRTKSKLANTPEGFKDVEKWLEKHAEPGAWVVLEATGIYHEAVAEHLHEQGYRVCVMNPARIASYAQSELQRGKTDRTDAKLLATYGQRHVDQLRVWAPTPPAQRRLQALVRRLQDLKEIEQMERNRLDVSDASVQPSIHELLAHVGQQIAETLRAIKQHIDDDPDLRGRRDLLVSIDGIADQTAALLLAELGDPLQFEGARAIVAYAGLNPRLQQSGQYQGHVRISKIGSPRLRAGLFMPALVAMTHNPAIKALSKRLKEKGKAGKQIVCAAMRKLLHIAYGVLKSGVPFDRQRALAHLPARRYLQGHGAA

SEQ ID NO: 515436 - protein, 367 aa, unidentified
MRTYYVGMDVHRASIAIVVLNGAGKVVMQMVTETSAARVREFLKQLGGKVYVTFEEGTQANWLHEIVRPLVTEVIVCDPRQNKLLATGNKSDRIDAQKLAELLRHGSLRAVYHGDKGVRTLKELVRNYDCLVADTTRVMLRLKAIFRGRAIACSGHDIYRSDRQEQWLAKLSEPGARQRASFLYNQLAALKPLRHEAKLMMVKEARQQAAYAWLKSVPQLGAVSVAQLMAVVGTPHRFRSKRQFWAYVGLAVVTRTSADLEVVNGVLRRSRRPIATRGLNRNHNHLLKRVFKNAASSACRSGPFKAAYDSRVAQGMDPSLARLTIARRLSAITLAIWKRGEQFNPERQAASGLRQAMTETREVNADC

SEQ ID NO: 515437 - protein, 344 aa, unidentified
MNKLSRVGIDLAKNVFQLHGVDRHGKVVLRRRLTRDKWLKALLEKVEPSCEIGMEACAGAHHWARELQAEGFTVKLIAPQFVKPYVKSNKNDANDAEAICKAMSRPNMRFVAVKTVEQQDIQAAHRIRSELIGHRTAKANQIRGLVAEYGLVAPQQLARLRAAAPVWLEDAENGLTSRFRRLLSVLWDDLKTLDHRVAELDHEINVIAQSDPVAKRLQLLRGIGPMVAMALVATVGNAEQFANGRQMAASLGLTPRQHSSGGKDRLLGISKRGDAYLRSILIHGARSVIRTASLKDDRLSQWVTSLAERRHPNVAAVALANKTARIAWAMLRNGTDYEPDYIVV

SEQ ID NO: 515438 - protein, 425 aa, unidentified
MKITQTALKIKANFAMDVSVDVHKDTLNCFFETEGKEYYDEFSNRNSVISKKLQAYHEVATTHGIKTLRIICEPTGQYQNKLFRTARKMGFLTCFVNTESVAKFRVIETNDNGKTDIKDPRVIRTLGQLNKTIRHRHFDNEYLLLRKLNRIYDEAQDTIISLKGRINKLLVELFCDYSFKKDFLYGRSGITLFEAFQCNPYRIVRAGYKRFCKAMKKAAPRIRRESLERLWDDAQSSVLNELPEEYIEMLCVHLKHLMQDYRLQAQRKEAAAEKMVALLKKLRGKDPNIPPATRGVINDRNLAMLLGETGPIRDFANWRVLMRYAGLNIRMRQSGMYSGQNKITKKGRVLLRKILLNIALPLVKKGRIYGEYYHGKKEVDKMPGNKAMTCVARHFLRKFYGWYKSGEEFNIDRFFTCETQYRRAA

SEQ ID NO: 515439 - protein, 415 aa, unidentified
MLKIVYPVCCGLDVHKSSVCACIAATDGNGVTTYQNRKFSTFTHELNELSEWLTRNNCKDVCMESAGKYWHPVWNVLEPTCRLVLAHPKYVKAIRGKKTDKKDAKWIADLFKHDLVSGSFIPPNDIRQLRDLARYHRKLIGFSTGEKNRAQNCLTVSNLKLDDVFSDVFGKSATAITDYLLEYPGEIFDVTPFVDGRCKTPIPKIQAAVDGSICPEQAEKLKIIRSHMGNLELCKANLESAILNIAEKYIPQIELVLTVPGIRDPLIAISVIAEIGVDMSAFPSAKHLCSWAGMTPQNNESAGKKKTTRISHAGAYIKPLLVQCAVAVSNSEKHPEIRNRYLALRKRRGHKKAVIAIARMMLTAIYNILKKNEPYNADLYRKTDVPPTNRQVSVEEAVFILQRQGYLITAPQAVI

SEQ ID NO: 515440 - protein, 361 aa, unidentified
MLRTTEGSAQRHNQEDSMRELYYIGLDVHKKSISYCIKRQDGAIIDQGTIEATRTALTAWAAAIEEHPWVGALEATLFTGWIYDHLKPFARELQVAHPAMLKAIACGKKKNDRLDATKICDLLRCNLLPRCYMAPPKMRELRRVLRYRNLLVSEAVRMKNKISGLLMEVGEPYNAKRLHGRKYFYSHLDSLRDTPESVIELLAITRGSLEMFDRLQGELLRGLRSHPLLRARVELLQSIRAVGEVTALTWALEIVEPERFGALSRVVSYSGLCAAQRESAGKTQRGPLSKQRNKHLQRVLIEAAKLAPRWNPQLREVYERACERGPRNRATLAVARKLAAYLWAVDTSGRPFVPRVEDEAA

SEQ ID NO: 515441 - protein, 356 aa, unidentified
MTSNIKYIGMDVHKESISAAVRNSVGKVVMECVIETKANMILQFIDGLRGDLQVTFEEGTSAAWLYDLLKPHVTKLVVCDPRKNKSMREGNQNDKIDARRLAELLRLDHLTPVYHGEHGLRTLKELVRSYLTITKDLGRVMTRVKAIYRSWAIPCTGKEVYARCHRAGWLGKINEPGVRRRAEFYYQQLDALRVLRQEVRRDLLVESKKQKAWKRLCQIPSIGPIRAAVLLGILQTPHRFRSKRPLWNYGGLGIEMHSSADHRSVDGQLQRSRKNVLVRGLNRNCNHDLKNLFKGAAAVASSKPGPFREFYTALVAKGMRPEMARLTLARKIATIVLIVWKRGVCFDAQYLKPQTA

SEQ ID NO: 515442 - protein, 412 aa, unidentified
MEVLHPRCAGMDVSKKDVKVCVRLASPGRKTVQNTTTWSSMSGDILRLRDHLIAEQVTCVVMEATGDYWKPFYYLLEDAPFEVMLVNAHDAKNLPGRKTDVSDAAWLAQLAAHGLLRASFVPPEPIRRLRDLTRTRTAITRERGREIQRLEKVLEDAGIKLSVVVSDINGVSSRFMLQSLVKGERDPAVLAELSVKQLRRKIPALTQALQGRFTDHHAFLVELHLDFITEHTARIDALTERIEKVMAPFQAKRDLICTIPGISTATADVIIAETGGQMAQFPTPGHLASWAGVCPGQHQSAGRVKNVKTRPGNRHLKGALGATALSIASHKGTFLNAKYRRLVRSRGKPKAIVALEHTLLTVVWIMLTDNVVYDEPGPDYHQQRHPERTKNRAIYDLHKLGYDVTITPHGAA

SEQ ID NO: 515443 - protein, 417 aa, unidentified
MQQVPPGCRWVGRGIGLDLHRDFVEVAICEGGVVRSAGRVKTTPEALEVLAASLEPTDRVAMEVSGGSWEVARILEGHVQKVVVVSPDDTGIAQARTKTDRLDARALAKLLWQGDLDAVWMPDKRCRVLRRRLSRREQLVRSRTRCKGEVHAVLMRQLLGKPPCSDLFGVKGLKWLRSLTLPVEEAETVQAALRQIAFLDREIEAVERLIAKEMLASPEARRLLTVPGVNLIATATFLAAIGDISRFSSSRRLVAYLGLDPRVRQSGEQPARSGRISKRGSASARWALVEAAWSVVCQPGPLRAYYQRIRARRGHGKAIVAAARKLAVLFWCLLHRGEDYAHQQPSLTAQKLRRLEIVAGAPVRKGKPSGVWVTHARMRQAEKQLAAQAQASYERAVRDWQVGRPKKAGASVTAERA

SEQ ID NO: 515444 - protein, 340 aa, unidentified
MGEITTVGLDLAKNVFQVHGVDAEGATVLRKQLRRAQVPGFFGKLPRCLVGLEACATAHYWARELCALGHEVRLMPAQYVKAYVKRNKNDAADAEAICEAVMRPTMRFVPIKTADQQAAVLLHRGRERLVRQRTMLVNALRAHLAEFGIVAPQGLRNVGKLIAIIRDEDDARLPDLARQVLAVLAVQIEQLETAIAALEKQLMAWHKSNPVSQRLATIPGIGPIIATAIAAMVAEPSGFRSGREFAAWLGLVPRQKSTGGKTRLGGISKRGNQYLRRLLINGASANLLRSKATNADPWVIGLRRRRPSMVVAVALANKTARIAWAVMHRQENYQRTVLAA

SEQ ID NO: 515445 - protein, 483 aa, unidentified
MKPKQQEKNKKAICRPTQNNWHAMNRKQRRELTRKLQSEDLSLEVVHPDAAGIDIGNESHYVAVPPTRDSQSVRRFGCTTSELKEMAVWLKQCAIRTIALQSTGVYWIAVYDILEEAGFEVYLVNARETKNLPGRKSDVQESQWLMKLHTYGLLRNSFRPSQEIRTMRTYWRQRNDLVRSAGRHIQRMQKALTQMNIQLANVLSDVSGMTGQAIVKAILAGERDPYELAALRNWRVKASEEEIARSLEGNWQEDLLFVLQQEQDGYEFCQRQMAECDQRLQQYLQQLEDRSHGAGLPEEKRKERLRKKKKGNAPQFDLRAELFRVTGTDLTQIDGIDVTTTMTILSEAGWDMSKWKTEHHFVSWLRLCPDNRISGDKIIGKGRLPTNNRVTNALRMAASTLRLSNTYLGAQFRRLRTKLGAPVAIKAMAAKLARLVYRMLRYGMTFIDRGAQFYDAQHRKLQINYLKRKAANFGFQIIEVPAA

SEQ ID NO: 515446 - protein, 429 aa, unidentified
MSTSPSPSPHIVAWIGLDWADETHAVCLQAAGSADLESSALKQTPEALQLWIAGLRCRFPQGKVAIALEQSRGALFYALMTQDFLQLYPIPPQALADYRQALYPSGSKHDPGDAQLLLEFLRKHSEHFHPWVADTPATREIALLVQYRRKLVNQRTALTNCLQALLKGYFPQALDWWGDLTAPLAGDFLGQFPSLSQVQKASRLQVRKIFHAHARRTPEQIEEFLDQIRAALPLPTDEAVIQSSVLMVQVGVGELRVLAAGLERIDQRLKDLFAAHPDHEIFASFPGAGAALAPRLLAAWGSDRQRITAAVHMQQLSGIAPVTSQSGKKRWVHWRWACSKFLRQTFHEFAGQSRRWSPWAHAYYQQQRAGGANHQAALRSLAYKWIRILYRCWQDHTLYDEARYQQALARHGSPVAAALQQLPRPEAHP

SEQ ID NO: 515447 - protein, 397 aa, unidentified
MYIVGIDIAKRKHEAAVIDGDGAVIIKPFSFTNNCSGYNRLLAMLTKAKLPLDEVSFAMEATGHYWLALFTRLQKEGFRVQVINPVQTNSIRSFYIRQAKTDPRDALLIAEVIRFGHFSESTLHPENIYELRELCRGRHAIVSMQADVKRKVVALLDQVFPEYETAFTNMFGDTSMAILQACPTPKELSEMPLEELCHLIEVSSHKRFRMAKAQELQELARNSFGFAMAGDVFSTMIRLYAKHLVFLKQQVQEMDRKIAEIMDTLDTPITTITGIGPTLGAYILSEIGDIGRFSSAAKLAAYAGIDPTMRQSGEYNGVRNRMSKRGSPYLRHAIWLAASSAVLHDPALKLYFQKKRDEGKPYMASVGHACRKMVSIIYAVMRDNKAYTPYIPNEISA

SEQ ID NO: 515448 - protein, 343 aa, unidentified
MQAITTIGLDIAKSVFQVHGVDADGQVVIRRQLKRRYVLAFFQKLSPCLIGIEACASSHHWSRELQALGHTVRLMPPAYVKPYVKRQKNDATDAEAICEAVTRANMRFVPTKTPEQQGGLVLHRTRHLFIRQQTSVINAIRAHLAEFGIVAPVGRNGVEELLNVVADPNDKRVPEIARACLSAFGAQLRRIKEQILEFDRLIRAWHRSNEMSMRLDEAPGVGPVLATAVVATVADPKVFRSGRNFSAWIGLVPKQHSSGGKNRLGSISKQGDRYLRGLFVAGALAVIRYAKIHGTKHRPWLTALLARRPTKVAAIALANKIARMAWAMMAKGERYKEPVALAA

SEQ ID NO: 515449 - protein, 339 aa, unidentified
MKKSDCPTYLGIDVSKGSLDCCLYNGTEHKTRSFNSNKLSTVQKIISHFKISPVSCRVVLEATGVYNSAAFIGFTSQDFDVAVENPLRIRSFATMKNLLRTKTDPVDAKTIAEYGFTNNPVSTKPKEAYQCKVVARLKLIGFFKKLIAQNRNHIEALNNNSFECNATSLITHVKNEINHLNVTINEIKSDIEKILTKHCPELYKQYKSIPGIGPTVAGAIICFYGDFSGFSNSKKAAAFAGLCPKVCKSGSSVDKKGSISKKGNSMLRTLFYMAALSAARCNDTCQEVYLRLRQAGKPAKVALIAVANKLLRQAMALARKGESFIENYKEISPCAAKTT

SEQ ID NO: 515450 - protein, 458 aa, unidentified
MRRKRAARTDRQSLPMVHAHAAAIDVGATMHMAAVGPDRTDEPVRSFGTFTADLHRLADWFQACRVTTVVMESTGVYWIPIFEILQDRGLEVSLVNARDAKQVPGRKTDVNDAQWLQRLHAYGLLRASFQPKAEIAELRAYLRQRERLLEYAASHIQHMQKALTEMNLQLHHVVSDITGATGLRIIRAILAGERDPVILARLRDIRCHSSLETIEKALTGHYRVEHLFALEQALALYDTYQHKVAACDQRIETVLKGLSTHGLDPASLPAPRRRMSHQPNEPSFDLRGALYAVLGQDLTRIHGLGPSLALKLVAECGTDLTAWPSAKHFTSWLCLAPGNKISGGKVLSSRTRRSGSRAAALLRLAAVTVGKTETALGAFYRRLSTRIGKAKAVTATARKIAVLVYNALRHGMDYADPGASYYEERYRKRVIDNLQRRAKAFGFVLQEVTADASPSAVS

SEQ ID NO: 515451 - protein, 344 aa, unidentified
MTSMNFIGLDIHKKTISYCVKDAAGEVLAEGTILSTRQSLDVWMRTLCEPWTVAMEATMFTGWIYDYLLPHAAAVKVAHPLMLGAIAAAKKKNDRIDASKIADCLRCNFLPECYMASTEIRERRRTLRYRKLLVRQNVQLRNKVSQMLMESGVVYNKQKLHKVGYFKELMTTNPDIGEGLRPLLTICRETIVRIGKTEGALVRSLARDPLLSDRVQRLMTIPAVGPITALTWVLEVDDVARFGSVKQAISYCGLCGAERSSADMVKRMPISKQRNKHLQSVLVEAAKLGPRLSPDLALVYETEKQKGHANRATIAVARKLVAYLLAVDRSGREFVVAGERREAA

SEQ ID NO: 515452 - protein, 374 aa, unidentified
MTAASKGAADVKTTFGNAEGSSSVDEVVLGVDTHLDLHVAVALDQLGRRLGELTVPTTTRGYERLLRWAEGFGPVGCVGIEGTSSYGAGLARRLKNAGVSVMEVERPKRRHRRRNSKSDPIDAEAAARAVLAGEVVGEPKSGDGKVEMIRTLRSARHSAVKARSQAANQLKALLVTAPEELRHRLRELPTKELVATCVRFRPGDDPDDVRTATKFALRSVARRHETLSEEIAELDTQLDRLVAEVAPALISLPAIGTHHAATLLVVAGDNPERLKSEASFASLCGVSPVEASSGKVVRHRLNRGGNRDANRALHLICVVRMGSDKRTREYVARRTAEGKSKWEIMRCLKRYIAREVYRLLLSSTARPAPIGTSS

SEQ ID NO: 515453 - protein, 397 aa, unidentified
MTTATVEVIGGVDTHADTHHAAVIDTNGRQLGDAKFPATAAGYVALCAFLAACGTVTRVGVEGTGSYGAGLARHLRAVGLEVVEVIRPNRQARRLRGKSDPIDAYAAATTALAEAVHPVPKSADGQVEAIRYLLVARRSAVKARTAAQVQIKTLLITAPEPMRHRYRDLSDKALIDALARTRPTAAHPIAQALKSLGRRHEQLTAEIAELEATLAPLVKAANPALAATKGIGVITAAQLLVTAGDNPDRLRSEAAFAALCGASPIPASSGKTTRHRLNRGGDRQANAALHRIALVRMSYETRTRDYVAKKRSEGRGTKEILRCLKRAIAREVFTLLTSQGQIPTIDDLRPLRHERGLTLSHAAEHFGVWPAVISEIERGTRRNDELTATYRQWLLTA

SEQ ID NO: 515454 - protein, 427 aa, unidentified
MNEPKYKPTLCVGADVHLDEIVLRAVDKALGHEVLERFRVTNNLPGAQAVAATIAQVATELGYTRIEIGWEATGMLWIPFHRYLSTEPLLHPFELELVCFNPKLVAKFKDSLVLRSPKNDDRDAFDVAARIRFGELPVSYVPSDFWQGLRRLTRYRYRLSKAMSREKMRFQSYAYLKASDWKRVKAFSDVFGATSAALLTEFTVAELQAMTHDQLVDLIARRGHGRFADPAATARAVRETLRTSYPIDPRMDEMVTATLAAGWDHIRYLKRSMKRLDQHIARYIDLVPNPIITVKGLGSVITAGILAEIVDVLRFPEEKFLAQYMGLTWRKSSSGGFVSQNTRLTKVGNVYLRYYFILGADQLRKHNLEYKAYYWRKYQEVSKYQHKRALVLTARKLVRLVHALLTKNVPYVRPRMTDPGQEDDGLQ

SEQ ID NO: 515455 - protein, 344 aa, unidentified
MKPTTVAVDLAKSIFQVAISHRPGKTAETHRLRRQQLSAFFEQRPTSTVVMEACGSAHHWGRKFAAMGHQVVLLPPSQVHPYVRRNKTDSADAKALLEAVRNDVIRPVPLKTIEQQILAALHRVRAGWMAERTARINTLRGVLRELGMVIPVGAARVVPAVALLVEDADSEVPDGLRHTLWEVCCEIRELERRIRDVGHQLEALAKQFPDYERLLSIPGVGPLTATALLAFVGDVRRFPTGRHFASYLGLTPTEHSSGLTRHLGRISKRGDSYLRMLLIHGARSVLFASRRRTEPERLRAWAMTIEKRSGFNKAAVALANKLARIIWAVWRQPEAVYIARPKAA

SEQ ID NO: 515456 - protein, 389 aa, unidentified
MQTVNRRETLFVGVDVHKDTHTAVGLSPFGEKIFEMTIGNEAEDFISLVEKTKVEAKKSGLVPSFGLEDVHSWGERLSSFLVEEGLPVRAVAPILVDHRRQKTTHPEKNDSLDASGVAEVMIQRIDSLPVYTLSEETRKAKQIRELSLEREWLVKERSRLKNQLHILLHRIHNTGYRTKFKDPFSKKALRYWMRSIPKGTDAILARRMKRSARRIVDLREEIVEIEKELASLIEISGHTLSTASGCGVVIAAEIIGEICDINRFHSPGALAKYAGCAPREHSSGKTIRWRKTRSGNRRLNRAFHRMALSQISRSGNEAARVYFKRKVSEGKSKSRALVCLRRQMVNIVWMMMKHKTEYRLPAEAPARASHAGGSAQADYPQEKIVDFFS

SEQ ID NO: 515457 - protein, 429 aa, unidentified
MEQIPQPIVKAEPEPEFAALVAIDWADQKHYWSLRAAGQEGLQRGTLDNTPEAVEVWIMELHMRFGGQPLAVALEQRRGALAVMLSKYAHVHLYPVHPTTLAKFREAWYPSRSKSDPSDADLLLEILTAHRSRLRCLDPDTVEMRLLQNLVENRRKLVDERTALSNRLTDLLKLYFPQILGWFTDVASAVVGDLLQQWPSLQDLQQVQPAKLEKFLRDHHCSEIPERLTQIREAIAATHDRALLDSAPHLVAAWVRQMAVLRESIRQLDKRIAQLAAQQEDWPIFQSLPGAGAALAPRLMVALGTQRDRYSSAGDLQSFSGIAPVKEASGNTQWVHFRWACPKFLRQTFHEWAACSIAQCEWAKAYYEQQKVRGKQHHVAVRALAFKWMRILYRCWKDRQPYREEIYLASLTKRRTALVAALAQAVQMS

SEQ ID NO: 515458 - protein, 314 aa, unidentified
MEAAVVVGIDVSKRTLEVALSDGSGFSVANHEDGISELLARLGQSGATLVVLEASGGYERPAYLALWAAGVATALINPRDAYHFAQAQRQLAKTDQLDARGLCEFGLRMQPEPLPPPEAADEELKALAVRRRQVIKMLAAERTRLQQAPRSVQSSIKRMVRVLERALGALDHQIGQRLRDNPPLAQRCARLEQVPGLGPVTSAILVSRLPELGLLGPKQVAALVGVAPYDHQSGEWRGRSPIFGGRAEVRSALYMATLSAIRCNPVLRSFYRRLRVAGKPAKVAIIAAMRKLLVILNAMLKTNSPWRPPCAVVA

SEQ ID NO: 515459 - protein, 434 aa, unidentified
MSRVIVGVDPHKKSVTIEAVDEDGRVLATGRFGTDTRGHQAMVRYVRGQWPHHRWAVEGANGVGRPLAQRLLAEGESVLDVSAKLAARVRVFDTGNARKTDATDAHAVALVALRTPRLPVLGYDEELIALRLLTDRRDELAHRRVQTVNRLHRLLTELIPGGAKRDLSALQAKRLLATAKPRTLVGKTTRRMAAEELADLVAVDAKLKAIKKELKTAVTQRGSHLMDLFGVGAAGAARILCDVADVARFPDRNHFASWTGTAPLDASSGEQIRHRLSRAGNRRMNHVLHIAAIVQIRHDTEGRAYYRRKLAAGKTPMEALRCLKRSISDAVYRQLLADAENGTGASPGGHSGASSQSSAADLSTPVIGSSDQPLPGPAATTLPPRRGPAKTSAASANQPPRRRAGAVKVERPTGRTTLTATSAGAPSQRPKQRP

SEQ ID NO: 515460 - protein, 355 aa, unidentified
MTSTKYIGMDVHKESISIAVLNFAGKVVMECVIETKASTILQFIHGLRGDLQVTFEEGTWAGWLYDLLKSHVTELVVCNPRKIALLKDGSKSDRIDARKLAELLYMNKLKSVYHGEHGLRMLKELSRSYLTITKDLGRVMNRLKALYRSWAIPCAGTQVYAPRFRSEWLSKITEAGVRRRAELYYQQLDALRLVRQQARKELLAEARKHRATKLLRQIPGIGPLRAAHLVAVMQTPHRFRTKRQLWTYSGLGLETHDSAQYRVVEQQLQRSKKSVTLRGLNTNHNHDLKDIFKGAAMRASTAAGPLRDFYEALLAKGRKPTMARLTLARKIAAITLIVWKKEVRFDASYLKPQAA

SEQ ID NO: 515461 - protein, 385 aa, unidentified
MNQISCSATSSHTLHCALELSKKSWLLAIQFPDREQPSVYSIKGGDTEKLMAKLTAARDYWAKVSGSLPVITVCYEVGYDAFCLARFLKARGIECLVIDPGSLQVNRRGRRVKTDRVDVKMLLRTLIAWCRGERHVWSLVRIPSVDEEDLRRSHRERSRLVRERTAHINRIKGLLFAQGIRDVKVKSQYKTLAVDKLLTADGHRLPPRLASEIARELQRLAMVQEQIAEIERERDTAPTPCEATERKRQLLLQLKSIGPAISALLSREVYYRQFANRRQVGSFLGLTPSPYSSGEEERCQGISRAGSGQVRAIMIETAWLWIRHQPKSALTRWFVERTAGQSTRMRKIMIVAVARKLAIALWRYVEQGLVPQGAILNPPTTGRAR

SEQ ID NO: 515462 - protein, 348 aa, unidentified
MTIVEKTRPVTGGVDTHAEMHVAAVVDHLGGVLGIEAFETTESGYQRMLRWMRAHGDIRMVGVEGTGSYGAGLARHLSRAGIELVEVDRPNRQSRHRVGKSDPLDAVAAARAALSGVATGRPKSRDGNVEAIRVLMVVRRSATSERIVTLNQLRHVCFTAEPAVRRRFEGLSIAELTRTAAALKPRIGDDQVRHATLITIRTLARRVVYLRAEVAEITGLLKPLVERTAPGLLAVYGVGYEVAARLLVAAGDNPERLRSERAFAHMCGVAPLPASTGKTTRHRLNRGGNRQANNALYRIVITRMSSDERTRTYVTRRRAEGKSTGEIVRVLKRYVAREVFHHLQPATS

SEQ ID NO: 515463 - protein, 430 aa, unidentified
MGRLKIVFPVCCGMDVHRDFVIACIASTNSQGVTEYQSKRFSTYTGDLRKLAAWLKENHCSDVCMESTGKYWFPVHNILEKDFHVVVSHPKFVKAIKGKKTDKKDAMWIADLFKHDLVRGSFIPPEDIRQLRDLCRYYQKLVWNTTGEKNRAQNCLTVSNFKLDDVFSNVFGKSASAIISQLLEHPGEAFDVAPFLDKRCKASHQEIQEAIDGVFSPWQAEKLKVIRKHISNLDDLRDALQKLIFKLAEPYSRQIELLLTVPGISDPMTAIRVIAEIGADMRQFESSKHLCSWAGLTPQNNESANKKKTTRIGKAGQYLKPLLIQCAIAASNPRSKLHPEILAKYQILKKRRGAKKARVAIARRLLTAIFHILLNDAPYQPADSSAKDSAPEQRIISLSQAIALLNRKGYVISEVADISDLPLVESAPSS

SEQ ID NO: 515464 - protein, 468 aa, unidentified
MSLYSITSGSLIVALDIGKNVHWFGCYHYDGRLVELVPPRKVRSDTVGFAQFTATVDPLLASGRFPAGVFGNEHTGVYHEPWAWLIAAHYQAALQPAAACPVAYRWLNPLLTKKRQDETSVRQRTSDRTAVAAVAACLADGLGHPAHLLTDNAAQLRELVRSYAQVSDQLRFAGRQLLPQVDRLWPGAIADVKQFRRAHPDLPPPTPIVETHALDRDRLAALLLYCPNPHDALALGAAGLIQLFHDHGYRAGPKTAEAILTALRHSPLPPKTVAATYASRLQIDYRRYLALAEASETLVSQITTLAPLTPARFVDSVPGIGPLLAASYLAPLGDARYFATASQVWALAGYDLSTAESGDTKRIGHITKRGSPALRDTLYQIGFHTASQCPPIGEAFLAARERGLGETAAVIHAAHKANRLCFTLLREARMYEPATPAEEAHFQQRWQRFQQQLAKQRQRHAVQQRLAA

SEQ ID NO: 515465 - protein, 345 aa, unidentified
MQPMYYIGLDVHKRTISYCVKDGSGVIHAEGTIPATRLNLDLWMKTLPQPWTAAMEATVFTGWIYDHLQPHAAALKVAHPLMLRAIAAAKKKNDRIDAKKICDCLRCDFLPECYMASTAIRERRRTLRYRNLLVRQMVQMKNKISMLLMEAGVSYSKQRLHKAGYFRELLATNPDIPEGLRSLLRLCRETVVRLQKTESALVRSLEQDSLLMDRVERLMTIPAVGPITALTWALEVGDVKRFSSIKKAISYCGLCGAEKSSGNTIQRTPLSKQRNKHLQTTLIEAAKMAPRNSPALAMLYDREKQKGNANRATLAVARKLVAYLMAVDRGQRNFQMMETNNCIAA

SEQ ID NO: 515466 - protein, 318 aa, unidentified
MNTKINQSINVGVDTGKTQLDIHIRPLHLFFSVENNEKGIKKALKTIKSHNPERIVIEATGRLEMPFVLACAEAQLPIVRANPVHIKRFAGAIGRRAKNDRLDAELIAHYGEAIKPAFTVTKPKNIRLMSDLVIRRNQLLSMQTMEKNRIQILPASLHPTIKPMLTTIKNQITKLEEKLVKLIEESPEYQAKNTILQSVPGIGNIAAASIISNVPELGYITNKQAASLIGVAPITRESGRYKGKRVIQGGRAQVRTVLYMAMMSAMQCNPVFKATYARLLAAGKPKKVAIIACVRKMVVTLNSMLRDGAMWDENTAKN

SEQ ID NO: 515467 - protein, 319 aa, unidentified
MSGSAVVGIDVSKGHLDVVVIGAKLEAERFANEVEGHSALAAALQPLGVRLVVMEATGGYEAALACALQAAGLAVAVLNPKQARDFAKAMGRLAKTDRIDARTLAELGIVLVGRADLARFVRPLPDAQQQALAALVTRRRQLLTMMVSERQRLQLAIAVVRPSIEAMITAIRAQLDDVEAQMVRHVREHFADLDTLLRSANGIGRVASATLIATLPELGELNRREIAALVGVAPMANESGTSRGRRRVQGGRFEIRRVLYMAALSAAKRNPTIRDFYQRLRAAGKLPKVALVACMRKLLTILNAMARTHKPWDESLHRA

SEQ ID NO: 515468 - protein, 351 aa, unidentified
MSQKTHAVITRTIGIDTGKNTLHLVGLDDRGTIVLREKLGRSRIRTRLANIPPCLIGIEAGMATHYVARELLALGHNVRQVPPAYAKPFRQGHKNDFRDAYAIAEAVQRPSTRFVPVKTDDQLDLQALHRVRSHLISERTAVINQIRSFLLERGIPVRQGLRFLRRQLPEILAKRVDVLSPRMIRIVEDLGGDWRRLDERIDCVTEEIEQLAHGTESCRQLMTVPGIGPIIASAMVAAIGNGASFAKGRDFAAWLGLVPKQMSTGDRTILGRISKRGNRYLRTLFMQGARVILLRPVNWAKHSFGPWLTAAAKRLHHNVLATALANKLARIAWTILAQRRNYEARVIADVA

SEQ ID NO: 515469 - protein, 456 aa, unidentified
MKNEKTAKLQIANLNAAGIDVGAKSYMVAIDQEKLNVREFGVYTKDHERLIHHLKCHGIKTVAMESTGSYWQTLFASLQAAGLDVLLVNGSQTKNVKGRKTDVIDCMWIQKLHTLGLLSGSFLLSNVLQELRTYYFHRQHLIEQTVMYANKMEKSLRLMNIRLDIVLRDVTGKSGLNIIEAILTGDRDPKKLASLADVRVKKSQEEIANALQGSWRQELLFELQASLQFYKLYEVALIECDNLIEMKLTEYVPKENVFKGNDIEVKVNYKKTRKHSPAFNVSKISYDYFGTDLFSIPGVSHTTVLCLLTNIGNDIHKFPTGKSFASWLRLVPNNKISGGRIISSRSPSGKNYLAIALRQAANSIGNQKEHPLTPFFKRIAFRKGRISAITATARKLAVIIWNMLTKVQPYNKENKQTNNERHKHIQLRNIERRIGSLQLNQDELKKLFTRTSLLVT

SEQ ID NO: 515470 - protein, 409 aa, unidentified
MRLFVGLDVSSFDMKVCFLNGEGEKLDSFSVSNDLPGAQALKERLLQCTTNQEVETLKIGLESTSVYSFHPSMFLHHDEDLKRFGTKVFLLNPKQVANFKKSYSDMNKTDEIDAFVIADYLRFGRNQMSIVKESQYVALQQLTRSRYQLVRMLTKEKQHFLQHLSYKCNTFSQEVDSSIFGTAMMELFLERFSLEELANMPLEELAEFLQEKSKNRFGNPKCVASTIQKAVRTSYRLDKVVEDSIDILLGTSIEIIRTYQRQIKELEKSIKRIMAGLTQTLESIPGIGPIYAAGIIAEIGQIERFDDETKIAKYAGLYWRTYQSGRFTAENTSLSRNGNHYLRYYLVEAANSVRKHVLEYQEYYAKKYNEVPKHQHKRALVLTARKFVRLVDALLRNHQLFTPERCVKV

SEQ ID NO: 515471 - protein, 387 aa, unidentified
MPQPNDLSRSLVALDQDSTIIAVVEMSQSSWLVAGMLPGIERQPRKKLEPSAERLLGLLHRWRDEAVKAGRKITRIALAFEAGRDGFWLARWLRARGVEAHVIHPSSVAVSREHRRAKTDRLDTELLKRGFLGWLRGERGHCTMARIPTIAEEDAKRPNRERECLVRERTRIVNRMKGTLARLGIRNFKPTLRKAAERLATLHTPEGSALPPNVSAELQRNMARLGFVVSQIKEIEGARQKRLEQEPETEPHAMVRHLARVVGIGVETADMLVNEVLSRPMRDRKAVARYAGLTGSPDESGAKRREQGLARAGNARVRRGMVQLAWRFLWFQKESALARWYQARTADSRAGTRKTMIVALARKLLIALWRFVTTGETLEGVILRPAG

SEQ ID NO: 515472 - protein, 375 aa, unidentified
MKKNSSGCKSPKARMKATRATNVTVGMDLGDKTSRYCMLDENGEVSRESGVATTKKAMTQVFATMKPCRVAIEVGTHSPWVSRLLQSCGHEVIVANARQVQLISKSSRKNDRMDAQTLARLVRVDPRLLRPVQHRSEQAQGHLRVIRVRAALVEARTMLVNAARGLTKATGERLPSCDADQMGVELMESLPAGLQNSLRPLLEEVGSLTEKIQALDQQVEQIARTDYPETDLLRQVSGVGPLIALTFVLTVEDRERFQKSRDVGCYLGLRPRQSDSGESEPQLRITKEGDPYLRKLLVQGAHCIMGRRGPDTDLKRWGLKLSARGGKNAKKRAVVAVARKLAILLHRLWVTAEVYEPLRNSQSGPPVKKSRKAVA

SEQ ID NO: 515473 - protein, 367 aa, unidentified
METIVRCCAGLDVHKDSVEACVRRMEQDGKLYQQIRHWGTTTRELMAMADWFKAEGVTQVAMESTGVYWKPIFNILEGNFEVLLVNAQKLKHVPGHKTDVLDCQWIAQLLQHGLLKGSFIPPRWQRELRDLTRQRAQIIGEHSRISNRIQKVLEDANIKLGSVASDVVGVSGRQMLQAIIRGENNPAQLADLARCRLREKIPQLQEALYGKITEHHRWMLGLLWDQLAATEEFLVRLDERITQLTRPQQPALEKLDAIPGIDRRVAEVVLAEIGPDMSPFPSDAHLASWAGVCPGNHESAGKRRSGKTTKGSRWLRQALVQAAWAASHKKDSYFQAHAQNLMRRRGRKRGLVAVAHSLLTGDLSPLP

SEQ ID NO: 515474 - protein, 352 aa, unidentified
MINYCVGIDVSKDHFHTAICTKDDWDLKFSNITKWDNDKTGFKEFLKWVKQQVPKGSDVHFLMEATGVYHEKLSYCLYEKSHIVHIVLPNTSKHYFQSLNVKSKTDEIDARVLSQFGVERKHPVWEPPKPLYLKLRDLTRYKVQLQKQKNGLSNIGHSKEHSAQVDPLISRANKRLIRQLDKEIGLIKKEIEKHISSDPELNEKIRKICTIKGCGIQTAAGVIGETNGFQHFKSMKQLASYAGYDVVQHQSGTSVAKRGRISKKGNKYIRAALYLPALSASRNCPELADKYKSLVDRNKIKMKGQVAVQRKLLLLIYTLWKSGQEYIPGYAKNKVAKANAPATQDSTVVALP

SEQ ID NO: 515475 - protein, 355 aa, unidentified
MNSEKYIGVDVHQATISVAVLDSAGKLVMESILETKAATILEFFAGLRGTLSVTFEEGTWAAWLYDLLKPRVAKLVVCNPRKNALLKEGNKSDRIDAHKLAELLYLNKLSSVYHGETGVRMLRELARSYLTIVKDLTRVMCRLKAVYRSWAIPCAGRDVYYTRHRAEWLGKIKEAGVRRRAERLYQQLDMLQYLRQQARRELLAESRKHPITVKLRQIPSLGPIRSALAVALIQTPHRFRTKRQLWAYSGLALETRTSAEYCYVKGGLRRSKKQISIRGLNKDHNHDLKGLFKGAATRASVLPGPFQDFYQRSLAKGIKPTMARLTLARKIAAITLTLWKKGENFDADKLKSQAA

SEQ ID NO: 515476 - protein, 344 aa, unidentified
MNEVITIGVDLAKNVFQVHGVDAEGTVIVGRQLRRSQVLPFFKKQPPCLVGMEACATAHHWARQLIELGHEVKLMPPHYVKPYVKRSKNDAADAAAICEAVARPTMRFVAVKSAEQQSVLMLHRTRELLVRQRTMLVNAIRAHMAEFGIVAPVGIPRVKELFAVIADADDDRLPEIARACLEGLAKQFLSLHEEIAIAERRIYAWHRSNEASQRLETIPGIGPITATALATTITDPSVFRSGRELAAWIGLVPRQNSTGGKERLGRISKQGDQYLRWLLVAGAMTIIRHAKRRGTSNLPWLANLIAGKPTKVAAVALANKMARIAWALLRTGQDYQKPALTHGT

SEQ ID NO: 515477 - protein, 343 aa, unidentified
MESVRIGIDLAKNVFEVHGVDARDNIVVRKTLRRETVGRFFANLPPCLIAMEACSGAHYWARKLNDLGHESRLISPQFVKPYVKTNKSDLNDAEAICEAASRPSMRFVPIKSDEQLGVQAIHRARSRLVGNRTALANQIRGILAECGIVVARNIAALRRRLPEILGSDEVTLHPLIRSLVLDLQDELALADSRVHAYDRRVKQICKESEVCRRLERIEGIGPLTATALVAAAGNASSFQNGRQFAAWLGLVPRHLSSGGRTRLLGISKRGDRYIRTLLIHGARSALGRIRHKKDPRSQWLRKLRERRPYNVAAVALANKNARIAWALLRHGEEYDQRLGVSAI

SEQ ID NO: 515478 - protein, 404 aa, unidentified
MGVGQRNQTEEESEMNATTVAVDLAKSVFEVAVADSNWKIIERARLTRTQFERFFANRQVAQVIMEACGSAHHWARWLTGLGIEARLLPAKYVRAYVKRNKTDAADAAALLEAARASDIAAVKVKSVEQQALQSLHRTRSLWMGTRTSRINALRGFCREFGIAIIVGARSGVEQIARVLGDPNSTLPTMLRGTMKMLIEEIRLLEARIAQLEKELTELARQSPACKTLLSIPGIGLLTATAMLAATSGSVAHFKSARHFASWFGLTPKEYSSGSTRHLGRISKRGDRYLRMLLTHGARSVLRAAKLARQAGRAVTGLRDWALNVQARVLCCGIAVLAGALMAKFTAVYSSPRAVLQWYDWPYGQMLNFTGLTRTLNEVWPFLAIAFVVFYFPSVRRMQAKARAE

SEQ ID NO: 515479 - protein, 339 aa, unidentified
MKLYAAIDLHSNNNTLVVINEQDQGIYRKQLRNELEVVVEALEPFRADLAGMVVESTYNWYWLVDGLEGAGYRVHLANTAAIQQYQGLKYSDDSSDATWLAHLLRLGLLPEGYIYPKETRAVRDLLRKRGQLVRQRTRNILSIENLTNRNQGVGIKGNEVKQLKAEAVERQYENEDLALAVTSTLSIVEALSGQIERIEKRVKETVRLAPSFESLKTVRGIGDILALTIMLEAGHLSRFPSVGDFSSYCRCVSSQKLSNGKKKGSGNVKNGNAYLSWAFIEAAHFAIRHDPVIRRFYQRKKAKTLSVVALKAVAHKLARACYYVMRDQVPFEVEKCFGH

SEQ ID NO: 515480 - protein, 401 aa, unidentified
MVAQDDAGKTLARRRLPEGADGIARFHEMVASCLGEDAEPDPARVIVVIETDRGPWVKALAAAGYRVYPANPRQAARHKETVANSGKKDDFFDAGCLADMGRTRLHQMRELAAGSDVAEAVKIAARAHQKLVWERTRHLLRMRSALREYFPAALEAYADLTLAGKDALELLAKAPDPESAARLTVTQITAALKRAGRRGDLAQRARDIQAALRAPHLDQPDVIAEAYAASVQAAAAVITALNEQVKIMEAKVSGLFRRHPDAGLHLSQPGIGDITGARILGEFGDAPGRYASAKARKNYAGTSPLTIQSGKKKTVHARYIRNRHLIDALHAQALSALSVSPGARAFYDDLRARETGHDDAMRRVASRLAGILHGCLKTGREYDEATAWSHRAETPEAAEAA

SEQ ID NO: 515481 - protein, 306 aa, unidentified
MNEDYDGRQYVGIDLHRRRSVIVRMTADGEQLGWVRIDNDPVALGLELAKAGPDPEVVLEATYGWYWAVDALQTAGAQVHLAHPLGVKGFTYRRVKNDVRDAADLADLLRMNRLPEAYIATPAERELRELVRHRAKLVALRSGLKAQVHAVLAKQGLLPAVSDVFSAAGQAWLRTAALDLVYRQRIDSLLELIGAYDGEIECFRAMIANRFTGHYGYRVIQQISGIGPTFAAVFVAEIGDIGRFSRPEKLCCWAGLTPRHRESDTRVHRGPITKQGSKLVRWAAIEACQRTRPGTKLVLHQATLGR

SEQ ID NO: 515482 - protein, 343 aa, unidentified
MGEVSTIGLDIAKSVFQVHGVDGAGAVMMRKRVGRAKVLEFFGGLSPCLVGIEACPSAHYWSRELQALGHTVKLMPPSYVKAYLKRNKNDANDAAAIYEAVTRPSMRFVPTKTPEQQTGLMLHRSRQLLVRQRTMLSNAIRGHMAELGIISAKGRNGAAELLQIIGNVADDRIPPVARFCLDLLARQYLTLIAEVSSIDKRIHAWHRSCEASRRLEEIPGIGPIVATALVAEIGDWRAFHSGRSLAAWIGLVPKQYSTGGKERLGSITKQGNRYLRWLLVAGAMAVIRYARRHGTKRPWLTRIMDRRPAKVAAVALANKIARMAWAIMVHGERYREPKLLLAA

SEQ ID NO: 515483 - protein, 318 aa, unidentified
MTRIICGVDIASATLTARIGRTGAWREFANSREGISELADFCQSQGVQLVAMEATGGYEKRSYVQLTEHGLGVAIVNPRAVRQFAQSMGALEKTDAIDAGMIAWYAETKQSQPLSLAPKAQLELRARVTRLRQLTEVRTAQKNQRRLVSLPAIEKSFEQMLGFLAQQIAELEQAISELIEADPLWREFDRAFRTIKGVGDRTVANMMAEMPEIGTLSNKTISKLAGLAPLANDSGNHQGKRSVRGGRGVVRDLLFIVGSVVGRHEPDFIAMEKRLRTANKPPKVVRIAVAHKLLVRLNAKAREIRQSHAQKQALACPC

SEQ ID NO: 515484 - protein, 355 aa, unidentified
MIIIGVDFHPEFQQIASLDTDTGVFEEKRLQHPEEAEKFYRALAIAGQKVRVGMEASGHARWFERLLGELQIELWIGDATEIQSRRGRKQKTDRQDAQHILKLMLKDDFPRIWVPSWENRDLRQLLWHRHRMVQARTRIMNQLQAVALNEGLRCKKRLWRAGGRQQLESFALAAWASRRRRDLLELLDRLNPTIAELSQAIEQEGEKCPEAKRLMTHPGVGPLTALAFVLIIGNAERFQCGKQVASYLGLVPLEKSSGNRRRLGHITKQGSSMVRFLLVEAAQVTVRSLPEWRSQYFRLLMRRGRKTAKVAMARRLAIRLYWMWRQDLNYEQLKSSVRTQESPDIAMVCSRTPRN

SEQ ID NO: 515485 - protein, 355 aa, unidentified
MKYHTSTTQFNCGIDLHARQMYVCLMDRDGKKLVHTNIRNNDFAYFLKLVAPYRHDLTVCAECMFGWYWLADACAEAGLHFVLAHALYLKAIHGGKNKNDRIDSEKIAHLLRTNLIPPAYVYPAEKRPLRALLRQRILYVWNRSELLSRIRSHQLAHNRELLRQTRPNRGPWAEQLLAQEPDPVRQLALQNDLALIGHYDAQLASLEKELLKLTRQTASRDFTLLQTTPGIGEYLGLTILHEIGDIARFPTVKDFLSYCRLVKGTVASAGKIKGLRGKKLGNPYLRWAFGEAAIVAKRDHEVLGPLAQRLEARMNGNKFKANAVLAIKLARAVYYMLKSHTVFDADRLVAALSRN

SEQ ID NO: 515486 - protein, 344 aa, unidentified
MKTASIIGIDLAKNTFQLHGVDAEGRVVLRRMLRRDQIATFFANLPSCLVGMEACASSAYWGRVIEECGHTVRRIHAKFIKPYLMADKNNANDAAAICEAVSRPHMRFVPSRTQEQSDIQAIHRVRRCLVQPRTAAINQARGLLAENGIVIKQGACHVRSQLPAIVNNPDNGLSVPMRRLLASIYENITFLDSRIIEHDKALHEIAKAHEACKRFMKVPGIGVLTATILLTMAGSAADFKNGREFAAYLGLVPRQYSTGGKHRLLGITKRGDGYARTLLIHVARAVLRTMKIGRAPLGDGMRADWLARLMDRRGYNRASVALANKMARTAWRMIPQGTEYQMVA

SEQ ID NO: 515487 - protein, 353 aa, unidentified
MTNGSSLNETMGLDLSDKTGVYVVLDHEGEVCREGKVALTRQALSRAFGGGSPCLVAIEVGTHSPWVSRELALLGHEVVIGNPRQVKLISQNKKKSDREDALLLARLARLDRRLLRPVQHRGEQAQADLAMLRARSLLVAGRTSLINSVRGMVKTTGLRLPRCSAESFAARAQPHLPRELVPALEPLLAEITSLTARIKQITHAIEHAAAERYPETQQLRQVPGVGLICSLTYVLTLEEPQRFRRSRAAGAYLGLVPRQRQSGEQQPQMHITKAGDVALRSVLVQSAQYILGRYGPDSDLRRWGLKLAGEGNKARRKKAVIAVTRKLAVLLHHLWSTGQVYEPLRQADLQTVG

SEQ ID NO: 515488 - protein, 414 aa, unidentified
MELLHERCAALDIGKKDLKACVRAPNPGRKRSRCQEIRTFATTTDALLQLRDWLVAERVSLVVMEATGDYWRGAFYLLEDDLNVILVNAAHAKGVPGRKTDVCDAAWLCQMGECGLLRASFVPPEPIRQLRDLTRYRSTLLGERSREAQRLEKELEDAGIKLSSVATDILGVSGRAMLSALIAGERDAQVLAEMAKARMRPKIPQLVQALTGNFGEHHAFLCRLHLQRIDQLSAAIEELSARIEEQMRPFARQLEHLATIPGVGQAVAEVIVAETGADMSRFPTAAHLASWAGVCPGQHESAGKRRSGKTRHGNRWLTSALGTAAMAAARTKDTTYLGARYQRLAHRLGKKKALVAVQHSILIAVWHMLANDVDYADLGGDYFARLDPDLAMRRIVRQANALGFTVRFDPIQAA

SEQ ID NO: 515489 - protein, 315 aa, unidentified
MDEVTYVGIDVSKARLDVAMLPGREAFAVTNTGAGIEQLVSRLHSLTLGVVVLEATGGYEIEAWTALSDAGLPVAVMNPRQVREFARATGRLAKTDRIDAEVLARFAQAVQPEPRLLPDAATLALRELVRHRRQLTASLTQAKNRLRLASATRCELEDEIAYFKRAIARAEARIAELIEQVPETRARAELLRSVPSVGATVAATLLAELPELGSLNRKKLASLAGVAPINRDSGTMRGRRTVWGGRAGLRSTLYMAAVVAVRHNAALKTFYLRLVGRGKPAKLALTACLRKLLCILNAIARSEQPWRELPAGLAT

SEQ ID NO: 515490 - protein, 462 aa, unidentified
MPERNDRETGESNRRQLEGLPVIRRNVAGVDLGSERHWVCAPTQDGSGREIASFGATTPELLRLAEWLKARQVESVAMESTGVYWIAPHEVLEAQGLQVLLVDTRQLARVPGRDKKTDPSDCEWIQRLHSCGLLRGSFRPEEAVCMLRTLVRDKANLVAESGDWLRRMQKSLDQMNVRVHRAVSDIDGVTGMAILRAIAAGERDAQKLAQLRDRRCNKTQQEIAEQLSGHWREDHLFSLQQALKMYDAVQERIAAYEQEILRQLEEMEEPGQGGETAPPLTNANKAKAIKRRGQEAKRQALYRMSGVDITQIDAIGVETVEVVLSEYGPDLSPFPTEKEFVAHVTLAPRVPRSGGKPLKKKKRNSASTRVAAALRMAALSLRHSQTALGAYYRKLAQRLGGDVAVFATARKLATLIYRLLRWGQPYMDEGIEAYEKRYRQQRVKSLTAKAKDLGYQLTPLNA

SEQ ID NO: 515491 - protein, 425 aa, unidentified
MNYKQNEKINQVKESTLVVGIDIGSTKQYARAFDWRGIELGKVFTFSNSREGFEAFKAWMRHLQDKYRKSDVIAGIEPTGHYWFDLGAYLEDEGILLVMVNPYAVKQTKELDDNSQSKNDRKDPKVIAKLVTEGRYSAPYTPDGVYADLRIMVTNRKRLIREMTQIKNRFARWFAIYFPEYTDVFGDYEAQSSMLLLKKVCTPEAIVELGAEKINKIWRDAKLRAVGMKRATTLCETAKRSIGLKKGSSAARYEMKLLLEDYEYKKAQLDAVMEEIEKLCRKIPESEQMLAIKGIGVITVAGFLAEVGDVRRFESPRQIQKLAGLSLRENSSGKHKGQTTISKRGRSNLRAVLFNAAIPLIATNPEFKSLHEYYTTRANNPLKKKQSVIAISCKLIRVFYAILANGVTYDAQKMLSDIHRQPQAA

SEQ ID NO: 515492 - protein, 340 aa, unidentified
MVHVGVDLDKRSSQIAVLSEDGEIVQHRLANDAARLEKFFADLPPHTPIAIEASGTWWWLVDLLEELGHQPVLSNPKQTKAIAAARLKNDRVDAERLALLLRGDLLPRVWIPPTALREARELIRHRIQLVWLRGVIRNRLQAMLARRNLQPTSGKSWLTQRGQRELQRLPLGETPSRIREDCGALLPTLDAQIRRLDADLVTRWGADARVRRLTTIPGIDPFIAIVLVLELGDIERFASAKRVASYVGLTPRIRGSAGRVRAGHITKEGNRLLRWVLVLAATQAVRRPGPLRAWFHAVKKRRGKKVARVALARRLAEIVFHVWKQECDYFTVVRHGVVRG

SEQ ID NO: 515493 - protein, 378 aa, unidentified
MKALYILGIDAAKHKVRAALRGAQERFLFEIEATGVLHLNWAAALCRAGYAVTVINPLMARRLYSVENSIRDNKSDPVDARGLCRIGALHGAKLWEKYAYRLEPEQFALQRLQTVRKALRSGLTNLKKTYQSVVELSFPELGTLLEVDGVGIRALLEKASTPAAISRLRLSTLEKNWMVRPKAAALKALAADSIADPELAAASTPALQAILQSLSEMETRLREVDRQIDQLLCQSVEPHTKALVESLPGFGPTTAAKVLAYLPSEVLSSGSNRKVAARLQAFMGNEPRLKESGQWKGQTKMSKRGVEILRTAFFQAAFNCAQHDPQLKAFYQRKRAQGKKHQVAISHLMRILTRRLVAVLRSGKPYDPTYNSELKNAA

SEQ ID NO: 515494 - protein, 314 aa, unidentified
MVSIYVGIDVCKERLDVHFTPTGESVSVSYDASGLKELTLRLKALPVVCIALEATGKLETLAAATLAEAGLPVAVVNPRQIRDFARATGRLAKTDRIDACVIARFAEAVKPAIRKVADAQSRRLSECIARRRQLGTMLTAEKNRLSRTEDLGLGKTVKTHIKWLKRALAGLDARLKELVHENPLWRVKEALLQSVPGIGDVVSRTLIAELPELGKLSRRQIASLVGVAPLNRDSGTMRGRRSVRGGRPTVRRALYMAALVASRKNSLIRCFYVRLREAAKKPRVALVACMRKLLTILNAMVRSGQPWRTQAVPA

SEQ ID NO: 515495 - protein, 357 aa, unidentified
MKEIISLTTKRVCGLDLGDKTSAVCVCGRGGEIEWEGRVRTTVAGLAKRFQGVEPMRIALETGMHSPWVSRQLRQWSHEVIVAHAAKVRLISNSRRKNDRLDARTLADLASVRPRLLSPVEHLSAEAQAHRGVLRSREALVRSRSSLILHARGLVKAWGGRLPSCSAESFVKKVQGAVPAELLPALAPILEMIGELTVRIRAYDRQIEELLKTHYPQAQRLRQVRGVGPITALAYVLALGDPQRFAKSRTVGAYFGLVPAQRDSGSLRPQLRISKQGDPYVRKLLVQCAHYILGPYGVDSDLRRLGERLAQTGGKNGKKRAVVAVARKLAVLLHRLLVSGQPYEPLRHAVVAQRPAA

SEQ ID NO: 515496 - protein, 351 aa, unidentified
MMIIGVDYHPSFQQIAFFEEETGECGERQLNHSDGEAERFYRDLQQSGIRVRVGMEATGYSRWFERLLAELGIEIWMGDPAEIKAKRVKKRKTDRNDALLLLRLMREDNFPRIWVPSPENRDLRQLLWHRHRLVQMRTRIINQLQALAMNEGYRWKKKLFSEQGRALLEKLSLAPWASRRRQELLELLDRMNPTIEELTAAVEQEARKRPEVLRLMTHPGVGPLTALAYVLIIGTPTRFQRGKQIGTYVGMIPSEDSSGGKQRLGHISKQGNSLLRFLLVEAGQVVARIHPDWRRRYIHLAMRRHKSIAKVAMGRRLAIRLYWMWRNGCEYSQSLEFGSYAGQLGTGHGVK

SEQ ID NO: 515497 - protein, 339 aa, unidentified
MGQVSTVGLDIAKTVFQVHAVDHEGAVVIRRTLRRGQVLKWFAELRRCVVGMEACASANYWARELAKLGHEVRLMPPAYVKAYVRRNKNDAADAAAICEATSRPSMRFVAVKSEQQQAAAGLHRVRDLLLRQRTMLRNQVRGLMAEFGIVAARGRQGFAALLAILADAEDQRIASPLREALLSTAELLRGVDCKIEAIDRQLVAAGRENASYRHLITAPGYGPIVASAMVAMAVDAKAFRRARDFAASLGLTPRQDGTGGKVKLGPISKRGNGYLRRLLVNGATAVLNSKRAKQDPWLRKLLATKPRKVAAVALANKMARIGWALMMRNEDFRGQSAMA

SEQ ID NO: 515498 - protein, 359 aa, unidentified
MQRKELSFSGQKIFIGIDVHKDSWRVAIAPEVGIVKGHSGRPSAKELLDFLKKHYPDGEYHAVYESGFSGFSTYYALQEVGIDCIVIHAADVPTTQYEETMKTDKVDAVKLVKSLKAGLLTGIYIHKRDDLDARAVVRLRKTIQKQLGGYKSRIKHLLHSNGVAFPERFSKPGTHWSKAFINWLQQEVSLLSSTRASLDLLIVQVESIRNTLLSATKKVRELSRNERYSHDYELLTSIPGIGISVAMSLLTEIGDFKRFRNEREFASYLGLVPTSHSSGGKVSHGEKTFRGNKKLGPQIVEASWISIYRDKGLGCAYISYKKRMEPQEAIVRVARKLSNIIFSVLKTGKKYEPYQWNDK

SEQ ID NO: 515499 - protein, 314 aa, unidentified
MTLSSRYVGIDVSKAMLDVFDEGTGVAERIANAPEAIAALTARWRCAEVFVVFEATGVYDRALTRALSQAGIGFARVNPARARSFARASGRLAKTDAIDARMLAAFGRTLPLSADAPRSAARDELAFLAKRRDQLVLMRTQEKNRRGHTADADMRESIARVCELLTAEIEMVEARVEALIEAAPDIAEQARLIRSVPGIGAVACMQLLAQMPELGRTGPKQVAALAGLAPINIDSGAYRGRRAIGGGRKRVRDALYMAALNAVRRADRFKAFYQKLRDAGKPGKLALIAVARKLLTTLNAMLRDNQTYRKIQTS

SEQ ID NO: 515500 - protein, 355 aa, unidentified
MNQEKYIGMDVHQATISVAVMDAGGKLIMECLLETKASTIVEFIQGLQGTLSLAFEEGTSAAWLHDLLKPHVSRLVVCDPRKAALLKEGNKSDRIDARKLAELLRTNQLKPVYHEEHGIRALRELGRSYLTITKDVTRVMNRIKALYRSWGIPCSGTSIYAPRHRAEWLAKLVEPGVRVRGEHLYQQLDSLQPLRLQARRELLQESPKHSGAKLLRQIPSIGPIRAALLVALLQTPQRFRTKRQLWAYSGFAVETHDSGEYRCVRGKLQRNRERITVRGLNDNHNKDVKNLFKSAAISASTRPGPLHDFYGARVEKGMRPTMARLTLARKIATITLTMWKKGVGFDPQNLYRQAA

SEQ ID NO: 515501 - protein, 427 aa, unidentified
MKKADLLSTLFVGIDISSRSNVVALLDFESQKPLQSFAVGNNQPGAVELAKRLAAYLRSRKNLAHLVVALESTSFYGVHVANYLSSCEVLAPFHTAVYCLNPKAIRNYKKSFIDLGKNDYVDAFVIADFARANRITTKPWRGSQFLALQRLTRHRLHLAKALTREKAYMLSNIFLKFSEFSLLDAQEQPFSNSFGAAASSVLTDFLSTEEIIEMPTKDLIRYICEKGHNRFPDPEKTASLLQQAARNSYRLDKCLYEPLTVSIASSFTLLSTYETEIKAVNKAIEKTLKGIDPSAYQSLLSIPGIGPVMAAGILSEIGDIHAFNSQEALAKYAGLVWRENQSGNFQADDTPLSKAGNTYLRYYLIEATSHVKNHCSEFAAFYQKKYDEVKIHQHKRALALTARKFVRLIFGLLANHQLYSSSRVVQA

SEQ ID NO: 515502 - protein, 338 aa, unidentified
MNILFLGIDLAKNVFQLCGLNQASKPVYTKRTGRKELLQTLANIPACLIGIEASTGAFYWQREFEKLGHKVKVISPQYVKPFVRGQKNDGNDAQAIAVALMQPTMQFVPPKSPEQQDIQALHRARQRIVNHRTATVCQIRGLLLDRGIPIGSAVSRSRRAIPLILEDAENGLSSRMRRIIAELYDLFNDLGRRIHFFDKEIETVFRQSEACQRIAKVKGIGPKTATAVVAAIGKGTEFKNGRHFAAWLGLVPRQHSSGDRQVLMNMTKKGDKHLRTLFIHGARAVVRVATNINDGHMNQWVNQLKERRGFNKTTVAVANKNARIIWSMLRNDTGYQVV

SEQ ID NO: 515503 - protein, 373 aa, unidentified
MPPVSQQRKKRKVNEKKLNHLGIDVGKRKCRAALKDDRGKILDEFFFGNNSDGILELIKRIHNHRMKKCNAVLESTGNMWMRIHDTLEDNGIDTILANTFKTKIIAQAKIKSDKLDARILSDLLRTGLISESYVPVKEFREKRSLVRHRIVLSRTKTKLANKIHAILDKYEYRTELTDIFGIHGIEWLKILSVSPIDKIILDTTLASIGSIDNQIQIISKEIARYAWHDSKDVKILLSITGIDIFSAMLISTEIVDIKRFVTPWKLVSYAGLAPSIRESSGKIKTGRITKQGSPLLRWILVQCALSAIRYEHHMRTFYERIKQRKGHGKAIVATAKEMLVIIWYMLTRHQLYKYINISRYEQKLERLKKIGSQ

SEQ ID NO: 515504 - protein, 354 aa, unidentified
MTTIAHPELSRITVGVDTHGDVHVACALDQLGRHLATTRVATTPAGYRALLAWARSLGEVEAWGVEGTGCYGAGLVRFLAAQGQLVWEVNRPDRQARRQRGKSDPVDAQAAARAVQAGQATAIPKAGDSIVEMVRCLRVARTTAAKARTQTANALRALVVTAPAELREQLRDLPAAQLAKTAARLRPGPIATTTAATKLALRLLGERYQALDAELARVDAELDRLTTQAAPELRQLCGVGPEIAGALLVAAGDNPLRLRSEAAFSMLCGASPIPASSGKTVRHRLNRGGNRQANTALYRIVVVRLRWHQPTRTYLARRTRQGLSKREIIRCLKRYVAREVFAALQAPTALAATT

SEQ ID NO: 515505 - protein, 404 aa, unidentified
MNNVAGVDVSKGKSMVSVLRPFGEVVAKPFSVGHTGSELKELADYLKSLDGETRVVMEHTGRYYEPVARFLHEEGIFVSAVNPKLIKDYGNNTLRKVKTDKADARKIARYGLDNWVELRQHTPMDTIRMQLKTLNRQQGLYSKTKTMMKNNLIALLDQTYPGVNDLFDSPVREDGSQKWVDFAMAFWHVDCVRGMSLTAFTERYRKWCKRHGYNFSQSRAIEVHTKAQDLLAMLPKDALTKTMVRQAIDALNAVSASLERLKTEMRALAAQLPEYPIVMAMRGVGDSLGPQLMAEIGDVTRFTHRNAITAFAGVDPGADQSGTHEAKSARASKSGPPELRKALFLVMDCLLKTMPQDDPVYRFMDKKRAEGKPYLVYMTAGANKFLRIYYGRVKEYLASLENSD

SEQ ID NO: 515506 - protein, 337 aa, unidentified
MLIIGCDFHPGFQQVAIFDNRKAGIEQKRLGHRQEAEEFYRSLKGQAVRVGMEACGHYPWFERLLESSGIELWMGDAARVRAAVVRKQKTDRADAEHLLRLLMEDRFPRIWVPSLEVRDVRQLLVERHKQVQARTRTKNQLQALALGQGVQKKRKLWSEAGRGELEKLELLPYARQRRQHLLQTLDQLEAEITELNRQVAEEVRRRPEAVKLMTHPGVGPVTALAMVLTLGPAERFENARKVGSYFGLIPSEHSSGGRQQMGPISKQGNPFLRFLLVEAGQSAARHDQELRRFYERLARRRHRALAKVAVARKLAMRLYLMLREDWNYAQLRKAVCR

SEQ ID NO: 515507 - protein, 343 aa, unidentified
MEGITTVGLDLAKNVFQVHAVDADGDVIVRRALRRAQVLAFFEKLPPCLVGMEACGSAHYWAQQISAMGHTVRLMPAVYVKAYVKRNKTDAADAEAICEAVTRPTMRFVAVKGQQEQAAAIVLRTRDLLTKQRTQSINALRGHMAELGVIAATGARSCTRLIEIVRDEADDRLPAMAREALAEIADQIDRLNGKIADLDRKIVTAVRQDDVARRLTTIPGVGPITAATVRAAVPDPGGFRTGRDFAAWIGLTPRSSSSGGKEKLGSISKRGNPQLRALLVIGAMAILKLSRNGVSMPPWISALLLRRPFKVVATAMANKMARVIWALMSKGGAYNAPPAMMKP

SEQ ID NO: 515508 - protein, 365 aa, unidentified
MNAIHYIGFDVHKKTISFCVKTADGQIVEEGTLEAERTVLRRWAAARKQAWHGAMEATLFSAWIYDTLKPYAQQLSMGHPAKMKAITAGKNKSDRIDARTIADLLRCNLLPASYVLPPPLRDLRRLLRYRNLVVQQSVRMQNKMAGLLMESGTAFNKQKLHQKKYFSDLMKSLEEVPESVKDLLRMSRGSMEMFQSTQKQLVKRLLSEPALEQRVERLMSIRAVGPITALTWALEIADPHRFSSIADAVSYCGLSAAFRSSAGKQQRGPISKQRNAWLQPVLIEAAKLAPLWNPQLAAVHARALERGHANRATLQVARKLVAYLLAVDKSGQPFQVHTPPPPAGTTAKKKPARKSKKAVALAPAA

SEQ ID NO: 515509 - protein, 343 aa, unidentified
MDHFAGLDVSVKETSVCIVDDTGKIVREVKVASEPEALLAVLKNPAYHFKRIGLEAGPLSQWLFSALAEAELPVVCVETRHMQAVLKAQINKTDRNDARGIAQMMRVGLYRPVHVKTLRSQKLRMLLTHRKLLQSKAIAIDNDLRGTLRNFGLKVGMVGTVKFEVRIKELVENLPDLAVLVEPLLAVRRVLREQFVILHRRLLAIVRDDEVCRRLMTTPGVGPVVALTYRATVDVPARFRKSKAVGAVFGLTCSKYQSGEIDRSGRISRCGDEMMRVMLYEAAQSMMWSKKWSWLKAWAMQIARRRGMKKAIVALARRLAVILHRIWVDGTEFRWTREQAVAA

SEQ ID NO: 515510 - protein, 330 aa, unidentified
MQAIGIDMSKDTFHAAFDDRKVLKFANTPAGIEEFMTTLEDDDFPITDTRIGVEATGAYHLLFAVTLTEHSWDVVVINPLESHRMITQGLRTVKTDRLDALKIRTMTGMGKGYLFTDTKDVLALKALVVERQALVEMRKMTKQRRDVHRLKEAATGFAFYDSFTTVLEALSEEIKHIERSMRGYETETQELLRSIPGVGSITAAILVAFIGDINRFATPEKLVAYIGLDCRVYQSGTSVHGKGYISKRGNGYLRHILFNAAFVARRNNPDLKRYHEQKMREGKHYFSALCAVERKLVHLIYAVWKRGTPFVRRSQTKTSGEFSPAVDKVA

SEQ ID NO: 515511 - protein, 339 aa, unidentified
MIIQSKIIVQESKPLFAGIDVGAEELILVIRKNGIPHKAQKFANNPADRARLVKKLVNLPGIIVCLEATGVYHFDLSIALHDAGVALMVVNPKASHNFAKVLMKNSKTDAVDAETLAQYAERMDFVAWTRPSDEKIALRSFARRIDALTRQKAAARNNLHALSASQETPKAVLRDVKLAVSQLEKRIDRLSNEALALIGKHAELERVFRLLTSIKGIAKTSAIALMGELLLLPPGLSHRQWVKFAGLDPRAFDSGKSVHKQARLSKAGNRHIRSALYMPALSAKQHDPHVKAYFQHLVDNGKKPLQAVCAVMRKLLHAIHGMLKDNTLFDNTRFYAIPA

SEQ ID NO: 515512 - protein, 357 aa, unidentified
MGKATGNLARVTRIGLDLAKTVFQVHGVDAKGEVVIARKLRRGTMLEFFGRLAPCMVAMEACGSAHHWGRQLVALGHAVNLIPPAHVKPYVRRNKTDAADAAAICEAAMRPGQRFVALRSIDNQAAVMRHRIREQLVGQRTALLNALRGHLSEIGVVTAQGAQHAYRLKRMLADGADENGEIVIPEHVRVALAPLAAQIDALDQAIAAIDDKLIETVKADEKARRLMTIPGVGPVIATAVVATVGEVSSFASGREFAAFLGLTPRQRSSGGKERLGRITKMGDRYLRKLLVVGATTVLHHAIGHNDSLRCWARQTLERKGGRAGFKLTAVALANKLARIVFAVLRSGEVYDDRPVAA

SEQ ID NO: 515513 - protein, 348 aa, unidentified
MSLPGSSVLGIDTHKHTHVAVILDGLGRQQGSLQFAASDEGAARLLAWSRENGSPSIAGVEGTGSYGYQLTRALQAADITVVEVNRPDRANRRRKGKSDPIDAEAAARAVLAGQATAVPKRREGVVEALRALTIARNSAVKATTTVSNQIKALLVGADQELRDRMRVQSLLQLAGRCSELAPASGLHVALASLGRRWLLLHDEVLLLDRAIRDLVRRTVPKLLERPGVGIHSAAQLLITAGGNPDRLHSDAAFAALCGASPVQASSGQRQRHRLSRGGDRQANNALWTIANNRLIHDHRTRDFADRRRQQKGDSRKDTLRVLKRYIAREAFTIILTALNAERALIEVA

SEQ ID NO: 515514 - protein, 416 aa, unidentified
MDTMYERCCGLDIHKKTIEACFRSGKKKTHMSFGTTSAELRKLTMWLVENDCQSVAMESTGSYWKPIFNILELSGTDMKIIVVNARHMKNVPGRKTDVNDAEWIAELLQYGLLRPSFIPDREQRELRELSRYRKSLVEERAREINRLQKMLEGGNIKLTSVVSEVTGYSSRRLLDRLLRSDEPMTEEVISELVHTSLVGKSKELEIALDGLLSELQKELLIKVLDHIDDMSRRIADLDDFCRKQMKKYEDALDKLDEIPGIARRTAETILIETGLDMSRFPTAKHFARWAGLAPGNNESAGKRSSGRTTKGNPTLKSTLIQSAKVAARKKNSFFKARYQKIAAKRGANRASVAVAHSMLIAIYHILKSGERFKDLGEDYYNQFNREKKKNYYLKKLTKLGVNLKEATLSISIQTAT

SEQ ID NO: 515515 - protein, 420 aa, unidentified
MPNIEIGVDFMVKENFIYVGIDLHKETHTAVMIDCYNQKLGEITFPNRPADFPKLVTKVKKCNTDAKEVVYGLENAYGYGRPLAVWLIDKGYFVKDVNTAISHRQAKHRGAMYRKSDSDDAEAIALATLNMLDKLPDACPNDAYWSLGQLVHRRDNIMKQRTRLVNQLHEQLCIAYPSYKSFFNDISRPTALYFWEHYPSRKYLRGKSVEDLRKELVPVSHNRCSTKNCEKILDAVASDKVKNNAYQDARDMVTLSIVSDLQHYDSQLAEVDKMLEQMYKMLGCTLTTIPGVNVITAVKILAEIGDIKRFSNANKLAQFAGIAPLHLSSSGKGKDVATKQGNRRLQATIYFLAIQMVQVSSKGTPRNSVVRAYYEKRKAEGKTSQQALICISRRLISIIYGMLKHGTEYRMPVVESAGEK

SEQ ID NO: 515516 - protein, 441 aa, unidentified
MAFDLPTIYDRVISLDVHSRQITACALIVEENSISRLIHQQFGTFKRELSEMAQWALELRPEAVVMESTGIYWIPPYEALEKVGIKPIVVNPRHVKALKGHKTDVSDSHRLALLTRADLLKGSFVPPKKFRDLRVLSRQRKKYVNQLASLKNRLHSTLSTIGVRLGTVVSDIHGKSARAMIKAIIAGKEPEAVILLASKRLKASKAELLDAVQANMTEPHQFVLEDLMLRIEQAEAGIAQYDQKLVEELVEERPYLEILQTIPGIDLVGAAMLLIEIGTDMSVFGNVKRFASWVGICPGNNESAGKRKSGRVTKGNVYVKTMLVEFAHAARRTDSVFKVKFQSLVGRIGFKRAIIAVAHKLLRTIFSMLKNREVYKDTTVDYEALIAKRNAPRWVRQLKKAGYFDQIAENAIREKEAKASRGKKEEAGADTKKKAPTNARE

SEQ ID NO: 515517 - protein, 391 aa, unidentified
MSMYFIGIDISKYKHDCCIISAADQKVVSKVTIKNNKAGFNELLTIIHSLANPADIRIGFESTAHYALNLELFLENSLLTFMEVNPALISEYKKSKTLRRTKTDSVDCESIARWLMAVEYKPHSKGFYHAYSLKSLTRLRDKLIRQRSFYLIKITNVLDHTFPEFKPFFNERLSKTALYLLENYGSAEKMARMNSASYEKLRSLSRGKFSPQQFLRLKELAANTVGVNNSIFDVELNSLLSLYKSLVKEINTIEKEINKLIEEVHPHYMSVPGIGPLSAAVIYSEYGDISNFTNPGQMLAFAGIEPGINESGTESHGGKMVKRGSSQLRYTLINCCLPLIRFDMTFATYYAKKRGEGKPHRVAITHVAKKLIRVIYALERQDIDFNAQKLR

SEQ ID NO: 515518 - protein, 313 aa, unidentified
MTTLGAWIGVDVSKKFLDVATTTKALARVANEEGERRALALRLKSEGVRGVIVEATGGLERAILEALAAEGVAASIVNPARVRKFAEGTGQLAKTDRLDAEILARYGEYMRPAPTVLADAHRQNLRELIGYRAQIVQEITARSAQVRGYLAPDLKARAQAAIASLRAESKALEKEIVSLIRLREDMRVVFKRLTTMPGVGVIVAASLIAEMPEIGSLSRTKIAALAGVAPFPKDTAERKGYRAIRGGRADVRQALYNAARVAIRHNPPAKALYERLRAKGKSHKVAMVAVMRKLLTILNAMLKSSSDWACKPA

SEQ ID NO: 515519 - protein, 412 aa, unidentified
MSNILFVGIDISSQSIAVYFMDQNGYGPKNSIELKNDLLDASLLVEHILTYADKIDANHVRIGMESTSDYALHLHHFLASVEDLKHLQPQIFVLNPAIVNGFKKTLTFRQKTDNLDAKLIADCVRFGRVEPSSIPDLRYTALQRLTRYRYQMVQSITNEKNRALHLVYLKFSSYRSDSLFSDTFGKASSSVLETFSVEEISAMPIEDLVTFICENGNNRLKDPAAIAAKLQSLARRAYRLSPDISDSIELTLSMSLENIRFMESQLSKLNKEIARQLCAFRQTLDTIPGIGPTLAACIVSEIGDISRFKDESSLAKFSGIVWTRYQSGSFDAQNTSLAKCGNAYLRYYLVEAANSLRVHNQEFKAFYQKKYNEVTKHQHKRALVLTARKLIRLVYAMLSKGQIYNGGGHGLK

SEQ ID NO: 515520 - protein, 349 aa, unidentified
MVVIGLDAHKRTHTVVAVDGTGRKLAERTVPTTRAGHLELLRWARRWRDRTWALEDCRHLTRRLEVDLLAVGERVVRVPPKLMAGTRRSNREPGKSDPIDALSVARAALREPDLPTARLDGVERELRLLVDHREDLVVDRTGHQERLRWFLVELGIDEPPARSLDRPIILDGLEADLASRTEPVARFARDLLARIRELTAAVNALEAEIRVLAARVAPSLLALVGCGHLTAAKLVGQTAGIGRFRSRAAFARHNGTAPVPVWSGNTVRHRLNRGGDRQLNVALHRIAITQLQREGPGREYLAKRMAAGDTKTEAIRALRRRLSDEVFRRLTTDELDRNKASAASTAAAA

SEQ ID NO: 515521 - protein, 359 aa, unidentified
MEKRITRRLKGKVLKVGKRDQVFVGLDVHKRSVHAAVRVNGLELGSVVLPAEARAVLRFLEPYRIGLKGVVYEAGPTGYGLLREMRKGGFPAMVVAPGKIPRPAVTGAKSDQLDCKKLAEFAEKELLHEVKAPTLSEEEDRQVQRLRDSTLKRRRQAKQKIMGFLLQHGLPEPENLDGWGQPALLILQKMPMSAGLRFSLDLMLEDLYHLQDQLQRVSKRLKEMAKAQRYTEAAERLKTHPGVGDVTCMQVLTELYQPERFESAKQVAAYVGLAPQVRQSGESRKEGPLLRGGRGALRATLVEASWSWVRRDKRAAKTFGRLVKNTGSAKKAIVAMARKLVVHLWTMLVRQQDYRPQAV

SEQ ID NO: 515522 - protein, 407 aa, unidentified
MEVIYPRCAGLDVHKQTVVACVRIAGNGPPLQEVRSFTATTSGLLALCDWLDSFGIEHVAMEATGVYWKPVWHVLEGHFELVLANAAHVKNVPGRKTDVNDAMWLADLLAHGLIRASFVPPTAVQELRTLTRTRKQFVRERSAHVLRIDKVLEDANLKLGVVLTDIMGKSGRAVLQAIVDGHDDPEYLAGCVSVRVKASRAEVLEALRGRIRAHHRFMLELHLGHIDALDKAIAAIEKEVGLGLEPFRHAAKLLSTMPGLSSVSAHVVVAEIGIDMSRFATPGHLLSWACMCPRNDESAGKRRSTRLRRGGQWLKTTLVQAAWAAIKVKGGYLQAQFHRLRARRGAKKAIIGVAASMLTAIWHMLRDGTEWHDLGAAHFDRADAHKTANRLLRRLQQIGYAVHLTPA

SEQ ID NO: 515523 - protein, 343 aa, unidentified
MEQYAGIDVSLESASVCVVDASGRILREAKVASEPEALITWFGKSGCKMSRIGLEAGPLSQWLYAGMREAGLAAELLETRHVRDAFKAMPVKTDRNDARGIAQLMRLGWFRSVHCKSLPAQELRAVLTARKLVQGKRHDMEMSLRGILRGFGLKVGHTTPRSFEGRVRELVDGHATLLAVADALLLARATLWEQLGKLQKRLVSLARHDTRARLLMSTPGVGVLVALTYVAAIDDPGRFKSSKATGAHFGLTPKRYQSGETDVTGRISKIGDASVRTALYEAANVILTRPVKGSLLKSWAMRVAKRAGMRKAKVALARKLAVVLHRMLADGTRFTADKAAAAT

SEQ ID NO: 515524 - protein, 375 aa, unidentified
MSQYNTVFVGLDQHKESIAVAYAPEEREAEVTFLGPVGTRQCDIDKLLRTLQSKASNLLFAYEAGPCGYWLYRYLKRKGLRCLVIAPSLIPRKSGDRVKTDRKDAVQIARLLRSGDLSGVYVPEIEDEAIRDLCRARQGAMHDMKASRLRLKSFLLRQDIRYTGRATWNPAHLRWLSEVVCPTPAQQIVYQEYLRAITQHYERLGRVEAELHQQVKGWRLSPLVEAYQAMRGVQFHVAVTTAAELGDIRRFDKPPQLMAFVGLHPSEDSSGPRHRKGGIAKTGNLYARTALIEGAWSYRYPAKVSRQIQERQEALSPAIRDISWKAQVRLCKRFRKLIAQGKHPNVAVTAVARELVAFLWAIAQQVQLPAAPSLN

SEQ ID NO: 515525 - protein, 342 aa, unidentified
MSNIQTIGIDLAKNVFSIHGVDAYGKCVLRKTVKRNKLLDTFANLPPCIIGMEACSGAHYWARELRKLGHNPKIMASKFVIPYRQNEKNDANDAEAICEAVSRPKTRFVSIKSEEQQAVLCLHRIRQGLIKTRTATINQLRGLLAEFGLVMPQGRYSVQNSINDILEDAENGLPMMARELLQDLSSKIQSLNLEILHYDRRVSALVREMTSAKALMDIPGVGEHSASAIVATVNDAKQFGSSRQFAAWIGLVPRQYSTGGHVHLGRISKRGEKHIRTLLIHGARAVIAHCKEKTDRNSLWLQQLVERRGYKRAAVALAAKNARIIWALLTTGNEYKTNYING

SEQ ID NO: 515526 - protein, 272 aa, unidentified
MIRNKPSAAVYGIDLGKNVFHVVGTDAAGNVIQRARFRRDTLLAFFERAERALVGMEACPGSQWLARKLQAIGHSVRIIPAQFVKPYVKSNKNDTIDAAAIAEAVVRPTMRFVQIKEPDQVDLQALHRIRDQLVGSRTRLICQMRAFCLEYGVAIRQGAGVFKLDLPRVIADESNDLTPTMRRLLAELFDDLSRLEKRIGGVTREIEGLAATDELARRLMTVPGIGPLVATALLAAAGNAQQFKKARDMAAWLGLVPQQYSTGGTTQMLCVS

SEQ ID NO: 515527 - protein, 363 aa, unidentified
MIVIGADTHKRTHTVAAVFAASGQLAGELTAPAREPGFRELLAWGRAIDADRIWALEDCRHVSGAFERFLVAMGERVVRVAPKLMGATRKGERARGKSDPIDARAVARAALQEGPEALPAAHRDEEALRIKLLLDHRDDLVKARTEDQQRLRWHLHDLWPELQVPTGALDRKVWHDRLARKLSRAEQTTRVQIARELVLEIRRRTRRINELQRQLAELVSDYAPGLLALEGCGSLSAAKIVAETAGVRRLGTDAKFARLAAVAPIPASSGKRIRYRLDRGGNRQLNRAIHCIAVSQGHCYPPAREFLARKQAEGKSRREALRCLKRHLARRIWRLLVESEIGRSTTTVDSQRGSLSPQITEAA

SEQ ID NO: 515528 - protein, 351 aa, unidentified
MNVTKYIGMDVHRAMTVSAVLSATGKVVAEAIIETKGSVILDFIQSQRGTLWVTFEEGTQAAWLYDLIQPHVAKVVVCDPRKISTQGNKADRPDAKRLAELLRTNALTAVYHGERSTRALKELARSYSAIVGDSTRIKNRLKAVFRARGIDNSGAGIYTTEERECWTSKLEAGAVRLRVLRLWRELDTLDVLRAEAEKDMVVEARKHLSTRILQTVPGIGPVRAALILAFALTPHRFRSKRQFWGYSGLAVVTRTTAEYELVKGRIRRTKKRPALRGLNPNCNRVLKDVFKGAAGTAANGPWRAYFESKVASGNKPELVLLTIARKIAAITLALWKKGERYDETKLTMHAV

SEQ ID NO: 515529 - protein, 422 aa, unidentified
MLEQKRDREEIISRVAALDIGKASLVCCVRVPDGASPGRRLQEVQTYSTMTRSLAGMAERLRGLGVTRVVMEATSDYWKPAFYLLEAYGFEVWLVNARDVKHLPGRPKTDKLDAVWLCKVAERQMIRPSFVPPPPIRMLRDLTRYRVDLVAQAGAERNRVEKLLEDAQIKLSVVVSDLFGVSGRAMMAALIAGRRDPKSLAQLARSSLRRKIPALEEALTGHFSDHHAFLLGKMIARVEAIEADIAEVDARIEAQLAPFAEAAARLIEIPGIGPAAAAAIIAEIGVDMSRFPTPAHLAGWARFAPGVKESAGRKKGSGSTGHGNPYLARVLGQIAVSAARTNTFLGERYRRIARRRGAKRAIVAVGRSVLTIIWHLLADPEARFRDLGADFYLSRTDTERRKRNHVSQLEALGYRVTLELAA

SEQ ID NO: 515530 - protein, 280 aa, unidentified
MPESMCHWNAQGVCVVDGSGKIVRETKVESEPAALIGWLGSLGFRLGRIGLEAGPLSQWLYMAMKQAGLAVELLETRHVRDAFKAMPVKSDRNDARGIAQLMRLGWFRPVHCKSMAAQEVRAILTARKLVQSKLLDVENSLRGILRGFGLKVGKTTRKNFAERIKELVKGHPNLKTIGEALLSVRAVLLGEFHTFEKRVRAMSCLNANARLLMSTPGVGQIVALTYASAIDDPARFRSSKRAGPLFGLTPKKYQSGETDRSGRISKIGDASVRAADIHFK

SEQ ID NO: 515531 - protein, 351 aa, unidentified
MIIIGCDFHTRYQQIAMANDETGELLLERRLDHQSGEAHTFYRNLQGPVCVGIESTGPIHGFERLLAELGHELWIGDAAKIRASEVRKQKTDERDARLILDLLLAKRFPKIWVPTPDERDLRQLLWHRHKLVCLRTMLGNQLHALAMSQGLCRKKALFTKKGRMELLHLALAPWASWRREELLKLLEQLAAPIAELERAVMEEANRREDAVLLMTHPGIGPVISLAFVLAIGPITRFCRSKKIASYLGLNPTEHSSGGRRRLGAISKQGNTMVRWLLIEAVYPAVRKDPALRQDYLRLKFRRGHAVAKVVIARKLAVRMYWMLRSGAAYAQLVRMQGSSGATLMDASPSLG

SEQ ID NO: 515532 - protein, 324 aa, unidentified
MREKKKEQKKVYIGVDVSKDSLDVAIHGVKNLMHVSNDGTGVRKVVRLAVKRNAVTVCFEATGGYEVKLWMALTEAGLNPAPSNPRMVRHFAQSAGKLAKTDAIDAHIIADYAYAMNPRIMPFPETAELKEIASRHCQIQEMLTAEKSRLHSTRNDCIKEQIRAHIRWLEEELDKTDKDLKAGIKACPEWQQKDKLLQSVPGVGNGLSTCLIARLPELGFLDRQKIAALVGVAPLNRDSGKFHGKRRIWGGRSRVRAALYMAALSAIRCNPTIRPLYLRLLEKGKSKKTAITACMRKLITILNAIMRDHICWHAANQPVSATVA

SEQ ID NO: 515533 - protein, 401 aa, unidentified
MKEFNAEEVRVETASALETVRRAQAFVRYPAYIGLDVHKETIVVAVARAGRDTPESREEIANKPKTVGKLVERLNREFGGEVLLFCYEAGPCGYGLYRQLLELGHDCQVVAPSLIPRKPGERIKTDRRDASKLSRFLRSGDLTAVWVPDEEQEAMRDLTRARDDLKAQERKARQQLNAYVLRHGHAWPSNKTRWTQTHYNWLESLKFPHDWQQVVLQEYIDAVKAASQRVADITAQMERVLPQWSLAPVVDSLVALRGIDKLAAMILLAELGDISRFDSPKQLMAFLGLVPSEHTSGGRRRQGAITKTGNSHARRMLVESAWSYRFPARQTAHLKRKAKNASDEAKAIAWRAQKRLCGRYRTLLQAGKNTKQTTVAIARELAGFIWDIACHEMPKVQQTVR

SEQ ID NO: 515534 - protein, 344 aa, unidentified
MNKYAGLDVSLEETAVAIVDETGRVVREAKVASEIEAIDAWLRAQGIEIVRLGLEAGPLSSWLYAGLKEHGWPVVCIETRRLRAVTRAMPVKSDRKDAEAIAQVMRTGWYRAVHVKSLESQQLRLLLRHRKILQAKRQDLENELRGTLKAFGLKLGAVTQRTLAARVLELVAGEPWLERLARPMLAARAALIDSFNELHGLLLKIVKADAVCQRFMTVPGIGVVNALAFKTGVDDPTRFRHSADVGPHFGLTPRRYESGETQRIGPISKCGDAMVRSLLFEAAMTLLHRVKASSSLKRWARALAKKVGPRKAAVALARRLAVIMHRMWLDGTDFNPELVRAPTH

SEQ ID NO: 515535 - protein, 429 aa, unidentified
MIMGFTKPIEHFNLQQKKVITTNTLYVGIDVSSKSNVIYLMLPNGDKHSNFSVANSREGSTQLVKRILSALTSHSLDTVLIGLEATSVYGDNLVYFLREDATLAPFNRKIHILNPKQVKKFHDAYNDLPKNDYVDSFVIADCLRFGRINKEVYMGDYRYKALQNLTRARFFAVQNLVKEKQRFMNVLFKKYSTMTQEKVFSDTFSTTALAVYDEFESAEALANMDLHELTDFIIEKGKNRFPDPDAVAKAIQKAARSSYRLPKTVNDSVNQVLSISITSMKALESQIKEFDKAIKAQMELLPNVLISIPGIGPVYSAGIMAEIGDINRFNSQAALAKYAGLAWKQHQSGGFEAEVTRLIPSGNRFLKYYLCEATFSLVRCDKEYSDFYHLKYKEVNRCQHKRALALTARKFVRLVFRLLKDNRLYCPAK

SEQ ID NO: 515536 - protein, 402 aa, unidentified
MNAVGIDVSKGKSMVAIMRPFGEIVSAPFEIKHTASDINSLVELINSVEGESRIVMEHTGRYYEALAHQLSEANLFVSAINPKLIKDFDNDSLRKVKSDKADAVKIARYALDKWQNLKQYNVMDELRNQLKTMNRQFGFYMKHKTAMKNNLIGILDQTYPGVNTYFDSPARSDGSQKWVDFASTYWHVDCVRKMSQNAFIDHYQNWCKRKKYNFSQSKAEEIYGKAKELVPVLPKDDITKLIIKQAVDQLNSASITVESLRTLMNETASKLPEYPVVMAMKGVGTSLGPQLMAEIGDVSRFTHKGAITAFAGVDPGVNESGSYEQKSVPTSKRGSSDLRKTLFQVMDVLIKTHPQDDPVYQFLDKKRAQKKPYYVYMTAGANKFLRIYYGRVKEYLASLPES

SEQ ID NO: 515537 - protein, 335 aa, unidentified
MDRQYVGIDFHRRRSVIVRKNAAGEQLSSVRVANDPLVIAAAVAEAGPSPEVVIEATYGWYWIVDWLQEQGATVHLANPSGLNWGTRRVKNDERDAIDLIDMLRLGRLPEAWIAPPATRELRELVRYRAKLVALRSGLKAQVHAVMAKEGVLPAATDMFCAAGNVQLNEMQLGEAYTIRVESLRDLIEIYDREVAMLETNIRDRLRGDRGYRAIQAINGIGPTMAAILVAEIGDVTRFRSAAALCSWAGLTPKHKESDLTVHRGQLTKQGSRLVRWAVIEGTVRYHGGGKLAADYHQIAERRGKNKATVAIARKVLTLVYYGLRDGEIRCLAKTA

SEQ ID NO: 515538 - protein, 367 aa, unidentified
MGKVIMVANDLHDQNMLVSLAVDRGPVRTRTYPHTAGGRNGMIRTVQRLAREEGAERIVHVYEASGLGFGLHDQLVDAGWESHVLAPSKISRSPKQQKDKTDEKDARDLLAVLRGHILGGNELPGIWIPDLEARDDRELVRRRLDLQDAATQARNQISSLLKRHRFVKPEAAGGNWTKGHREWLRGLVEDKEQLAWGAQTVLDSLLRQLEALEGEVQRMDEAVKQLAKVPRYAAPVAELTKEKGVGTLTAMTYLTEMGQMARFRNRRQIGAYLGLVPSCWESGEQQDRKGHITHQGPWRVRKVLCQAAWTALRLDPETQARGARMARKGKPRKKVMVAVMRKLAIRMWRTAGQAQRQAGCLATGTGP

SEQ ID NO: 515539 - protein, 338 aa, unidentified
MKLYGAIDLHSNNNVTVLIDEKDKVIYQKRLANDLPLIVEQHSAYASSMEGIVVESTYNWYWLVDGLMEKGHRVHLANTAAIQQYEGLKYTDDDSDARWLAHLFRLGVLPEGYIYPKQERAVRDLLRKRSQLVRQKTANLLSIHNLYSRNTGQSISANRIKQLTSEKVDAQFTNSEVALAVKANLMVMRSLETEIAVVERVVKERIKLRPGYRYLLTVNGIGQTLALTIMLETGDIGRFPKVGNFASYCRCVGSEKLSNGKRKGTGNTKNGNKYLSWAFVEAANFAIRFDPLIARYYQRKKAKTHRVVAIKAVAHKLSRACYYVMRDEVPFDVNRAFA

SEQ ID NO: 515540 - protein, 341 aa, unidentified
MDYYAGIDVSLECSSVCVVDGSGKIVREGKVTSEPDALIEWLRSPDYELSRIGLEAGPLSQWLFAAMREAGLAVELLETRHVRKAFEAMPVKSDRNDARGIAQLMRLGWFRPVHCKSMGAQETRALLTARKLVQSKLRDVENSLRGILRGFGLKVGKTTELGFAGRIEELVAGHPHLEMIANALLAVHAVLRNEFKAFEKQLRKIARSNTQVRLLMSTPAVGPIVALTYASAIDDPARFKSSKRVGAHFGLTPKRYQSGETDYTGRISKIGDGSVRTVLYEAAHIMLTKPLKGCSKLKSWAMRIARRAGMSKAKVALARRLAVIMHRMLVDGTVFNAAVAA

SEQ ID NO: 515541 - protein, 375 aa, unidentified
MQNKVRFLGLDVHADTISVAIAEPNGEVRSLGTIANRAESIRKMVKKLGTVDQLRACYEAGPTGYVLYWQLAELGVNCEVIAPTLVPVKAGDRVKTDRRDAERLARSHRSGDLTAVWIPDAGSEALRDLVRAREAAKQDQLRARHRLSKFLLRSGLRPSQGMKAWTQPYMIWVKQIRFTQVAQESTRLDYLTEVEHMGERVLRLEKAITEAVKLASPELQEVVRDLQALRGIAQISAVTIAAELGNISRFEGARQLMGYSGAVPSEDSSGKRLKRGSITKTGNAHLRRIAVEAAWSYRLRPGVGPALRKRQEGVPEEIKEIAWKAQHRLHKRYMKLSAAGKDQRKIITAVGRELLGFIWAIGIKSEAAVKQQKAA

SEQ ID NO: 515542 - protein, 331 aa, unidentified
MKQIYGIDLSKEKFDVNFIDLKGITRQQEVKNKYDAICEFLLSLPQETALCIEHTGIYGELLVFLSNCMNVTIYAVSGYEIKHSLGLQKGKSDAIDALRIREYAERFPDKLTTARHTEEDMHELRELHCLRQSLVKTRKILLTQQKEKNRMHLESLTAHNIAAQTIAYISSQICATEQEIQKVIDANPAYARNSKLVCSINGVGPVTTNELIIKTHNFQKIDTARKAGSFAGICPFPNSSGKMVKKSRISSMGDRSLKTLLYLCATSSIQYNKEMKTYYNRKKAEGKPSYLVLNNVANKLLRTIYAIIESGEMYDQNYLCQDPRLIEKKVA

SEQ ID NO: 515543 - protein, 298 aa, unidentified
MSAPQVFVGIDVAKAQLDIALRPTGERWTVTNDEPAITALVTRLQEIAPQLIVLEATGGYQRAVVAALAATAFPLVVVNPRQVRDFAKATGQLAKTDALDARAVAHFAEAVRPMHRPLPDAQTEELRALLARRRQLMAMRTTEQNRLENATRRLRADIEAHIAWLNQCVVALDDDLDTTLQASPVWRERETLYRSVPGMGPVCARTLLLDLPELGTLNRQRIAALVSVAPFNRDSGTLRGTRTTWGGRAHVRATLYMSTLVAVQYNPILKRFYERLRPGRQSSESRADSLYAQALDNS

SEQ ID NO: 515544 - protein, 403 aa, unidentified
MSTFFAGLDWASQTHAVCIIDEQGTVREHFEVAHDATGLAELRRRLTAAGLPPVAIERPSGLIVDALVEAGFTVVPIHPNVVKATRPRYRSHGAKSDASDAYLLADLLRTDGHRFKPLAPQGDEIRALRALVRGRDDLVATRVQLANQLRSLLESFWPGAAAVFAEVDSPIALAFIEHYPTPESASRLGPKRIAAFSAQHAYSGRRSPEELLARLHQAASAACGELEMDAKGELARCLARTLARLVEQIRLLTSRIEHHVASLDDGQLVMSFPRAGRVCAAQILAELGSVRERFDSDAHLAAEAGVAPLTYQSGKSKVVTFRWACIHHLRAALTCLADNSRHANAWAANLYAQARDRGCDHPHAIRILARAWVRILWRAWIDRKPYDPALHRGAQRDFQTAIG

SEQ ID NO: 515545 - protein, 445 aa, unidentified
MQVIHERCAGLDVHKKAIVACRMWTKQNGHVVRETCSFGTTTAELLRLQDWLLAWECSHAALESTGGYWKPVYNIPEGQVEILLVNARHVKNVPGRKTAVGDAEWLADLLRHGLLCASFVPPCGQRELRDLTRQRSNLVRERAAVVNRLQKVLEDANIKLASVATDVLAVSERAMLEAIVGGETDPTVLAKLACGRLRDKHEELEQALTGRVRDHHRFLLETHLRRIDFLDEQIEQFNQRIVSHIEQLSPAPAQVTSPDPATVPATASEKPALSWNNAIELLDTIPGIDRQLAEVLIAGIGIDMGRSPSEHHLSSRAGVAPGDNESVGKRRSGKTMPGNPPLRKALVQAAHAARRKNDCYLGAQYHRLAARRGKKRATLAVVHSILVIAYQVLSRQEPYQGLGGNYFDERKRESVANRLVRRLEKPGCRVALEMQPNSTGSAAAT

SEQ ID NO: 515546 - protein, 384 aa, unidentified
MTPEGKAIATFGTMTKDLRALVAWIKEKGCTHVAMESTGVYWIPVYNLLETENLNVIIVNANHIKNVPGRKTDVSDAEWIADLLRHGLLKGSFIPPREQRELRELTRYRRSLVAEHTREVNRIQKVLEGCNLKLSSVVSRITGTTSSLILKALIHGEIDPEVLASFAKGRLVRKKHELMEALDGFIGPHQQKLLAVQIDHLAYLEKQITALDEEIAKRLHPFEDDLIRLDTIPGVGRRNAEDILAEIGPNMDLFPSAQHLSSWAGMVPGNHQSAGKRKSGRTTKGNRYLRVTLCESAQAVGRMKPNFLSNQYHRIAARRGRNRAAIAVGHSILVICYHLLKQKTNYAELGASFHDQRKEESIVRHVLKRLESLGYSVLLEKVGA

SEQ ID NO: 515547 - protein, 315 aa, unidentified
MTQSSADTVGVDISKDFLDANIHPSGEARRFANDAKGHRALIAWLRGRNVQRVVFEATGAYHRAFERTLAAAGLPMAKINPRQARRFAEAIGQLAKTDPIDAAMLARFGALLTPQTRAPVSEILDEMKELHNARQALVKDRTAALNRQAQMRIAILKRLASQRLRQIDNQLKAIDAALAALRDSDTALKARFDILLSIPGIGATTAFAMLIEMPELGTLENPQAASLAGLAPVARDSGKWRGTRSIRGGRANLRQAIYMPALVATRFNPDFKAKCQALIAAGKPPKIAIVAIMRKLVILAYALLKAGRNWHPKAA

SEQ ID NO: 515548 - protein, 335 aa, unidentified
MKKVFIGIDVSKKWIDVCVTRDGKMIVHQQFDNNKAGFRKMVSWLKHYGPQSQWLICMEHTGIYAQPLWYYLTEKSITYTVVPGSVITSGLEIRRGKNDKIDAADIARFTMRYADELKPHRLPAQVLRRLKMLFAYRDRLVKAKMIISVPAGEASVFAAEESKEVRADSSSLVQIIAARITKVEKLMLHVINSDQETARVYHLIESVPGFGLITASYLLIITQCFTTMCNSRKLANFGGVAPHPHKSGSSIKGKDRVSHLADKKLKALLSNGTGSLLQYNRGTKQYYERMVAKGKNENLVKNNIKNKMLHTVCAVVKRGTPYIDEYIPQWSNKVA

SEQ ID NO: 515549 - protein, 418 aa, unidentified
MTVNSVAQKRSVIKPDTLVIGIDLAKHTHVARARFYDGSYTKPVKVPNTRAGFLALSEQIGCWKSRPDSSVIVGVESTGSYGVNLVRWLSERGCQVVLVPSLHVCREKELPDNGRGTSDAKAALIIADLVARGQYLGFVTLSGACLELRSLVNLRARLVREQTGWLNALHQTMDVLFPEFETVFPDLKRPTVRLVLGRFGTVAAARAHSPVEMHRFLAQDGAARVSLARLRRLAAAADESIGPLEVNAGQERSLHEMLETLAMLERRIAGLEAEIVRLLAQLPEAKYLMSLKGVGAMTAAVILSETGGLGQYSCAAAVQKLAGLNLYQNSSGQYRSGRRISKRGRSQLRRALYMVAVQHAKRGWPLQPYYAALVARGKPKNVALTAVCCRLVRLLYALVRDGRCYSECPPNAGRPQAA

SEQ ID NO: 515550 - protein, 319 aa, unidentified
MTIICGVDVSATALDARIGPAGAAARFARSPEGIAALAEFCHSHAVTLVALEATGGYERLPFTLLWTHGVPCAIVNPRAVRRFAEAMGVIEKTDRLDAGLIAWFAEVRRISAQEPDREAQGRLEAWVTRLRQLTELRTAQMNQRRLVSDAEVLASIAEVVALVNRQIRALEGKISALIDSDPVWQRLDAAFRSIKGVADRTVARLMAEMPEIGTLSNKAVAKLAGLAPIARDSGKISGKRPVRGGRRGIREILFVVAEVVRRHDPDFAACHARMSQAGKPKKLIRVEPKKLIRVALARKLLVRLNAKAREVRAQCALAA

SEQ ID NO: 515551 - protein, 344 aa, unidentified
MGSAEVLGAVYSCWGTAKELIRLSIEQRAQFVSVRQCTASWCAGPRTSVGIEAGMAAHYIARELVALGHEVKQVPPAFAKPFRQGHKNDFRDAHAIAEAVQRPSTRCVPIKTHHQLDLQALHRVGSRLIGDRTAVINQLRGFLLEHGIAVRQGHRFLRQQLPQILATRGDMLSPRMIRIIGDLVEDWAHLDERIETVTDEIEGLADTDVNCGRLMTVPGIGPIIASAMVAAIGNGAAFTKGRDFAAWLGLVPRQMSTGDRTILGRITKRDNRYLRMLFIQGARAIQLHPASWAKHSFGPWLTAAAQRLHCNVLTVALANKLARIALTVLVQGRNYETRIRPVAA

SEQ ID NO: 515552 - protein, 355 aa, unidentified
MPMLTGQIEAVIGVDTHKQQHTAALVDALGGQRGLIRIVSDGGGYRQLLEWARRLEPGRRVWAVEGTGSFGAGLTSYLLEAGEWVCEVDRPDKPARKRGAKSDEIDALRAARQALQEEHLAQPRRRGQREAIRVLKLGRQQAVDVRSQAVVQLKSLVVSAPEGLRAQLRGLNAEQLVKTCARLRQNSQQSLEWTATVAAMRVLARRAESATKDVEELSQSLAELVEAAAPQLLAEKGVGTVVAAQLLCAWSHPGRLRSEAAFAMLAGVAPIPTSSGQKERYRLNRSGDREVNRALRTVVITRMACDARTQAYFERRRAQGKSDREIQRCLKRFVARRLFHVMDGHRSASSQTVRS

SEQ ID NO: 515553 - protein, 350 aa, unidentified
MSQNLNSAVAVIGIDIGKNSFHVVGLDDRGAIVLRQKWSRGQIEARLANMPACLIGMEACVGAHHLSRKLKALGHDARLMPAKYVRPYSKGQKNDFRDAEAIAEAVQRPTMKFVATKTADQLDLQALHRVRERLVSQRTGIINQIRAFLLERGIAVRQGQRFLRAELPRILAAPPEVLSARMVRVISDLAEDWRRLDQRIDCLSSEIAVLARQDAGCERLMSVPGIGPIISSAMVAAIGTGDAFAKGRDFAAWLGLVPKQISTGDRTILGKISKRGNRYLRVLFVQAAWVVLIKPMSWERHGLKHWIEAARKRLHRNVLAIALANKLARIAWGVLAGSGRTFEASKLQAA

SEQ ID NO: 515554 - protein, 368 aa, unidentified
MEKFITFVGLDVHKNTIEVALADAGRNAEVRHYGKIGGGLDDLDRLVKKLSSTNKELHFVYEAGPCGYDIFRSLTDKGFDCAVVSPAHIPKKPADRIKTDRRDAMMLARLHRAGELTYVFVPRADDEAMRDLTRAREDAKKAQRVAQQQLNGMLLRLGFRYPKDNWTKQHFLWLADQKMPMPAQQVVFQEYINAINETNARVERLTQQIETLVPTWRMAPVVKALQALRGVSLIVAVTTIAELGDLTRFDHPKKLMTYLGLVPSEHSSGEKTQRGKITKTGNGHARRVLVEAAQAYSHPARITRPLLKRQEGLSQDVRDIAWKCQVRLCTRFRRLMAKGKNRNAVITATARELAAFMWAIANHTPIAV

SEQ ID NO: 515555 - protein, 370 aa, unidentified
MLDTTTFVGLDVHARSIKAVALDAMTGEVRSATFGYDAAEVAGWVSSVDPSAKCVYESGVTGFDLQKKLTALGVDCVVGAVSKMIKPSADRRRKNDRNDAEFLARMLSVGNVVEVWVPDDECEAARDLTRALEDARDDLSRSKQRLSKFLLRHGLIFDERTPTGRRKGNWTRAHWSWIESIRFAEGADEEVLAYYVDAVRRAAEEKARLEGLVEAEARKPRWRRRVDSLRCLKGVDTATAADLVFEAGEFSRFRNARSFAAWVGLTPSEHSSGESDRRGAITKAGNKHLRKTLVEAAWHYLTCSGRPKDLAKGQAPDRVARRHAAKGVRRLVERREALLARGVHGNKANVATARELACWVWAVGLMAEEA

SEQ ID NO: 515556 - protein, 406 aa, unidentified
MFYLGIDVALNTHRLVILDDNGERVSSGISFQNNTADFKKVLSKLKELSINSDNSISGLEATGNNWENLYCFLTSNRFKTIVLNPHQTNKFREALRMKAKTDDIDAFVIAGLLRSNEFASSYVPEDKIQTLRELTKLRYEFIKDHKNYQRQVLALLNIIFPEYKQTALKNPFAISSTAIFKSFATAKHLSIAKPKHIEKIVRSIKGNNFNVKEIENLISIAKTSVYSGRCQESRALTLNILLTQVENFDKSIKQLEEQVNQILSPTSNDDINSFPGSNLLTIPGVGPKTLAAILSCVGESGQAFSTGVKLIGHIGFFPQIYESGETKRANKLCNKGPAYLRHALYMASVACLKHNIQLRNLYHTKISQGKKPKQALICVAKKLAHLCLSMLHSGQDYNPARVFSYV

SEQ ID NO: 515557 - protein, 319 aa, unidentified
MLRIFIGVDVSQDYLDVHVRPTDLRRRFANTADGISELLAFVRPLAAERILFESTGPYQKAAVGALLADGLPAVVVNARQVRDFAKAMNYLAKTDTIDAGVIAHFGEVATTTVRPLESQESRDLRELYDRRRQLVGMLAMEKNQRHSARVAEAATGVLKSIDKHIDYLERQIKDLEDRMDGIIESTAAFKARDEILQTITGIGPQVSRTLLAYLPELGRYSRQAITALVGLAPFNDDSGDHTGQRHIRGGRKKVRVGLYQAAIAAIRHCPRMKEFYAALKAKGKASRVAIIAVARKLLVLANALIRDMVPYRAPANSVC

SEQ ID NO: 515558 - protein, 337 aa, unidentified
MRYIGVDLHTNSLTVCYLDESGSEELRTFDLKELGQFQASLAAADQVAVEATGNTRYFVQAIKSLVSKVVVVNPSQFEVIRKSVKKTDRHDARTLAKFLSKDMLPESRLKEPAHAQLNSVAHTRDKLVKLRTTLINKIHAMHVAVGLKSKKSSLSSAKGLRVALGRVWDELTRAELEVIVTQIGALNEGIKRLDRQLSEYGRKLVGHQNLTSIKGIGDKSAAVLLSVIGDVSDFAGEDKLASYFGLVPRVANSNETVHHGRITKRGSKLGRTTLVQCTLIAVRYSPFLKNFYDRLKTKKGAGKAIIATARKFLGIIYRTLKYNWVFADFPNFVLAEN

SEQ ID NO: 515559 - protein, 390 aa, unidentified
MERPMQKSNDLSRSLTALEPDGTLIAVIEMSLSSWLVGGIVPGVERHPVKKLAVDESSLLKLLHRWREEAEKAGHRITRIAVAFEAGRDGFWLARWLKASGIEAHVIHAASVAVSREHRRAKTDRLDTELLKRAFLGWLRGERDHCKMVAIPTIKDEDAKRPNREHESLVGEQSRIVNRMKAALIRLGIRGFNPKLKKAAARLEELRTPENEPIPPNTLAELRRDMERRRLVRDQIRQIEEARVERLDHAPCDGPHAMVRLLARVIGVGLETADMLVHEVLSRNMRDRRGIARYAGLTGSPDESGRKRREKGLARSGNGRVRRGMVQLAWRFLMYQKDSALAQWYRARTEKARGTRKPMIVALARKLLIALWRLVRQGVVPDGVVLRPAQ

SEQ ID NO: 515560 - protein, 433 aa, unidentified
MLKINYMSTLFVGIDVSSKSNSVYAMDFEENRYISSSFGNNQPGADELADMIAACMQKHKNLDTLLIVLESTSVYSVHISNFLSASEALMPYKPYVFCVNPKATANYRKSFIGMEKTDPSDAYLIADFGRVGRTRKMEPWRGGQFIALKRLTRHRMHLSECITREKTYMVSNLYLKFSELQLLDGDDKPFGSLYGAAASAVLTEFLSPQEIIDMPEEELLSFLAEKSRNRISDISKTSELLKKAARDSYRLDKCMYEPLNISLASSFNCIHAYQKEIKLIEQAIDKCIKGMNPNALIILQSIPGIGPVWASGILSEIGDITAFHSSDALAKYAGLYWPKGDSGDFISEDNQISKAGNPYLRYYLGEAANSVRKHIPEYADYYARKYAEVTKHQHKRALALTSRKFVRLVFGLLAKNQLYTGEKLDAEYHIKSN

SEQ ID NO: 515561 - protein, 447 aa, unidentified
MSGPQVIDDQGHERVYGRVAAADVARASGMVCVRLPHPSRPGLRQSHVQEVPATAGAVSALAGRLAAQGIEKVTLESTSDYWRIWFYLLEAAGLDVQLVSASAARQLSGRPKTDLDAMWLARLTENGLLRPSFVPPADIRALRHYCRARTHLTQDRTRCWQRLEKLLEDALIKVSSVASKMTTRSVQDMIRAMIAGERDPVVLAGLARTRMRAKHAALAEALDGQFAGHHAEIAQILLDQIDFLGKRIARLTLLIEEAIDAIPAAWGADPDGVTGAGAGTMPDAPALPAIMRLEEIPGVSAELACSIIAETGLDMTRFPTPAHLVAWAGLCPRAIQSGPRSRQAKGQGNTYLRGYLGQAATGAARTATFLGERYHRIARRRGAARAQVAVARSILVVIWHLLSNRSARFRDLGPGHYETTTDKTRQARGHIRQLEALGYTVTISQAA

SEQ ID NO: 515562 - protein, 370 aa, unidentified
MEQGIRAYVGLDVHKDSIAIAVAEAGRSAGRMVGQIAHDVPKLLKALARLGEPGELYVVYEAGPTGYGLQRALFAKGYRCEVIAPSLIPRRAGDRVKTDRRDCLRLAELSRAGELRTVWIPDRGDEAIRDLSRAREDAVNSRTQARHQLKAFLLRHEIRYSGKTAWTKSFYRWLGELNFGDPSSQTAFTEYHLAVQAADQRLERLTKALAASVTGWRFEPVVQALQALRGIDVVSAIGLVAEIGDIARFDHPRKLMAYLGLVPSEHSSGDRVRKGSITKTGNAHARRLLTAAAWNYRFTARIGRAAQARQEKLTEAVKSIAWKAQLRLTARYARLNGRGVHHNKVCVAVARELAGFVWAIARASVAATPH

SEQ ID NO: 515563 - protein, 355 aa, unidentified
MKQEKYIGMDVHQATIAVAVLDDRGKLNMECIVETKACTILEFLQGLQGRLWVTFEEGTSAAWLHDVLKPHVSHLVVCDPRKNALLKDGSKSDRIDARKLAELLRGNQLSAVYHGEHGLRTLKELGRTYLTISQDLVRVMVRVKALYRSWAIPCSGKQIYAVRHRGSWLEKIGEAGVRRRAEFYYQQLDGLQSLRQEVRRDLLLESARHQATKRLRQIPSIGPIRAALLIGLLQTPHRFRTKRQLWAYSGFGIETHDSGEHCYVDGELRRAKKKASVRGLNRNYNPDLKNLFKGAATQAAVKPGPLQEFYAALLAKGIRPEMARLTLARKLATITLTMWKKGVDFDARQLKSQAA

SEQ ID NO: 515564 - protein, 338 aa, unidentified
MNYMGIDHHRQYSHITLLDERGEVLKSGRVVNLRLELEDFLYGIKEVRAVVEAGRSSYTMVDVLEDMGISTTVAHPKEVRTIAKAKVKTDERDSYKLAHLLRAGYIPEVYKRSRENRSCQRVLRQRAFYVGKQTSVKNRLRALLAQQGEETRQEVARVENLFTEKGMKVLAGLALPEREAKMVGALLKTYRHLEERISETNALVDELYGKMAYARLIQSVPGFGKFFAVLVAVEIEDIKRFDDVRKLHAYAGVIPSTHSSGERSYHGKIIKAGNRWLRWAAVEAVWPALRADFDLKCYYERMKRRKGANSAKVATARRLLTIIYRMLKENRAYIPHKR

SEQ ID NO: 515565 - protein, 362 aa, unidentified
MDNGSKGAAKMTAGLDLGDKYSYLCLLDDESGEVIEEGRLRTTPEAFERRFGSEQPLKIAIEIGTHSPWVSRLLTECGHELLIANPRKTRLIYGERRKTDKLDAEKLARLARADPKLLHPVKHRGEDSQTHLALVHSREALIRSRTQLINHVRGTVKSFGARLPKCSAESFHKRATDQLPCELAEALGDVVATIASLTARIRDYDRRIARLAEERYPQQTGLLRQVAGVGALTALTFVLTLEDPRRFAKSRAVGAYLGLVPGKDQSGEQDPGKRVSAEGDEMLRRLMVNSAHYVLGPFAPDSDLRRHGEKIMGRGGANAKKRAVVAVARKLAVLLHHLWVTGEVYEPLHKARCSGTLGEEVA

SEQ ID NO: 515566 - protein, 388 aa, unidentified
MIYVGIDITKTKHYASVVDSNGVILLEAFSFYNSKTGFEFFLEKLTPFDLSNSLFGLESTGHYGENLINFLSNKNFKLAIINPIQTDALRNSNIRRTKNDKIDTILIAKSLILGNYTPFIPKDLISLELRNLCRHRDDTLKSKSKLKTRLVAYVDQLFPELHTVFNSIHQKSCYALLSNYPNPKQLCKIRIDKLSNILRKASKGHFGLDKAIKLKELAKSSIGINNSSLSVQIKHSLKQIELLDEQIKELDYKIKELMDEINSPILSIPGISYTLGSIIISEIGNIEKFSSPCKLLAFAGLDPCVKQSGNFNATNIKMSKRGSKLLRYAIIKAASIIIWNSETFNRYYIKKVSQGKSHNNAVCHVSHKLVRIVFYILKKNINFKEQSI

SEQ ID NO: 515567 - protein, 340 aa, unidentified
MSIIIGIDPHKATHTAVAIGCDEVELATVTVRATRRQTDRLLGWASPFEERTWAIESAGGLGYLLAQQLVDAGENVVDVPATLASRVRVLGTGKSDKNDPNDARSVAIAALRSPGLRSVQPADHAVVLRLLAKRNQDIGDLRTKLVCRLHALIASLAAGGIAKELNASDADGLLGAFEPCSPVEATRHQLALELLEDIRHLDNQLKESHKRMKIAVRASGTSLTEVFGIGPVLACALIGYTGDFARFTSRDQFASYNGTAPIEVSSGGRAAHRLSRRGNRQLNHAIHMVAICQIRQTHSEGRAYFEKKVAEGKTKREAIRSLKRQISNTVFRHLVLDTKR

SEQ ID NO: 515568 - protein, 386 aa, unidentified
MIYVGVDIAKHTHYACVADERQKIITAPFSFSNDEAGYAKFRNAFRKYPKDNVIVGLEATSVYGENLIAFLADLGYKIALINPIETAVERKKKIRNAKTDKIDTKIICKYLATEEYRLLQPKELETLRLRGLCRFRQTLKKSNCRLKTQLVSYLDVSFPEFAGAFSTIHGKGAYAVLSEFPSAPAVAKANVVKLTKLLSDASRGKLSRARAEKLKALAKHSIAAKDCDMGFQVKNTIGQIRLIASQLQDVETHIGKIFDELDSVIRTVPGIGAINGSMILSEIGDVKRFSNPGQLIAFAGLDPIVRSSGQFRARTTRMSKRGSSVLRYALINAAWNVSLNNATFKAFYDEKMAQKGRHYATLGHVAGKLTRVIFKMLKDNVTFDLP

SEQ ID NO: 515569 - protein, 398 aa, unidentified
MTESSDYESVQVFIGVDVGKDTHHAVAINRSGKRLFDKALPNDENKLRSLISDLKQHGQILLVVDQPATIGALPVAVARSEGVLVGYLPGLAMRRIADLHAGEVKTDARDAAIIAEAARTLPHALRTLKLADEQIAELSMLCGFDDDLAAQTTQASNRIRGLLTQIHPALERVLGPRLEHPAVLDLLQRYPSPEKLASLGEKKLAAQLCKLAPRLGKRLAADIAQALAEQTVVVPGTNAAAVVLPRLALQLITLRKQRDEVALEVEQRVLAHPLYPVLTSMPGVGVRTAARLLTEVACRAFASAAHLAAYAGLAPVTRRSGSSIRGEHPSRRGNKALKRALFLSAFAALRDPLSRAYYTRKMSQGKRHNQALIALARRRCDVLFAMMRDGTFYTPQGS

SEQ ID NO: 515570 - protein, 366 aa, unidentified
MRKVMAGMDLHGNNVMVGIVDDQGARLQHRRLACELPEIIEFLAPYKAELESIAVESTFNWYWLVDGLRAAGFPVVLANPAKIDQYSGIKHADDKNDAYFLAELQRLKILPTGYVYDPELRPVRDLFRRRMSLMRQRTTLFLSAKSLHQRTTGRGLELRRLKAMEPEEAAALYTHPANQLIAQIQKEHIDSLDQSIRQIEKAVLKVALQQPYYQRLQTIPGVGIILGLTISMEVGNVDRFAGPGQFASYCRTVDAKRISNGKTKGDNNQKCGNKYLAWAFVEAAHGARRFDATCRRWYDRKAGKKCTTVATKALACKLTKAAWYVMAKGTEYQAGKIFPGLTEPKAEEISGEQASASKGVGPNPED

SEQ ID NO: 515571 - protein, 423 aa, unidentified
MEVMHERVAGLDVHKAMIVACVRIVSEGKIKRECRTFETSTAGLEALLAWLTASGCTHVAMEATGVYWKPVWNILSDGAFELIVANAAHIKNVPGRKTDVNDATWIADLVACGLIRASFVPDEAIQQLRSLLRARKQLSREQTSHIQRIQKTLEEANIKLDSVISDIMGVSGRRMIEAMIAGVRNPHKLAALADRRIKASPKVLYDALHGRLTDHHRFMLELYLGQHDALSQAIARIDEAVDAAIVRMDEEVEAGQATFRSLILLLCSVPGINILSATIILAEIGRDMSRFPTAGHLLAWSGMCPGQNQSAGKRKSSRLRKGAPWLKTILVQCAWAATRKKDGYYGAQFKRLRAKRGPKKAICAVAASMLTAIYHMLKHGTYHQDLGADHFDRRSSEAKARHHVAQLARLGFRVELQSAAQAA

SEQ ID NO: 515572 - protein, 408 aa, unidentified
MYNAVGIDASKLKSTITIVQPAGVVIRKPFDVLHTSDELNTLVTYLKSLEGETRAVIECTGRYHEPVVKSLSEAGIFISAVNPKLIKGQKQNTLRKVKSDPADARKIAKYALDNWAELREYSSMDTTREQLKTLNSQFTFFMKQKVAAKTNLISLLDNTYPGVNKLFDSPIRDDGSEKWVDYAYSFWHVDCVRKIGLKAFTERYEAFCKKHHYNYQKNKPALLFESSKQLVAVFPKEKSYKLLIQQSIQQLRLASEHIEIIRKEMNVLASTLPEYETVMSMYGVGETYGPQLIAEIGDVSRFTHREAITAFAGVDPGVNESGQFKQRSNRASKNGSTRLRKTLFQVMSTYLQNKPVNEPVYQFLDRKRAEGKPYLVYMTAGANKFLRIYYGKVKECLRNLEQSQIEES

SEQ ID NO: 515573 - protein, 408 aa, unidentified
MKQTYILAIDVAKHKVRAALSGADERLLFEKDLPVSAGGLRELLVRLREHVAEPEGLLVLIEATGMLHLNWSVALIRAGYAVVVINPLIARRLYTLGNSIRDNKSDPIDARQLCGIGRLHGEKLLSLYRFALKPEQLCLQRLQSVRKAVRKSLSNLKKSYGSLLDVSFPELGRLLEIDGVGIRQLLSQAPTPCAIARMRRSSLEKNWMLRPKAAQLKKLAAESMADPELAQASRPALLAMLQSIEAMETRLRELDRQIEALTSQSVDPQTKALVESIPGFGALNAAKLLAFLPGEILHAGSNRQAAARLQAYMGNDPRVRQSGQWQGQTKMSKRGVEMLRTALFQCAFSASQHDPELRSFYQRKRAQGKHHEVALSHLMRILTRRLVAVLRSGQPYQPNDNSELKNAA

SEQ ID NO: 515574 - protein, 349 aa, unidentified
MLADEVDYVIGVDTHRDEHVLAVVAAPTGVVIAQRSVPASARGYAQAVRFAEQQAKAARVWAVEGAGHYGAGLTRYLGARGEAVVEAGRTPRQELRLRGKNDGLDAIRAARAALANEALALPRSGQRREALRLLLVARRSAVDVRRQALVQLRSVIVTAPDELRAELRGLPVQRLIQRCSRLRRSSSRTPDELAATLVLRSLAKRVQAATTEAAELEAEILTHVRALAPQLLNEPGVGAIVAAQLLVAWSHPGRVRSEAAFARVAGVAPIPASSGQTTRHRLSRGGDRQLNRALHTVILHRRNHDQATKAYIARRLAEGKSRRDAVRLLKRYLARHLYRLLQNQEPRMA

SEQ ID NO: 515575 - protein, 399 aa, unidentified
MKSPCIAIDVSKASSYIQGFVKIGESISKAIKIKHDKEGYQTIGELTNEIKAKYGDVTCIFESTGIYHRSLQQFLELANQKYIILNPLEAAKIRKSSLRSTKTDKKDCESIAKAYFLNDYRYYKKQDIYYEQLQIMNRYYNFLIKQLRMTKINFRNQLDIIYPKFDELYDNPYLAVPMAILSKYPHPELIRKVRLTSIGKHLMKKTKHRERYTTLEAKKIKEYCINTQSGCFKESIEVRILENLIKSIEAKQNNLNEHIKLMKKSSMNNPFYHQLLTIPGIGENLAVRLIGELGDISRFDTKRQLVAYAGVDPIVYQSGKMTGEHLHITKKGNKNLRCLLYLAVSANIRMGKLNPIRNFYNKKKQQDNPLSHKAALIACVNKLLRIIYSMNESGELFHY

SEQ ID NO: 515576 - protein, 436 aa, unidentified
MEKMRTNAAGIDIGAKKVFVALENQNVKSFLTFTEDFERLRDYLLDNKVETVAMEATGVYWGILYEVLSEAGIDVWLVDGRETKQVPGRKTDVKDCQWIQQLHSLGLLNRCFVAEGDIKTLKYFVRLREDHIRSSSMHVNHIQKALTEMNIRLKEVISQIHGKSGIRIIESILAGERRKEVLLNMCDVKIKKNKGEEVLKSLNGKYTITGLFALQQAYDGYQFYQNQIIQCDKQIEKVMKQIGGNSKDKDLKEKRKRIRHHKPDVSDLGANLVSAFEGKDATVIPGITDYTWMQLLAETGTDLLRWPTEKHFTSWLGLAPGQYWSGKTKRNRNRKGHPFAGQIFRQIAQSIIISKKIALGSFGRKIRSRKGPGKAIKAVARKLAVLYWRVMVKGLDYTENGVKEYEEKLLIQKQKTVQRLALELDFQLIDNQGVII

SEQ ID NO: 515577 - protein, 340 aa, unidentified
MQLYTGFDLHSSNSYVGIIDENGKRAFNKKLPNDPVVIIDTLRPFKDDIVDIAVESTYNWYWLVDLLMAKGYRVHLANPSAIQKYTGLKYSDDRHDAFWLAEMMRLGILPEGYIYPKEERPIRDLLRKRSHLVKLRTSLIISLQNIVSRNNGIKLKVGDVKALKTDRVAPLLADNDDIALAGKVSKEAIDFMTRKIKAVEHMIEEKVKLHDPYDHLLSVPGIGKILALTIMLETGPISRFDKVGNFVSYCRKVSSKWVSNDKTKGKGNKKSGNKYLAWAFPEAAEIARRLHDESRAYYNRKMQKTNFMTAHNALAHKLARAAYYIMRDHVPFKPEKLFTS

SEQ ID NO: 515578 - protein, 428 aa, unidentified
MSYRIAGIDVHKKMLAVVVSDVEIESEYQFERRMFSSNPEQLRSLAAWLVEQKAEEIVMESTAQYWKPVWETLERYWKPLCEKREGARRRSGTLHLAQALSNRGRRGRKRDFVDAERLVKRLVARELTLSFVPDAEQRLWRTVTRKKYQLRRDVVRLHNQLESLLEEAHIKLSSLVSDLLGVSARRMLKALADGETNPAALAALAHERLRATPEQLCDALGACTELKPVYRRLLKMTLEHLQILEQQIGQLDQELATLLHPHQDAVQRLAEVPGFAVDSAQQIIAEVGPAATTFPSEKCLSSWVGACPGEEESAGVNYSHRSPKGNRHMRRLLNQTANAAVKAKGSIFEIIYRRCVPRLGHNQAIGVIAHRQCRLIWLILHQGTRYEERGPAVTKRSRYQRTWRMIRQLRNLGYRIELPNPQASQAQA

SEQ ID NO: 515579 - protein, 366 aa, unidentified
MKEGLPRSHAPRVLNETKGGPAMLYAGMDLSRKRLDYHLLDEGGACVDVGAVPPDRDGLRSLTGKLPGRPVHAAIESMNGARFVHDQLELHGWDVEIADAAKVRGLAPLACKTDRIDAWVLAELSRRELVPAIWLPDPEVRAERERARFRPHLVRHRSSLKQRVHATLLAHGIACPVSDLFGVRGRELLARWSLPQPWAADVEASLRLLDELAREIDACERELRRLGAEHRYVPLLMSVPGIAWVLAYTIAAEIGDIARFSSPAKLSGYSGLCPRVYQSGACDRRGPLSKQGPKYLRWALVEASTHARTHPHYRERYERTRTRLGKQRGPRVAQVDLARRLCEAIWHMLTRNRPFAPAGAAKPVAA

SEQ ID NO: 515580 - protein, 351 aa, unidentified
MIVIGIDPHKRTHTAAAVEQVTGELVDELTRPAREQGHGELVAWACSLADERLWALEDCRHVSGQLERFLLARGERVVRVPPKLMAGMRRSARSRGKSDAIDALAVARGALREPSLPAAQLEGRSREIRLLCDHRDDLVGERTRIQQRLRWHLHELCPELELPAGALDRQVWLQRVARRLARLEQTTQVRIGRELVRRISELSRRANELERELEALVRSEAPSLLELIGCGTLTAAKLVGETAGASRFASDARLAMHAGVAPLDASSGDQRRHRLNRSGNRQLNCALHRLAVNQGRWHPGAAAYLERKQAEGKSRREALRCLKRHLARVVYKLLVDVNQPTAAPPAAFALT

SEQ ID NO: 515581 - protein, 384 aa, unidentified
MEKSITLHVGLDVHKESVDIATADIGRDGEVRHVGSIGGDLASLDKALRKLTSKGHKLHVVYEAGPCGFVIWRHLNALGQSCDVVAPSSIPKRSGDRIKTDRRDAMLLARLDRSGDLTAVRVPGPADEAVRDLVRAREDGVRECRNARHRLKALLLRNGITYVGKSSWTGAHLRWLATLKLEHSAQQIGFQEYLHSITEATARIQRLEQAMREVLVDWTLKPLVQALMSMRGVQLIAAMTLVAELQDFLRFESPRKLMAFVGLVPGEHSSGPKRRQGSITKAGNSAARRMLVEIAWHYQHSPRVSPVIATRQDRLPKEITDIAWRAQLRLHAKFKRLVARRLMKNKAVVAVARELAGFVWAIGCEVQTSGWQGITVEPASTAAA

SEQ ID NO: 515582 - protein, 368 aa, unidentified
MKDVTTHVGIDAHKKDLFIAMLVGTGATPVTWTVPNEPNAVRRLVRKIEREAPGPVRVCYEAGPCGYALQRQLTTTRVACQVIAPGLIPRKPGDRVKTDRRDARKLAELFRAGLLTEVHPPTPDQEAVRDLCRARDDVREDLQRARHRMGKLLLRRGLHYGGRNWTRPHRAWIDGLAWTHAAERVVVDDYLLAIDHLEARLGELDARLAEIAATDPYREPVGYLRCFRGVDTLTAMLVLAELHDFRRFPSPRALMAYLGLVPGEDSSGEKHRRGRITRTGNTLVRRLLVEAAWHYQHRASIGVGLAHRRKGQPGRVIAIADKAQQRLCRRFRRLAEQHKPAPKIVVAIARELSGFFWAALQPVATAAT

SEQ ID NO: 515583 - protein, 331 aa, unidentified
MNYIGMDIHKQFTVAVVKDEQGNKLAEDKFENSEDNFGSFMQQFKPEETKIVIESTCVWEYIYEILEAMKYEVKLANPFKTKAIAFARIKTDSIDASTLADLLRANLVAESYIPPKYIRRLREITRERMTFVKQTTQIKNRIHSILIRRGIKIPSKTLCKSTLLWIKEKFQEDNVMLHYINLLKYHSTELESIDNTIRKLSEENKNAILLMTIPGIAELRALDIVAEVGEIGRFPTADKLCSYAGLVPSIHQSGNTLRFGQLIKQSSKNLKRVLVETCWTLVRTKESNPLQEFYKRLAKKKGKQKAICATARKLSCVIYAMLKNQEEFRYS

SEQ ID NO: 515584 - protein, 352 aa, unidentified
MSKQVTTSAAKLFIGLDIHKKTWKFHFATDLVIGTGHSFPPCVETIRNYVTKNYKDYKVSIAYEAGCCGYKPARAFRSYGWDTYVINPADIPRPAKNNFVKTDKIDAKNIALQLRSGHLKKLNIPEQEREALRCLTRQRTALVREFRRIKSRIKALLLYHQIHIPEDMDSPKWAKRFINWLKELSMDYNNNLLTLKSMLGQYEFVDKELKELSNQIRAYCREKHKKDYNLLRSVPGIAGLTASYILAELGDLRRFSSLKRFASYVGFIPGMHQSGGTQYTTGPTPRANRHVRNLIVEAAWVAIRTDPVMQNYYRSHAGKNSKAVIFKVGRKLLSKILGVIKSEIPYSIGVVS

SEQ ID NO: 515585 - protein, 377 aa, unidentified
MNHHKPTPTSDKQTEAKADVIKLGIDVHKREYVVVQQVDAQAPKAPQKFTPDAFLKYVGKLKSSTERMVTCYEAGCFGYVLHRRLEVMGIENLVVRPRNWDEYGNRVKTDARDAKELCSHLDRYLAGNTSALAVVRVPTETEERSRSLSRQRDTLAKEVKRLQAVGVGNARYYGVELSQSWWKPRPFKALKEELCEFLLELLQPLQSVLVGINEKLKEMTEREELKSKRVIPIGLGALSASILDEEFCDYTRFKNRKQVSSFTGLCPSEASSGGTRRQGSINKHGNPRIRRTLVEAVWRLLHFQPDYAVIQHWKQRMCNEPFGRAKKKKMIIAIARRFAVDWWRMNTGQITAEQLGLKTSYPASLLKRLPAEAFEIS

SEQ ID NO: 515586 - protein, 416 aa, unidentified
MKYAQIRVLPETPLGGLTAGVDWGSADHAVCIVDTVGQVRARFTVSHDRAGIGKLIAGLRAAGVSEAAIERSDGVLVEALLAAGLTVVVITSRQMKNLRSRYGSAGVKDDRFDAFVLADALRTDRARLRPLVVDTPATAALRAAVRARRDLVAHRIAACNQLRAHLAVAFPAAVGLFAQLDSRISLAFLACFGSQDAAGQLSEDELAAWLQTLPHRGKTARPEQLRARLQAAPAGATGADGAARAAITSALVATLATLSAQVQALEAEISGQLAAHPDAHIFTGLPRTGTLRAARLLAEIGDCRARFPDPESLAGLAGVAPVTRQSGKHTAVGFRWAVNRQLRDAVCDFAGDSRHASPWAAALYDAARARGKDHPHAVRILARAWTYVIWRCWHDGTAYDPAKHNALQRVLKQQNA

SEQ ID NO: 515587 - protein, 346 aa, unidentified
MNATTIAVDLAKTVFEVATADAQNHVLSRHRFTRTQFARFLREHPPAEIVMEACGTAHHWGRTARACGHHVTLLPPQYVRPFVRRQKTDRADAAGLLDAKRSPGIRSVPVKTVTQQALLALHRIRRQWMMTRTARINVLHGLLGEQGLAIPTGPRRILAHVAAVLEDADAPMPAPLRRALADITDEIRTLEAHVASIDHELEAAAADDAVIGHLRTVPGAGLLTTTALVATVGHIHSFRRARHFASWLGLTPREHSSGHRRRLGAITKQGDAYLRSLLTHGARAVLAAARRRAAANRPLTPLQTWAVSVADRRGANKATVALANKLARILWAVWVREVPFATRAAA

SEQ ID NO: 515588 - protein, 342 aa, unidentified
MDHYAGIDVSLECSSVCVVDAGGKIVREMKVASDPESLVECFGSLGFETVRIGLEAGPQSQWLYAGMKEARLAVELLETRHVRDAFKAMTVKSDRNDARNIAQLMRLGWFRPVHCKSLAAQQTRAMLTARTLVQSKLHDVESSVRGILRGFGLKVGRTTSTRFAGRIKELVAGHPHLAVIAEALLAVHTVLLREFKGFEKRVRTTARHDPRAQLLMTTTGVGAVVSLTYACAIDDPARFTSSKKVGAHFGMTPKKHQSGETDVTGRISKIGDKSVRTVLYQAAHIILTRPVKGSALKSWALRLAKRSGMAKAKVALARKLAVIMHRMLADGKPFNFTAGAAA

SEQ ID NO: 515589 - protein, 321 aa, unidentified
MNLSNIITGIDISKNKLDIHIHPLGHHKVFENNVQAIDQIIDFLRLHNVTKVGLEATGGYEKLCAYTLLSHGFEVYVIQPRWVRDYAKSLGIATKTDKIDCSIISRYVSNTDMRVTPLKVSSIDCLKQKLSRRNQLVEIAKIQKTQAHQVTDLSIIKQMEELLAVLQNQIQVLEDEVMELVDKNQELKKKYMSITSIPGVGAITAITFICYLPELGTLQHEEISSLSGVAPFNRDSGFSKGKRCIQGGRSQIRKVLHMCILSAQRYNSYIKIFFDRLYNQYKKPYKVASTATMRKLLILANSLVRDGRLFTEEYSPKTVSI

SEQ ID NO: 515590 - protein, 428 aa, unidentified
MTTDRVPCRKFILGGAIMDKIYDNCCGIDVHKKLIVACLRKGNRQEVREFGATTRELLELADWLKTSDCKMVAMESTASYWKPLYNILESSDLNAMVVNARHMKAVPGRKTDVKDAEWIADLLQHGLLQPSYIPDKDQRELRELVRYRKSLVGERTRELNRLQKMLEGANIKLSGTVSDINGKSARSILEYLLTGECIDGAKYDEMYEQKIIAHNLKATKEQIIDDLNGVMTPLQRRMMKELLSHLDELNTHIKNLDDEIDNFMKPEEKQASQAIQDVTGIGNTSAQAIISVIGTDMERFSTDRHISSWAGLCPGDNESAQKRKSGKTRKGNSLLRTTLITCAHAAVKNKKSCFYAQFMRISAHRGKKRAYVAVAHSMLIAIYHILKDGVIFKDLGADYYNQFNKERKINAYLKKLKALGWEAPVVAA

SEQ ID NO: 515591 - protein, 431 aa, unidentified
MNRSVEFLSVGIDVGADFSLMAFALPSQELLGKPYKIIHSSQRSLNGAVEKIKTLSQKYQLPARVFMESTGIYHYPLYHKMKDAGFDVFVLNPLVTHAGRDLNVRNIHNDKYDSQKIALLGLRPGLKTSLIPSDQVISMKVILREYYAVKKEISMYICRLKNQLRQAFPQFLPLFSKVNGVTAMAILCEYPNPESLLNAGEHAVADFMKSVSHNGPLKVQKKAAALIQAAQDARSFGHWNHGISILIRHYIEMIRLLDVRAKTLLAQAKALLAEQDSKTLAHQTELLQTIPGIGFLSALTLICELGDFSAFKRPKQLFSYFGLDPIVRQSGNYNGTNLKLSKRGSPFARRCIFVIALQSISLNIHKEPKNPVLRTFYEEKCMCKAKMTAIGAVMHKICNLIFAVLRNDTPFVLQTPEQHNAAYLSKTHSVA

SEQ ID NO: 515592 - protein, 408 aa, unidentified
MVNVGVDLHKTQFTVCARKDGENRFAVFRTTNSGYEGFLKAVSEWQACGEIVRVGVESTGNTRYFKNRMEQAGVGVVVINTSKMKVINESVKKTDKHDAATIAEFLEKDMLPESILCSHESEQIRRLLKARTSLVKTTVVLKNQIHALLTAEGFEDVKGSLQSKKGRQRVLNALNQCKNGLVAQPLFDSIEQLEGSIKSIEKECRILMKGDRMVELLLTIPGCGEICAWIIRAYTDDINRFSSAKKYVSFAGLAPWVQNSNDTIHHGRITKRGPKELRTALVQVVMGLRRMKAKTLTWRLMQRYEMMKSAKGSGKSIIATARKIATIIWRILTVEEEFSVEKMVDKKLEKKAESMRQESESSNKTDSLAEEEESLFEIQNAKKIEIIQIEKKEKKKTGVAGKKIKKSA

SEQ ID NO: 515593 - protein, 383 aa, unidentified
MTRFMGLDLHKNYIHGYVFQPGQKGTHFRFLNTPDEWARFLATRLTPETAVAIEATGNAFTIYDRLVRHARQVVVIHPAGLKGLGAGRHADRIDAERLAQLLALGTYTRVQVWVPPTEVRAIRALITQVRACQQQETAWRNRARNLLIQAGYAVPRSVALRDWLAAHAAELDETLQIIFTSALTMAEQAQQEGERLRGEILRRLQDRPEMAWLWSVPGLGAWTAAVVWAWIGDPLRFRSARQVGRYGGLDPRVHQSGDADWRGHISHQGPAILRQVLVEAAWWAIRAKDTPLRVFYDRVLPRLGKRRAIVAVARKLLVAAWRVWREQRLAHEVDRRRYQKKLSAIRVVLRTLPPYPLTERLQTLTVSQRHPAAGARGEPAIPA

SEQ ID NO: 515594 - protein, 430 aa, unidentified
MKSNTQNAKIEAITEKTLVLGIDVGSEMHYARAFDYRGIEYSKKPFKFSNTEAGFVTFKEWILDLKERHEKDKVIPGMEPTGHYWFNLGKFLQDNEMKPVLVNPHHVKKSKELDDNNPTKNDRKDPKVIAGLVREGRYMIPYLPDGVYADLRTASNIRFQLQAELTRIQNRISRWFNIYFPEYKTVYGKPDAKSGMLILKAAPLPEDILTLGIDGVNQIWRDEKLRAVGKARAKTLIEAAEHSVGSKEGAVSARMEIRMLLEDYESRNTRLQEVMVLIEELIRKIPMAEKLLEIKGVGIRTVSGFLAEVGDISRFNNPKELQKLAGLALVENSLGKHKGETTISRRGRKRLIYLLFEVAMSLVSKNQEFRELHNYYTTRRLNPLKKMQSLMAIAAKLIRVFYAILTKGVDYDPKKMVSDIKRPAVYLQAA

SEQ ID NO: 515595 - protein, 419 aa, unidentified
MKDSITYVGLDTHKAQHTVAILYPGQDEPKEMVVKNTVGDIRRLVRRIARWAPGPVRYCYEAGVCGFTVYRQIFAAGGWCMVVAPSLVPVRPGDRVKTDRRDARKLARLLGAGMLTEVRPPNEAEESVRELCRCREAALKDLNRTRHRLSKFLLRRGSAYHEGTQWTQRHMAWVRGVSLEQAWDREVLASYLSELSQREERLAELKGAVKAVARTEPYRQAVGWLECFCGIKTITAMTILSELHGFERFGDARSLMCFLGLVPSEKSSGQQERKGGITKAGNGRVRRALIEAAWHQRRSAVASKTLRLRRRGQPAWVIAIADRAQRRLYRRFWRLVERGKSSPKAVTAVARELAGFLWSVLRYARSGGPPEGAAESSPGVPAAEEAPLPVVNEAMRQAVDEGVPYERRITVREFLGQKA

SEQ ID NO: 515596 - protein, 345 aa, unidentified
MSMYFVGIDISKYKHDCCIISAVDQQIVSKFTITNDKDGFEQLLISLNSLSNPEDIKIGFESTAHYALNLELFLENANHSFMEVNPVLIKEYKKSTTLRRTKTDSVDCESIARWLMTVEYKPHSKGFYHAYSLKSLTRLRDRLIRQRSFYLVKITNVLDHTFPEFKPFFNERLSKTAIYLLENYGSAEKMAHMNSASYDKLRCISRGKFSIQQFLHLKELAANTVGVNNSIFDIELNSLLTLYNSLCKEIKNLEAEITRLIEEVHPHYMSIPGIGPISAAVIYAEYGDISNFSNPSQMLAFAGIEPGINDSGTESHGGRMVKHGSSQLRYVLLNACLPLIRFALS

SEQ ID NO: 515597 - protein, 319 aa, unidentified
MNVTYPIVGIDISSTRLDGAVLGVDGKFASVACDNTKAAAKKLAKILAKKNVALVVVEATGGYEIYIMAALAAEGVAFARVNPRQVRDFAKGIGKLAKTDPIDARVLALFGERARPRITTLPSAEEARLKALSLRRRQLVDARAAEKNHRGKIVERDIKASVERVIEALDDEIEQIEDAIAEHIAASEPMRKRQELLESIPCIAAATSATVIAELHELGQRSTSVLKALVGVAPFNSDSGGVKGERHIQGGRAPLRQALYMAAQTGYRCNPILKPFYQRLRAKGKSHKQAIVACIGKLVAIMNAIIKTGQPFNAKFAAA

SEQ ID NO: 515598 - protein, 387 aa, unidentified
MARKRILSTLDTSITYDALGLDIAKEDVALAAFGDDHDEPYFGDKLTFDGLYALLADMAPTLVAMEPCSGAHQIAEHIEALGHQVMMISGKHVQAWVKDHCNGQKTDLNDAFAILNLAYDRWLTPIRGKTREECRLLALQASYRQLQGQRTKTLVHVKATLHAWGYPIRTGSFNQKALHELIEANRDLFGDEVAETLHLMINRVRDLDHDIAKVLKLLTEATKRDPRASLLRSIPGFGVLTTSRWCAVMGDIARFESPKQAMAFIGLVPNNRITGHHTETSSGREARGQGKMSKRGDKMLRSLCILGAASLCLMVRNNRLPDCPFVAGIKERLASPRPWFKVLVYVAAKLVRIATALLKYGETFSFKKAGISKAVLKQWELEQAKAA

SEQ ID NO: 515599 - protein, 404 aa, unidentified
MNNVAGVDVSKGKSMVSVLRPFGEVVAKPFSVGHTGSELKELADYLKSLDGETRVVMEHTGRYYEPVARFLHEEGIFVCAVNPKLIKDYGNNTLRKVKTDKADARKIARYGLDNWVELRQHTPMDTIRIQLKTLNRQQGLYSKTKTMMKNNLIALLDQTYPGVNDLFDSPVREDGSQKWVDFTATFWHVDCVRNMSLAAFTERYRKWCKRHGYNFRQGRAVEIHAGAQDLIAMLPKDALTKTMIWQAIDALNAVSMSLEQLKTEMHTLAAQLPEYPIVMAMRGVGDSLGPQLMAEIGDVTRFTHRNAITAFAGVDPGADQSGTHEAKSTRASKSGPPDLRKALFLVMDCLLKTMPQDDPVYRFMDKKRAEGKPYLVYMTAGANKFLRIYYGRIKEYLASTENSD

SEQ ID NO: 515600 - protein, 350 aa, unidentified
MQFLGIDWGTRKAAWCALDAQATLNEGAISADAGGLARLVHQLGPEVHGCIEMMSGAAWVRDQLAMAGWTIELADARKVKAIAPLACKTDRVDARVLAELVRRDLVPTVWVPSLDDRAIRERLRRRSHLVRLRTSAINRTFGLLTQWGLRMNLTALRKPEALEQLSESGVPVVWRQSIATLLGVIDDLDRRLAPLERELRPHARADERAQLLMTIPGVAELLGLTLAAEIGDISRLATARKLVGYSGLTPTIKQSGQSSRTGRLSNAGPNTLRWAAVEAAQQAWRANNPWHALYARTKQRHGKSNPAKAAVARKVLIAAWHVLALQQPFKPSATGAANPVPASSSIRLAA

SEQ ID NO: 515601 - protein, 354 aa, unidentified
MGPVVGLDVSKGASVLQAFTERNKPYGRCKRIAHTPEGFEQLGELLKELEKSTGFEPAVVLEATGHYHRSLVAYLEREGYQHFIVNPLQSKRAKGTHLRKVKTDAMDAWHLAEMYYRGDLKPHRTWSEALTELQHLTRQHEFICSMLVQAKQNARALLDQVCPAYETVFDNLFCTTSLQVLRQMLSSTPVTAETIQAAAGSSHGQAWVQEKLERIQALPPLSQSSKAQQMALLSVLNMVLTGQEQLRQLEKVMEEMAMMLPEVELLKTIPGVGDKLAAVLAAEIGDATQFETPKQLVAYAGLDPGVYSSGKFTASSNRISKRGSKRLRRALYLAAQCGLRNGANKRLKAYFEKK

SEQ ID NO: 515602 - protein, 387 aa, unidentified
MYYIGIDISKFKHDCAVIDDLGEVITPSWSFTNDAEGFSQLKILLDSLDAETRIGLESTGHYGMNLKLFLESNNFSFMEFNPLLINRFVKSKSLRKTKSDSIDCMMIARYLMTVEYKPYPTLLYHTEKLKSLTRFRDSLIRLRSRQLVELTNILDKVFPEFKPFFGGKFSVTALYILSNYSSPEKISNMNSKSYETLRKLSRGRFSTVDFAKLKQLAKNTVGNTEDYLLQQMQIVLEIYSQLDSKIDETEASIRECVSDMNPPMLSVPGIGVESAATILAEFGDFSKFKNSSQMLSFAGLEPGYFQSGTSEATGRMVKHGSSYLRYALMNCAQTVVNYEPTFAMFYAKKRAEGKPHRVALSHVVKKLLRVIYTLQTKNLAYDSNFVR

SEQ ID NO: 515603 - protein, 355 aa, unidentified
MNNEKYIGLDVHQATISVAVLDSTGKLVMESILETKAATILDFFAGLRGTLSVTFEEGTWAAWLYDLLKQHVAKLVVCNPRKNALLKDGNKSDRIDAHKLAELLYLNKLSSVYHGETGVRMLRELARSYLTIVKDLTRVMCRLKAVYRSWAIPCAGRDVYYTRHRAEWLDKIKEAGVRRRAERLYQQLDMLQYLRQQARRELLAESRKHAITVKLRQIPSLGPIRSALAVALIQTPHRFRTKRQLWAYSGLALETRTSGEYCYVKGGLRRSKKQISIRGLNKDHNHDLKGLFKGAATRASVLPGPFQDFYQRSLAKGIKPTMARLTLARKIAAITLTLWKKGENFDADKLKSQAA

SEQ ID NO: 515604 - protein, 413 aa, unidentified
MLKIVYPICCGMDVHKNFIVACIATTNNVGITTYKRRRFSTYTGDLHLCAKWLLENNCKDICMESTGKYWIPVYNILEITCQITLAHPKYVKAIRGKKTDTKDAQWIADLFKHGLVSGSFIPPADIRQLRDLVRYRWKLTNFTTGEKNRAQNCLTVSNMKLDDVFTDVFGKTASAITDRLLESSEPFDVTPYLSRRIKTPKEKIQAAVDGSMCPEQAEKLRIIRSHMENLQLCKANLESLILETAQKYLPQLELVMTVPGIQAYSAIGIIAEIGVDMSVFPTSKHLCSWAGLTPQNNESAGKKKTTRISRAGAYIKPLLVQCALTVCKSSKHPEIKNRYLALKKRRGHKKAIIAIARMMLTAIYNILKKNEPYDPELYLRCNNTPPEHRAVSVEEAIFILQRQGYLVTPCSPG

SEQ ID NO: 515605 - protein, 402 aa, unidentified
MYNAVGIDVSKGKSTVAVLQPAGVIIRKPFNVNHTSSELDELAKYIGSLEGETRVVLECTGRYHEPVVKTLSEAGLFVSAVNQYLIKNFGNNSIRKVKSDPADAKKIARYTLDNWIELRQYSSMDNTRTQLKTLNSQFSFFMKQKVAAKANLIALLDNTYPGVNKLFDSPVRDDGSEKWVDYAYSFWHVDCVRKIGLKTFTERYQAFCKKHHYNFQPAKPAELFLASKDLIAVFPKEASYKLLIQQSIQQLNLASSHVEELRSKMNELASTLPEYATVMGMYGVGKTFGPQLIAEIGDISNFSHREALTAFAGVDPGVDQSGTHNSKSNKASKCGSNRLRKTLFQIMSTLLQTSPENDKVYQFLAKKRAEGKPYYVYMTAGANKFLRIYYGKVKECIRNLEQ

SEQ ID NO: 515606 - protein, 416 aa, unidentified
MSAENKVASIDVHKKVLMVVVGSREGDAIGPKGELERRRFGTTTIDLHGLSLWLQERGVKEAVMESTAEYWKPVWAELEPYMRLHLAQAFSNRAPKGRKHDFRDAERLLRRHVAGELILSFVPEPEQRAWRTLTRMKTRLARQRVRLHSQVECLLEEMRIKLSCVLSDLFGASGLRILRALAEGETDPKKLAALGDDRLKCTKEQLLDALTGNVQAMHLELLTLYLQQLRLVDEQMEKLHRLIAQALKPHQEAVARLAEVPGFGPDSAQQVIAEVGVQASTFPSAGHLASWVGTCPGQEESAEENYSSRSAKGNKYMRRVLTEAAQAAVKAKGSHFQVVFRRLLPRLGYKQALWAIAHRLCRMVWKILHEAVHYVEQGAYRDPRARKQRARALAQALRRLGYDVQITPKEPATVQA

SEQ ID NO: 515607 - protein, 415 aa, unidentified
MDIQMKHACGLDVHQATVVACLLSVLNSGKVKKQIRTFGTTTRELQALREWLQAEGCQHVAMESTGVYWKPVYALLEGPFELIVANAQQIKNVPGRKTDVKDAEWIADLLLHGLLKPSFVPPKPIRELRDLTRYRRKLVDSQSAECNRLLKVLETANIKLASVASDVFGVSGMAMLEALAEGTATPAEMAELARGRLRGKIPQLEPALEGRMEEHHRYLLKLQLRRLRDLDKDLAELDGRIQEKLQPYQKQLELLREIPGVDWTLAAVIIAELGVDMKVFASASRVACWGGLCPGNHESAGKRRNVRVTKGNVHLKTALVEAAHASTRAKGTYLRDKYFRLKARRGAKRAVVAIAHKILVSIYHMLSGDVSYHDLGDLYLDKLNKHHLTRNLVRRLERLGYCVTLKQQVVKQPAA

SEQ ID NO: 515608 - protein, 386 aa, unidentified
MAASVTSRIEQATLAQPTLSLAFELGQDTWKLGFTIGVAQPPRERTIPAGDIARVQQEIAQAKQRFGLSADARVVSCYEAGRDGFWLHRCLVAHGVQNSVIDSASIEVNRRQRRAKTDRLDVRKLLTMLLRHNAGEKKVWSVVRVPSVEEEDRRQLHRELTTAKQDRTRIINRIKGLLAGHGVQLVLQGDVETQLDQVHQWDGAPLPSALRIRLKRAWQQVGFLTTQIQTLEAERRALLRRRDDPVIAQVRQLFTLRGIGVNSAWLYVMAFFAWRDFQTPKHVGALAGLTPTPYQSGHARRELGIAKAGNRHIRAMAIEIAWAWRRFQPASALAQWYERRFGAGSARLRKLGIVALARKLLIALWRFVKTSVLPEGAVLKTEAPSR

SEQ ID NO: 515609 - protein, 465 aa, unidentified
MRTDNKLWRNRKAKKELARRLQSENPGLEVVHPQAAGIDVGNSAHYAAVRPDRDSQPVRRFECFPADLYRLADWLQNCGVQTVALQSTGVYWIPLYDILEERGFEVYLVNARHTKNLPGRKSDVQESQWLLKLHTYGLLNNSFQPPAKIRMLRTYWRQRLQHVTGAATCVQRMQKALTQMNIQLANVISDLSGVTGQLIVRAIVGGERDPWKLAELSHPRIQASRAEIAKSLEGHWRQELIFVLQQEMEMYDTYQRRVAECDQELHKHLRAFADTVSPPGKEELPPKKKKKQNKNNPHFHLADELQRITGVDLTRIDGVDVIVAQTLVSEVGLDMSRWKTEAHFASWLGLCPDNRISGDKVLARGTRHVLNRAATALRLGASTLLKSQTYLGAQYRRLRSKLGAPKAITAMAHRLARLVYRMLKYGQHYIDKGAEYYEQRNRQQQIEFVRKKAALLGLQVTPAHV

SEQ ID NO: 515610 - protein, 349 aa, unidentified
MKRTTIGLDIAKHIFQSHAVDAESGEVTRTKLKRADVLSHFAQLQPSLIVMEACGSAQHWAREFVKLGHKVKLIGAQFVRPFVKTNKNDAADAQAIWTAAQQPEMRFVAVKTEEQQAVLALHAVRERLKKNRTAAVNQIHGLLGEFGVALPKGWRGMLPKAAAALDDATSSVPALLRPQLRKQLEEVRQVTVQIEGVERQIASWLRRQGDCERIAAIPGVGLLTATAAVATVGETATTFRSGRQFAAYLGLVPRQTGTGGRVQLHGISKRGDSYLRMLLIQGAKSVLVSSKASKGPNTWLGRLTQRRPHNVACVALANKMARQIWALLAHQAKYEPNHGLTAAAPAAAA

SEQ ID NO: 515611 - protein, 368 aa, unidentified
MEHIAIDLGGTESQVCVREADGRILEERRIATRPKTLRRYLEGRPRSRVIVETGAEAFWVAQIAIECGHETRVVPSTLAPSLGVGQRGLKNDQRDARLLSESSCRMDLPSVHIPAVETRRLQSRLTMRDALVRSRTKLVNVIKAYLRTIGERAPMRYGAKWITNFHEKLAHVAPDVKPMFEALEALDASIEKFDLELEKLSEGNELVRRWQTVPGVGVVTSLRYLATLDQASRFANGASVGSYLGLVPSEHSSGETRRTGPITKAGSAPMRGLLVQAAWAGMRSRRHQNDPMMRWAREVARRRGKKIAVVALARKLSGILLAMWRDGTSYDPRRAAWEANELPAPPPRRLAPSKGPRRPLHLQQPVSL

SEQ ID NO: 515612 - protein, 356 aa, unidentified
MCPIVSEEYELVIGVDTHAATHTFAVVAGSTGAVLDHAVFPTNPAGLERAKGWITRRCGDARTLVVIEGTGSFGAIVTERLMAAGRTVVEAARMPAGDRRGKGKSDELDAVRIARAVLGLSLDDLRIPRSLTGDRSRVAMRVLVVAREAMTGERTRAVNALTALVRTIDLGVDARTSLSAAQVTAIAAWRTRTEDTSTRTCRQEAVRLAQRIRTLDGDLASNRASITKLIEQDTPQLLELTGVGAIVAATVLVAWSHPGRVRSEAALASLAGTCPIPASSGNTVRHRLNRGGDRRLNRALTTIVIVRMRIDPTTRAYVARRRAEGRTTKEIMRSLKRYITRQLFRTLATAHPIPVT

SEQ ID NO: 515613 - protein, 309 aa, unidentified
MLTAEADKRKTKAVVNTAAGVQALLAWCAKHGAQPAQLHAILEPTGLYHEQAATALPQVRVSLVNPAQARDFAKALALRFKNDALDSYVLARYGQTLSPALWHPAPLHARQLRALLTRREALSKDLLRELNRKEKSQFSPSAPLVDGSIDKAIAFLREQIKQIERAIDQHIDNHPDLKQDCELLNSIPAIGPQAGNAILAVMHNRHIDSAQSLAAYLGVVPVQRQSGSSLNSCARLSKAGPSQVRATLYMAALVGTRHNPHIRALYQRLLKAGKSKKAALGAAMRKQVHLCFGVLKNRIPYQPNYAMNG

SEQ ID NO: 515614 - protein, 376 aa, unidentified
MKNVRFIGLDVHAETIAVAVAEADGEVRSVGVIPNRAESIRKLVKKLGPAEQLRVCYEAGPTGYVVYWQLAALGVPCEVVAPTLVPVRPGDRVKTDRRDALKLARSYRAGDLTPVWVPDAAHEALRDLVRAREAAKKDQLRARHRLGKFLLRQGRRPPTAMKAWTQGHLTWVKSAVHFAHAAQEATLLDYVHEVDHVAGRLERLERAIDAAVQTAPGHIRAVIEALQALRGIALVSAVTIVAEVGRLSRFVKPRQLMGYSGAVASEDSTGERTRRGGITKTGNAHIRRIVIEAAWAYRHRPAVGATLRKRQASLDDEVKAIAWKAQHRLHGRYRTLTAKGKNPQRAVTAIGRELLGFIWAIGITVEARGHHAPAMA

SEQ ID NO: 515615 - protein, 353 aa, unidentified
MKSRMEFKMQSPVVIGVDIGKEVFHLVGLNTDGTIAFRRKIRRSSLKDVFEQLPPCVVGMEACLSAHFVSRTLRTLGHAPRIIPAIYTKPFVKGQKNDYNDAEAVAEAALRPNLRVVQEKSQNQLDLQACHRVRSRLVSRRTATINQIRAFLIEQGIAVRAGARALRNSLFAILENRKDEISPRMVKLIHGLYEDWCCLDHRIETVTGEIEELSRIEPKCQRLMSVPGVGPLISTALVAAIGTGEAFDRGRDFAAWLGLVPRQYSTGGRSILGRISKRGSRYLRTLLIQAARVLLMRPHNWNRFSFGPWLRAASERLHRHKLAVALANKLARIAWSVLRHDKAFDTHLEIAAI

SEQ ID NO: 515616 - protein, 422 aa, unidentified
MEGRRVRIVGVDCAGETHSVVLLSEDGQLERRWEMSNRRDRIEECLADVVLCAGEGAEVVLVTESVRSYGRLVADVARRLGLELRQVGTVALNHFRSVEGQPRKSDDWDAFLAARMMYLSVRGVRPVPKVNDSERALSRLTRAHRRIKKDRTRKVMQLEALLLELAPEVLHSSWEGPKPNNKGMLYLLERWPGFEGLARAHLSSIEKILHRCRYGARATSVARLVREMARRISMPAEEWTALTFEMNVLVDGIRTCDAALKKLGKEIAGRVETDVVGVKLLAVPGIGPIRGGVLVSELLPVARMATEAQSATYSGVTPLGRKSGKTLNQSYLTEGVNKRVLEALYESSVASVRHSAINQAYLKKKLKDYSGHPKPTVAAFIALSRQRHKLIYKLMTTAAIYDNEILVARHLDRLDAERVAAA

SEQ ID NO: 515617 - protein, 411 aa, unidentified
MNNTLFVGIDISKRSNVATFMNCEGKVVGRLTFSNNGSGADRLVAKILSYYEKEDFEAIRIGLKNTSVYSKNLVWFFYEHEALNEHKLSIIPLNAIMVANYKKSFLDMDKDDITDSFAIADFIRIRPGLLPFKLDDRQEALKIMTRSRYNYVQALSRMKSQFLTRLFLSFSEMEAGKPFYSIFSKTSLSLLEEEFTLDELAEKPIPELVEFLQEKGGGKFQNPEEIAKVLKKAASSSYRVPAMVRESLNRTMASDMEIMRILENEIHNCDKNIEKLMKSVPAILVSIPGIGPVLAAGIMSEIGDISRFQKQESLGKMAGFKWKRNQSGKKESEDKAAVLSGNKKLRYYLVEAANRVRIHDPVFEAYYRKKYAESKTHAHKRALILTARKLVRVIFYLLKENKLYKPDVGIS

SEQ ID NO: 515618 - protein, 351 aa, unidentified
MYTLGIDLHKKSSVWILIDEQRTELWKENVLCHPEYISIAMKKIPVSPKEIQVAIEPVAGYRWVSQQLKEAGMDVHIAHPRKMQLIAKNTKKTDEEDSRTLANLLQSGYFPESHMAGDDIYQLRLLLRERTFIVRQRTSVKNQLHGIATTQGLHLIPSGNPFFKRGKEGIMASDSFVMKELHRLEEELGERIKPFDERLQKEALKYEEVKILQSMPGVGIITALTIISEVDDFKRFKTGQKLTSFAGLVPRQRSSGETIRYGSITHAGSKPLRTAVVETAMRIRESNAPELFAFVKKLTPICGAKKARVALARKLLVIMWKMVTTNTPYNPNILSSSCSTNMSDLDTGTDV

SEQ ID NO: 515619 - protein, 417 aa, unidentified
MKNKTNQYTAFIGLDWADQKHDMSIVSAAGGSPVHQVILHTPEALNQWLVKLRQQYPAGQIAICLEQSKGALIFHLLGYDFLTIFPINPKNFARFREAFTSSGAKSDFTDADLLREFVTVHHDRLRPWQPDDEQTRTISFLAEGRRKTVEERTRLTNRLRSTLKQYFPQAIELVGENLHSSMALNFLHKWPQLGNLQGAKSKTVEKFYFAHNSRSSKLIKERLQLINSTIPLTTDKAVITSCLITTKMLIGQIAQLNRAIDEFELKLKSLYEKHPDKDIFDSFPGAGTALGPRLVAAWGTDRDRYDSADSMQKYSGTGPVTKASGKSKIVVRRLACPKFLLQTFHEFANCSRHSSIWAQAYYEMLREHGKSHHMAVRSLAFKWIRIMYRCWQDRAQYDEIKYLKALKKSNSPLLEFV

SEQ ID NO: 515620 - protein, 479 aa, unidentified
MNSKGKRVKKQVVTDNSTVNVLSPEEQARRIAAIQESMKASTWRELETNGKFTKNDKLTFISDDMLILGCDIGSETHYVRAIDSRGRELSGDAFPFSNSEEGFQSAKAWALELAATNGKRQIVLGLEPTGHYWFCLAAWMVSRGVSVVQVNPYAVKQTKELEDNSQRKDDRKDPKLIANLVKDGNYGMPYLPEGVYAELRRLSMLRDQLTEDRVRNTNRLHREMKIYFPEYREAFGKLDGAFALEALKVAPFPEDILKLGSEGLKELWRKAKLRGRGYSRADQIVQYAKGSVGLREGAESGRRAVRIFAEQIISLSETLGGIEAEIHQKCREIPYAENILEIRGIGENILAGILSEMGDITRFDDVKEIQKLSGLGLVACSSGKHKGETKISHKGRKRLRYWLFQGAKSAVVHTGEFKLLHEYYTTRKENPLKKMQSLIVIACKLLRVMFMILRTGQRYDPGKMMKDIRQERRMSGQAA

SEQ ID NO: 515621 - protein, 319 aa, unidentified
MESTAHTFVGIDVAKLSLDVYLASENRAFTVENDTAGFQQLIDRLPAASSCLVVIEATGGYQNRLVAALAAAGQRVAVVNPRQVRDFARGLGILAKTDRIDAQVIARFGQQANSRPIEIGSEKQAELAELVTRRRQLIDFRTAEHNRLETATTKLVRNNIRHLIEALDKQIRQLEEAMGKLLESEPELASKAALLRTVPGVGPVTVTSLLVDLPELGRLDRQQVAALVGVAPFNRDSGKFHGRRAIWGGRAAVRSVLYMAALTARRSNPIIRAFAQRLEAAGKPFKVVLTACMRKLLVILNSMVKHNLTWNLKLHPQSS

SEQ ID NO: 515622 - protein, 351 aa, unidentified
MEEYIAFDSHKRYTWMEREEAGSGKLRHARIEHAPGAIREALAECEPGTVVAIEASGNWYWITDEIEQAHLIPRLVHPRKAKLMMGQINKTDRLDTHGMNRLQRSGTLPVVWIPPGPLRELRELTRTRVVLVAQRTRWKNRITATLAKWGLPASQRSDPYGKSARQELDARLEGLPAETRWATEQMLAQLDTLSEQIQQFEKRLEELVEVTPEMQRLRSLPGVGVILAATIVLEIGDIGRFLSAERLASYAGTTPRVHASGDRLRYGRTRPDANRYLKWAFAEAANSVAVNATRWPERHVSELYTRLRARKGHSKAVGAVARHLAEAAFHVLSRQEMYRDPTTAAGRTREV

SEQ ID NO: 515623 - protein, 400 aa, unidentified
MSGSRSPFQGFVGIDVSKDKFDACGIGEDGTKLFQFSAAMDRNGFEKLKSHLSSVPMGSVLIGMESTASYHVNLFSYLISEGYAAVVLNPLLISNYVKMQLRKTKTDKKDAWVIAQFLLANRNSLIRRATSPLISDLRELARQRESLVDQMTSLKNDIKRILNITFPELEHMAGIFTKSILKLLQRYPSAYALQEADPDHLTRMLIKDSYGRKRGAFAEALLKAARSSIGTPSPMKDVILKQKVSLHFHLEEALQEITEMLLQTSRGMMGDDMDILNSIKGIGEKSAASFLIEMGGDIQQFDDPNKIIAMAGIDPAVRQSGKHEGSSRNTKRGNRHLRRIIWLMTTQVIHFCDVFRVYYRKRRKEGLPYKKAVLATSHKLIRVIYAMLTQRTVFCQAVNS

SEQ ID NO: 515624 - protein, 359 aa, unidentified
MLSERTSVGLDVHARSVAAAAIDGVTGELVQARLTPSHEQIRSWIAGLAGPVAVTYEAGPTGFGLYRALTAAGVRCVVAAPSKLQRPSGDRVKTDARDAVHLARLLRLGEVTAVAVPSLGQEAARDLVRAREGCRGDLMRARHRLSKLLLRQGIVYSDGQAWTDRHDRWLRQQRLDNPGTAMAFESEYDTVLSVSARRDRLDAAIAELAADSEFTTVVRRLSCLRGVSTLTAFALAVEIGDWHRFTGNTIGSFIGLVPSEYSSGTSRVQGSITKTGNTHARRLLVEAAWHHRAPYRPGKTIRDRWELAPPAARARGDAGNRRLHERWVTFNLRRKRAVIANVAIARELAGWCWSLAVMD

SEQ ID NO: 515625 - protein, 395 aa, unidentified
MFIVGIDIAKRSHEAIIIAEDGQVVRKAFSFRNNCTGYNLLLEQVRRLTLVKSQIVFAMESTAHYWLALYARLLKDGYTVMVLNPIQSHSLRELYIRKAKTDARDSLIIADLVRFGRCKASNVPQDKILALRELCRSCAYLVDMAADLKRKLIALLDRIFPEYESLFDSVFSKASIAVLRKYSTPQKVKNANLRKLTDLLMESSNGHFGEWKAHQLKEAACSSFGIDDSGGVYSTLLGVFLEQILSLTAQADSLEKQISVFFQEFNNPLTSIPGVGTVLAATILSEIGDITRFSSADKLLAYAGLDPSVKQSGEFKSNQNRMSKRGSPYLRRAIWLASTVAVHRDPMFQIYYEKKISEGLHYMNVIGHVSRKMTAVIFAVLRDGQPYQPILQSAG

SEQ ID NO: 515626 - protein, 367 aa, unidentified
MKKVSTTAAKQRKNFREHKLTIGLDLGDRSSWYCVLDEAGSVLLEQRLSTTPKAMGEGFGAMPRCRIALETGMHSPWVSRLLGELGHEVIVAHARNVRLIGESRKKDDRLDARMLARLARIDPQLLAPVRHRSARAQADLTVIRARAGLVRARTALINTARGLAKSYGERLRGCSPRNVNPEKAQGLSPELQTALEPLLAAVESVSERIREYKERIEQLAQQSYPQVALLKQVKGVGTLIALTYLLTLEDPHRFRKSRDVGCYLGLQPGRRNSGQSEPQLHISKEGDPYLRTLLVQGAHHILGPFGADSDLRRWGLKLAERGGKNGKKRAVIATARKLAVLLHRLWVSGEVYEPLRNSSQVPVPAAA

SEQ ID NO: 515627 - protein, 278 aa, unidentified
MSLYGGIDLHANNSVVVLLNDQDQVIYQKRLPNHLPTILEPLNLHHGEIQGVVVESTYNWYWLVDGLMEANYRVHLANPAAMQQYNGLKYTDDHSDARWLAHLLRLGVLPEGYIYPKATRAVRDLLRKRAHLVRQHTANVLSVQNILVRTTGARLSLKRIRELTKSALEGLLPEADQVLAVTSSLAVLDCLSQQIKTLEQTVQQRLQQTSAYEQLLTGKGIGPILAQTITLETGDVRRFPAVGNYASYCRCVDSTKISNGKRKGQGNVKNGNPYLGWA

SEQ ID NO: 515628 - protein, 336 aa, unidentified
MIAVGVDTHKHEHLARALDGLGQLLGGLTVDASLAGYTQLVQWLRTLEGEVVVGIEGAGSYGAGLCEYLLAEGIAVVEVERPRRQDRRRGKSDEIDALLAAKKVLANDGLSTPRAGGTRQALAALLIAQRTCVSERTRLLNQIQALHTTAPLALRERVGEGNGRKLAQRLVKMRTRNDRPQSEQLIFTIMRDLARRSEELAAQADAYKHELTLLINSLDPALLQEQGVGPISAAKLLVSDPKRMKSEAAFARCNGTAPKPASSGQTIRYRLSRGGDRQANNALHTIAMHRARRDTQTRAYLDRRISEGKTHREAMRALKRHLSRHLYKQLITIPLT

SEQ ID NO: 515629 - protein, 396 aa, unidentified
MDFKQNQKINQVTEQTLVVGIDIAKRTHYACIVDDRGRVLQKSFSVPQAGNGFELFYQRVLAAMKEHEKSEVIVGIEPTGHYWLNLAYFLEERGIPLVMVNPMHVKRSKELDDNLPTKHDRKDALVIARLVKDGRFSYPRILKGMEAELRVGSTFRSKLTEELGAVKNMIIRWLDRYFPEFVQVFPSFGKMALAALECTPFPSDLYQKQPDEVLSLFRKVEGLKSPQRPKTVRLIEVAAGSIGVTEGLEMARIEIATLVRRYHQLEQDIESITGQLIELVKTSVEYEWLSTVPGLGDTTIVDLLAEIGSFSHYQDPRQLIKLAGLTLRENSSGLHKGQKRISKRGRRKLRALLFRVMMPMIRHNEAFRKLHEYTTQTVRLIRYARNNPLWFYAVSY

SEQ ID NO: 515630 - protein, 430 aa, unidentified
MTNLKHTPSDSVLVAIDVSQRRNDVLIETPGVSRHRRLVVLNNRVEHDRFIDRLRDIGRPVIVGFEATGNYHRPLAYRLLQAGFELRLVSSVALARTREALHNGWDKNDPKDAQIILHMLKIGATQTYCDPICSGINDIQELSKTHEVISKAKTELWHRLLTHYLPLYFPEIARFAGNSRSDWFLAFLEQFPTPAGITVLAKEHFIDQAWDVVGRKVSKARLLGDIYETARSSIGLPVAIDSPAVTMFRLIIAEGRSLIRQRDAIEQQAHTALADNVDYRRLRQIPGIGPIIEMTILAEAGDLRRFRHHRQFLKFCGLDLATHQSGQFRGQTKLSKFGNARLRRAFWVAAQVAIRQRDNGFRAKYERYIARDNDNADLKRKALTAITAKMARTAHAVIRTGSDYRPFFEGPMPSGRTSLSRCREGATATL

SEQ ID NO: 515631 - protein, 338 aa, unidentified
MYYTGIDLHKKTSFLTTIDKDGKIVFRANLGNKEELILDYFTKLDDETRIVIESTGSWYWLYDLLAGNGFNVVISNPLKTKAIGAAKIKNDKVDSHMLAQLLRTNLIATVHVSSLETRKLKELMKHRARLVRDITRNKNRINMILMKNNIQPAVSDLFGKKGIRFITEAPLPEYHREQADTYLLIYNQLREQVDALTKRIRSIADNNTMAQLLITIPGIGYIIAMYIVAEIEDISRFPSYRNLTSYAGLVPSLHASGEKERRGKITKQGSRYLRTALIEAAQAIARTKKSKLNVFFRKRIVRAGYQSAIVATAHKILQYVYYVLKNQIPYSEEYPVSA

SEQ ID NO: 515632 - protein, 338 aa, unidentified
MAIVTVGIDLAKNVFAVHGVDETGKPVLVRPEVPRAKLVELIASLPSCLIGMEACSGAHHWAREFSKFGHTVRLMAPKFVVPYRMSGKRGKNDAADAAAICEAVTRPNMRFVPGKSIEQQSRLFVHRARQGYVEQRTALINRIRGLLSELGIVLPLKAATVRREAHKHLEDLPGWCNTVVGDALSELTHLDERISQYDKYIAQAAHEDAQSKQLMQLSGIGPITASAIVATVGKGHDFSCGRQFCAWLGLVPGQYSSGGKQRLGRITKAGDPYLRTLLIMGGKAVLAAAKNKTDPVSRWAISVQERRGYWKAVVAIAAKNARLCWAMLQRGEAFKLPA

SEQ ID NO: 515633 - protein, 401 aa, unidentified
MNAVGIDVSKGKSMVSIMRPFGEIVSEPFEVKHTSSEIKALIALINSVDGESRIVMEHTGRYYEVLAHQLAEANLFVSTINAKLIKDFDNDSLRKVKSDKADSIKIARYALDKWTGLKQYSLMDEIRNQLKIMNRQFGFYVKQKTAMKNNLIGILDQTFPGANTYFDSPARNDGSQKWVDFIDTYWHVDCIRNMSLNAFTEHYNKWCKRKKYNYSQSKAVEIYEKAKEVVPVLPKDEITKLIIKQAISQLNNASATVESLRQLMNETASKLPEYPVVMSMKGVGPSLGPQLMAEIGDVTRFSHKAAITAFAGVDPGVNESGTYAQKSVPTTKRGSSELRRTLFLVMDALIKSMPQDDPVYQFLDKKRSQGKPYYVYMTAGANKFLRIYYGRVKEYLAKLEK

SEQ ID NO: 515634 - protein, 380 aa, unidentified
MTCKECGQVVKLTRTMNKCHSNTESSSPEETRCQFNGGRCAIKLGIDVHQDFYVVVEQVDGANPKPAQRFQKGAFLHWAARLKEKSGAEVHAVYEACGFGFGLQRALSALGIQCQVVCPQRLDEQNRRVKTDGLDAKALCLKLDRFVQGNCAALAIVRVPSEEEEQERAIHRQREQLVKVRKQLEAQGRSLLVNHALEPVKSWWKQGNFAALQVPDWMKELLQNSQPILLTLQEKISTLTLQLQSAASPDQPRGLGKMTSVVIDREIGDWKRFNNRRQVASYTGLCPGEYSSGNTRLQSCVTKHGNPRLRAALVELAWRLVRFQPDYKPIVKWRATLAKGALATGAARKKAIVAVARQLAVDLWRIKTGRLRAEELGLIK

SEQ ID NO: 515635 - protein, 335 aa, unidentified
MEWTVAIGVDTHRDIHVAVAVDRLGAQIDSREIETTREGYCSLLSWALELGSPVFALEGAGSYGAGLARFLEGAGFAVYECERPRRQERRRGKSDLIDAALAARRLVAGEGLSIPRGGGRREDLRRLLLERRSAVQARTAALNQLSSLLVTAPDQMRARLGALSGERLAAAAARLRPGPDVISCVLRRLGSRVRRLSEEIAEVESGLAALLAELAPDLLEECGVGGAQRLVSSGDPSRMTSEASFAALAGTSPVDASSGQQRRHRLNRGGDRQLNWALHVIALARIHHHPETAAYYERLLARGRTAREARRCVKRALARHFYRRLRALPTVALTT

SEQ ID NO: 515636 - protein, 351 aa, unidentified
MKFAKIDAQYYCGVDLHATTMFVTVVDRAGNVLFRRNLKNDFEAFRKCMQPFLPNLAVGVESTYNWYWLADGCHQANIPFYLGHALYMKAISGGKNKNDKLDSNTICNLMRTQYFPYAYDYPREMRPTRDLLRRRSYLVALRAAAYTHVQTVFSQQAILGLDGAELKDKNYRRLVPEKLHDADLALSVECDLDLMEAYDPIVNKLEKHIRLQAKHHDRKAYEILLTTPGIGDILAWTILYEVHKIQRFASPQQFSSYSRVVKCERTSNNKKTGGGNQKIGNPYLKWALSQIIIRAQNHSALIKRYFDKLQSKHGPRKAKAIIAHKFAVAIYYMLKNGQAFDEVKFVNSTFK

SEQ ID NO: 515637 - protein, 344 aa, unidentified
MITIGIDPHKASHTAVALDAGGRVQGELRCLANQATLERLLRWAERWPERIWAVEGAAGLGHLLAQQLVAREETVLDVPATLAARARLLAPGHGRKTDGIDAASVARVAQSQPDLHRVGAEDHSAVLRLLSDRRDELTGERRRAVNRLHRLLRDLRPGGAPTELSATRASELLGHIRPGAVVDLERKVMARALVADLRRIDRALVENRARCAVAVAASDTTVTDIFGISDVLAAKILGHVGDVGRFSSADCFASYSGTAPIEVSSGEVTRHRLSRSGNRSLNNALHLAARVQTMHPGPGRDHYERKLAEHKSSREALRSLKRQLAKVVYRHLVADQVRRLNLAS

SEQ ID NO: 515638 - protein, 391 aa, unidentified
MICVGIDVAKDKHDCFIVNSDGEILADVFTIPNETNGFNRLLQCIRNFSTPESKIKVGLEATGHYSYNILGFLINNGLPTYVLNPLHTNLYRKSLSLRKTKTDRVDARTIAAMLMSDVGLKPYTDTAYHNEELKSLTRYRFDKVKERGKLRQSIARLVCILFPELEKLVPSLHMASVYALLDEFPGARQIADAHLTHLKTLLNYASKGHYRRDFALSIRESARASIGSVMPAKSLEIRHTIRLIRELDAEIAEIEATIKTIMDALHSPITTIPGMGLRMGAVILAEVGDFSRFDSPDKVLAYAGLSPSTYQSGQLTNCHAHMEKRGSKYLRFAIFNSTKYVCHWNPTFAAYLAKKRAEGKHYNVAISHAAKKLVRLIYALEKSRENYSLAA

SEQ ID NO: 515639 - protein, 360 aa, unidentified
MPVTSKFTDFSDQCFFIGIDVHKKSWSVTIRALNIELVHFSQAADAYQLSRYVHERFPGGRFFSAYEAGFCGTSHHHALCKAGIKNIIIHPADLPESDKEKKNKTDLHDSRAVAKYLESGVLAGIYIMPLDQQERRSLFRCREATVGNVTRCSNRLRSLLDYYGVKLPENLRDKEYISKYFRDWLRRLKLSTDHGTETLQYYIEDLQYHRSRLLLITRKLKKAIAEHYQESYTCLLSVPGIGPITAMAILAETGDLNRFEEPDEYCSYMGLVPSEQSSGERVYSTHIQPRCNRHLRPLLIEAAWTAIRRCPVLLAYYKKHLGTNNKKAIVKVARKLALIAKAVALKKQLYQADYSYQINR

SEQ ID NO: 515640 - protein, 359 aa, unidentified
MKIVGCDFHPAWQQVAIFDPETGEVEERKLLHGDGEAERFYRELEAPALVGVESCGNSQWWIELVEQLGHVVWVGDAAQIRASYVRRQKTDRRDAGHILRLLMEQRFPRLWTPSGAQRDLRQLLIHRHKLVEIRTRVKNGLQHLALNRGLQKKSSLWSVRGRAYLEKLPLEGWTARRREDLLKLLGELDRHVGELDTAVEQAAHEHEQARLLMTQPGVGPITSLAFALTIGDVSRFRHSRQVASYLGLIPREHSSGGKQRLGAISKQGNRFMRQLLVESVQTVNRLDEGFRKQYAARCHHKAKGVAKVAAARKLAVRLYWMLKQKVGYPEIAHIESSPRVPLVGLSRTEGLVGRSRIQH

SEQ ID NO: 515641 - protein, 420 aa, unidentified
MGNENAARWSERIAFAGFDWAGDHHDVVVVDVGGTVVEDFRIDDSAAGWQQLRKRLSAYADLAVAVETRSGVVVERLLEAGYAVFPVNPMAAKRYRERKAPSGHKTDRVDAWSMADALRTDGHAWRALRPDDPLTVELRVLCRDEVALIGQRTALVHQLQAALREYYPVALRAFEDWTMRSSWAFVERFPTPAALIQSGKRRWEKFLHTQKLYRPETYAERLRLFATAEEFCGSVALIQAKSLLATGLAIQLRTLQDHLDRYRARIEELFARHPDHDLFGSLPGVGPKLGPRLLSELGDDRGRFDSAEGLQCYVGTAPVTHQSGKMRTARFRRGCNPRLRHAVHLWAGQSLRVCAWAQVYYEKKRSEGKSYACALRCLAQRWLKILWKMWQTRTRYDAERHHRNQVRHGGWVLALRPVKS

SEQ ID NO: 515642 - protein, 423 aa, unidentified
MNHSTLSVGADVHLKDIVLRAVDQRDGHEVIGPLSVTNNLPGAQSAAATIAQAATRLGYRRIQIGYEATGMLWIPFHHFLSTSPLLEPFDLELVCFNPKLVADFKDALVLRRPKSDERDTFDVAARVRFGEWPDSYVPGPFWQGLRRLTRYRFKLAQNLSREKMRFRSYAFLKWSDWKRAKPFSNLFGATSAALLTEFTAAELRDMTHDQLADMIAKRGRGHFYDPHAKARAVQRSLRSSYPIDPQTDEMLTATLATQLDHIRFIERSQKRLDQHIARAIDPVPNPIISVPGLGPVITGGLLAEIVDISRFPEHRHLAQYFGISWERRSTGNFVSQNTRLTKVGNPYGRYYFIQGADKVRQYAMEYKAYYWRKYNEVSKYRHKRALVLTARKLVRLVHALLTKNQPYVRPQTPLHAQEGRARL

SEQ ID NO: 515643 - protein, 376 aa, unidentified
MSHGVMGWTAPYGIECARMRLLQSQTREPSVNQIIRIGMDTSKHIFQLHGVDAVERPVLRRKLRRSEVLAFFAKLPPTVIGMEACGAAHYWARELRKLGHEVKLMAPQHVKAYVKRNKNDGRDAEGLCEAMSRPTMQFVPVKTEEQQAALMLAGVRQQLIARRTQLSNTIRGYAAEFGLTAAKGLDKIEPLLARIAQDETVPALARELFAVQGQDYAQLQIELKAIEVKLMAWHRANACSRRLAQIPGVGPIGATALVMKTPDPRAFRSGRHFAAWLGLTPKDHSTAGKTRLGKITRAGDEVLRSLLVAGATAVIQQVRNGRGRPSAWLLALLKRKPPKLAAVALANKIARIAWKLMTTGESYDGARMPGAQAFAA

SEQ ID NO: 515644 - protein, 345 aa, unidentified
MNNISIVGIDLAKHVFQLHAIDAHGRKIFGKSVSRQQLRLTLSQMPPCQVAMEACGSAHYWAREIRAMGHDARLLPPQAVKPFVQGHKNDARDAAGIAEAAARPATPHVAIKTEAQQALQAVHRVRTRLVRERTAIGNELRGLMGEFGLVVAQGHAVLRQGVARELIDRHRERLGSALCALLDDLIAQWREVDERLKGYDKQLMGLAKASAEAERLISVPGIGPINATLLLSHLGDPRRFPNGRQFRASIGLVPRQFSSGGKARLKGITKRGNGEVRRQLVHGARAALRQFQRQATPDRLARWVCELAARVGQRKAIVALANKLARICWSVLAHGRPYQPQGQAI

SEQ ID NO: 515645 - protein, 359 aa, unidentified
MKIVGCDFHPRWQQVAVFDTETGEINEYKLMNGDGEAERFYRGLAAPARIGVEACGNSQWFVDLMQRLGHEVWIGDAAEIRASYVRKQKTDRRDANHILKLLTENRFPRLWVPSTAERDLRQLLIHRHKLVEIRTRVKNGLQHLAMNWGMQKQHRLWTVKGMDAFKNLALEGWSGKRRGDLLHLLAELDGQIAELDVAVTEAAANDRRARLLRTQPGVGPVTALAFAVTIGDVNRFKTSGQVASYLGLIPREHSSGGRQQLGAISKQGNRFMRQLLVEAVQTTCRLDEGFRREYQARCHHKPKGVAKVAAARKLAVRLYWMLRQNLGYPEIARIESSSTVALAGNRHTDDLIEHSRTPR

SEQ ID NO: 515646 - protein, 457 aa, unidentified
MKDSKKSSKIKLSELKILDPKCAGIDIGASEIFVCIAKNQSQQEVRSFPTFTADLKIMISWLRENGVESVAMESTGVYWIVPYEMLEQAGFEVYLVNARFFKNVPGRKTDVQDCQWIQQLHSYGLLRGSFRPSDEIVELRSYVRQRSRLFASAAQQMQLMHKALTQMNLQLNLAISDITGVTGFNIIRAILQGERNPTALAELSAGSCRKKKELIAKALEGNYRKEHLFALEQAYDAYEFFHKQICNCERVIEKLLPTLQRKKLFQSENNFEMPNTKKHRKKSSCNRSPYSFDAPAEIKKITIADLTTIPGIDSGIAMKLLSEIGTDMPRFPTVKAFASWLGLCPGNKISGGKILSSKTKPSDNRAAQALRMAASVLYASKTALGAFFRRLRARLGAPKAITATAHKLARILYRMLTEGINYKEVGENYYEQQYQARVFSSLEKRAEELGYKLISIN

SEQ ID NO: 515647 - protein, 337 aa, unidentified
MKFCGIDLHSNNSVVVVTDETDRVLVSRRCPNEITPILSLLEPHRDELVGVVVESTYNWYWLVDGLMAAGMDVKLANPVAMKRYDGLKHSDDKDDAVFLAHLLRLGILPTGYIHPPQERALRDLARKRIQLVRTRTQHILAVENIAARQFGHGFSCNEIKGFSAASVDRLGLPTDVALAMNANVAVIQALEAQIAGLEARLLQQAKLRPEYLLLKTMPGVGEVLATVIMLETGDIGRFAEVGHFASYARCVKSARYSNGKKKGEGNAKNGNAYLIWAFIEAANFARRFSDDAKRFFEKKKAKTNGVVATKALAHKLARATYHILKEKQPFDAKRCFA

SEQ ID NO: 515648 - protein, 338 aa, unidentified
MEYKRISIDTSKHVFTIHGVDEKERPVLRREVGRAQVERFFAKIAPTEVVLEACGGSHHWGRVLSRMGHRVKLIPPQYVKPFVKRGKNDRNDAEAICEAASRPTMRTVPVRSVDEQAATLILKHREMLVGQRTQAINALRGHATEFGIIGAKGCANVEALITALLANTAVPDVAKSMLKDMGSHVADLDAKISVLDQKLNELHKTNPVSQRLAAIPGVGPITAITMALTINAADFETGRHFAAWLGLTPREHSTGGKHRLGRINKAGNERLRQLLVVGSMSVIRFAKPGSKSASEWLLKLLERRPRKVAAVALANKIARVIWAMMVRGEVYRRQPVAA

SEQ ID NO: 515649 - protein, 469 aa, unidentified
MDLLKLPIYTFYCEFLDMEERFMKKVFIGIDVGKFKNSISIIDIEGNPIIKKGLSIENDYYGFARLEEQIDLIINNYGFTYDDCIAGVESTGHYWFNLRDYLKDIGIETVMIKTDSVKHRRALEEGQKGKNDTLDARVIASCLRNGNYVYIRENERELRALQKLTRMRNDISDELVALKNKIHRCIDICNPVFFKIFENLNSKTGVALIKLYPSPQDIINVELDNIKKELGEIVDKPNMRMVSLYKEECEIWSGLIKEPSYAEKVEMVAYIDKFLLQNKSKEHLDKQIKEIAKNIIPLYSEFEQIKGIPLIQLISVLSEIGDIRNFKNTRAILAFLGLSLKGNASGKYIGERRINKAGSRIVRKHLFNIMDTLVKHNEYFRIAYCYYKSYNHKNPTKKRSMQIAVMCKFVRVMYGMLKYNASFDYKEMMKGYYFGDCNMQVFKEEFEGENRRKKIENCKIAYDIYTIYS

SEQ ID NO: 515650 - protein, 1026 aa, unidentified
MTIAELLHQRDGAYTREMLLAPGGFGLGVVPDRERPDATTASTCGFCSTGCSLNVHLKDGVAVGLTPNTEYPVNLGMACPKGWEALNVLKAADRATTPLIKNAQGKFEPVDWDIAMRTFCSRMKQIQREHGPNSVAWLGTGQIATEEMALLGSLAKFGMGVLHGDGNTRQCMATAVVAYKQSFGFDAPPYTYQDFEETDCMVLVGANVCIAHPILWERVMRNKRSPEIIVVDPRRTETAMNATQHLAIQPKSDLALFYGLAHILIENDWLDHDYIAAHTNGFDEFAAHVKPFTPEAVSATTGISIESLYKVARTIHERERISFWWTMGVNQSYEGTRTAQALINLALMTGNMGRPGTGANSITGQCNAMGSRLYSNTTNLLGGREFTSEADRREVSNILGIDKQKIPTQNSWAYPEIMKGILEGKIKGLWVIATNPSHSWINQTQARDILDRLDFLVVQDMYSSTETAREADLILPAAGWGEKEGTFINSERRIGLHKKVAKAPGEALADFHIFKLIAHYWGCEDLFIEWRSPEATFQIMKRLSAGQPCDITGIRDYQHLDEVGGIQWPFVEGVDGRALRVESEEAEDLPSASDPQLFSQRRLFEDGRYHHADGRAKFLFEAPRPMPEPPSAEYPFILLTGRGTAAQMGMKKLLLEKMLLTFEFHNTVSGATAMGIVPVYVGLDYHSETIRVCVMDEAGEVLVNRNVANDPAAVVDLVRVNGGLVQAVSIEACCGAADFATALSAMTEWTVRMAHPSGVNRMKQGPDKTDHTDAWHLANLLRVGYLPHVWLADETTRQLRRLVRYRAGLVAQKKDIKLRVLSLLREERIENTSGASTWSKPWMVWIKTAKLGEQSRWVLDQELRRLEQAEKDLAAVDQRMEQATADDPVVAKLQEQPGIGPVTAVTMRAVIGRFDRFLTGKQLSKYCGLSPCNASSGGRQADAGLIASGNDILRPLLMQLAKRLPREAPRWKELHAKLRITKGANVASAALANRWLRWLYHEMNGRSKVQVPEGQPPVTDVKLQAS

SEQ ID NO: 515651 - protein, 347 aa, unidentified
MVIVGIDAHKRSHTAVAVDASGRRLGQRTIGTTSQDHLALLGWAEQFGPQRSWAIEDCRHLSRRLEADLLAAGESIVRVPTKLMAHARDAARSYGKSDPIDALAVARAALREPDLPTAQLDGPARDVRLLSDHRDHLIAERTRVINRLRWHLHELDPGHEPPARTLWRPKHLTAIAARLAEFDSVVARLARTEIEDCRRLTHQIQALEEELQTTVKQLAPTLLDICGCATLTAAKIIGETADVRRFRSRHAFARHNGTAPLPVWSSNKPRHRLSRTGNRQLNAAIHRIAITQAHYHEPARQLLDRRREGGNNKAESLRVLKRRLSDVVYRALLSDAEHAASPVPLAA

SEQ ID NO: 515652 - protein, 412 aa, unidentified
MSDGTVSWFAGVDWGSEKHQVCLLDAAGKVVGEREFRHGGAGLAALCDWLVSAAGEPGRVAVAIEVPHGPVVDALLDRGFAVHAINPKQLERLRDRVSLAGAKDDRRDARVAAGGLRTDPHLFRPIEAGDPAVIALREWSRLAEELQQERMRLGNRIRQQLWRYYPQLLEVSDDVTVEWILDLWTLAPTPAKAARLRASTLVRLLQEHRIRRVDAEKVLGLLRQPAITVAEGVTEAAVLHLRSLGARLRLANREFHQAERKLDALCATLREKTAAAGGAPCDAAVLRSLPGVGTVTLAILLTEAAGPISRRDYPALRTLSGVAPVTKRSGKSCSVTMRYAAQIRLRNAVFHWARVAVLNDPKCRSRYATLRARGHSYGRALRGVGDRLLGVACVLLRRGMLFDPDYGSSAAA

SEQ ID NO: 515653 - protein, 378 aa, unidentified
MRFYNQPHRFYCGVDLHARTMYLCILDQAGAIVLHQEVSAEPTAFLEAIAPFRDGLVVACECLFCWYWLADLCQAENIAFVLGHALYMKAIHGGKSADDRIDSQKIAQLLRGGNLPIAYVYPKGLRETRDLLRRRMYLVHKRAEIVAHVVNTNSQYNLPPFGKKLIYARNRQALQIADRFTDASVRKSIELNLRLLDALDDLIGDVELYLERTVKVDDADTFYRLRSIPGVGKILALVLLYEIHDIQRFASEGMFLSYARLIRPLKTSAGKVKGGGGAKIGNAHLKWAFSEAACLLARESDQAKRFLARQQKKHGKPKALGILAARLGRAVYHMLRQKKAFDPKRFWNGEPGLTPAQLHKAAVQRPRRAKGSPCVLEA

SEQ ID NO: 515654 - protein, 294 aa, unidentified
MEAKFVGIDVSKARLDVDCLPVSTARQFSNDAGGIAALVQWLLGSGVERIVVEATGGYEIAVASALAAAGLPVVVVNPKRVRDFAKAQGVLAKSDRLDARVLALFGERIAPPVRALPEAAQRDLTELLDRRHQLVTMRAQEQARLATVLPVARGDVEQHIAWLDQRIRKHETVLLKRLRANEIWDAKVKLLDSVPGIGPVNLFTLVGVAPFNDDSGKRRGQRYIRGGRAEVRCALYMATLTAKRCNPAIAQMFERLIAKGKPFKVAMTACMRKLLTILNAILKSTQPWENRLAT

SEQ ID NO: 515655 - protein, 415 aa, unidentified
MLFLGDDWAEGHHDVVARDDAGKTLARRRLPEGADGIARFHEMVASCLGEDAEPDPARVIVVIETDRGPWVKALAAAGYRVYPANPRQAARHKETVANSGKKDDFFDAGCLADMGRTRLHQMRELAAGSDVAEAVKIAARAHQKLVWERTRHLLRMRSALREYFPAALEAYADLTLAGKDALELLAKAPDPESAARLTVTQITAALKRAGRRGDLAQRARDIQAALRAPHLDQPDVIAEAYAASVQAAAAVITALNEQVKIMEAKVSGLFRRHPDAGLHLSQPGIGDITGARILGEFGDAPGRYASAKARKNYAGTSPLTIQSGKKKTVHARYIRNRHLIDALHAQALSALSVSPGARAFYDDLRARETGHDDAMRRVASRLAGILHGCLKTGREYDEATAWSHRAETPEAAEAA

SEQ ID NO: 515656 - protein, 312 aa, unidentified
MTDITIGADISKDHIDLHSLPDGGTLKVANDRKGFAAIVRWIGTKGLERIVYEPTGAYHKPFERFMMVQRLPLSKVNPRLARRFAEATGRLAKTDRIDAGLLAQYGALLAQRILQANTQTHNDLKELHVARLALIKDRTAAKNRAKNMSNLLLKRQNVDRLRQIERQMKAVDEAIMALIGADVSLKARFDILVSIPGVSQITAFTLLIEMPELGGLDEKAAAALSGLAPMSRQSGRWTGRAFIAGGRAIVRHALYMPALVAYRFNPDLKTKYEDLTKAGKPPKVAITAVMRKLIVLANALLRKNRKWEPKPT

SEQ ID NO: 515657 - protein, 359 aa, unidentified
MKMAANTSVETNVILGVDTHKDNHVAVALDELGRHLGILSVPTTTEGYRKLLRWARGLGTIEQAGVEGTGSFGAGLARFLKAEGIQVREVIRPKRRDQYRSGKSDPIDAEAAARAVLAGTATGEPKGADGTVEMIRALRAARCSAVKVRTQASNQLKGMLLTAPEELREELRALSTAKLVSRAARFRPGESPQSVEAATKYALRSVARRYQHLQEEIKELDEQLDRLVQQAAPELLRVDGVSTDTAAALLIAAGDNPQRLKSEAAFAHLCGVAPIPASSGKTIRHRLNIRGNRDANRALYVIAFGRMGRDERTRAYVAKRTAEGRSKREIIRCLKRYIARELYRILVPPLRTTPSISVP

SEQ ID NO: 515658 - protein, 348 aa, unidentified
MPNYNQPHQFYAGVDLHARSMFVHVLSAKGKTVFERDLPAEPDAFLDALKPFRKNLVVGCECMFAWYWLADLCEDQRIPFVLGHALAMKHIHGGKAKSDKIDASKLANMLRGGMFPLAYVYPRAKRQTRDLLRRRSFFVRQRAQLITHIVNTNSQFNLPPFAKKLSYAANRSEEIAERFPDPSTRLMIGADLRLIDAYDAQIATLERHLLQSAKVDDPVTFAFLRTIPGIGPILGLILLYEIDRISRFPEAGNFLSYSRLVRCAHESGGKVKGFGGKKIGNAHLKWAFSEAACLMLRTCLPVKSWMQRQEQKRGKRKALSVLEAKIGRTVYHLWNKQQAFDAKKFLHA

SEQ ID NO: 515659 - protein, 382 aa, unidentified
MIYIGIDVAKDKHDCFITNSEGEVLFNAFTIPNNADGFHDLFQKISSLTNDFSNVKVGLEATGHYNYNLLGFLIDKGLPTFVINPLHTNLFRKSLSLRQTKTDKVDAHTIALMMMSGVNLQSYSNTSYHNEELKSLTRYRFDKVQERAKLKTSISRLVNILFPELEKLVPSLHMVSIYALLAEFPSSAQIASCHLTRLTNLLANASKGHYNKEKAIEIRNAAKHSIGSNMPAKSLELKHTIRLIQELTSEIDEIECSIKSIMDEIRSPILSIPGINYRMGAMIIAEIGDFNRFSSPDKILAYAGLSPSTYQSGQLDGCYSHMEKRGSRYLRYALFNATKFVCIWDNQFSAYLAKKRSEGKHYNVAISHAAKKLVRVIYQLEK

SEQ ID NO: 515660 - protein, 340 aa, unidentified
MTTIGLDIAKSVFQVHGVDAQGRVVVRRQLKRRYVLPFFKKLSPCLVGIEACATSHHWSRELQALRHTVRLMPPAYVKSYLKRQKNDAADAEAICEAVARPNMRFVETKTAEQQSCLMLHRTRHLFVRQQNAVINSIRAHLAELGIVAPVGRNGVEELLDVVADPEDDRVPEVARECLAALGAQLRMLKAQILEFDQRIVAWHRSNETSKRLDEIPGVGPALATVLVASVADPRAFRSGRDFSAWIGLVPKQNSSGGKEKLGNITKRGDRYLRSLFTAGAPAVIRYAKLHGTKHRPWLTALLARRPTKVAAIALANKIARMAWAMMAKGERYKEPAALAA

SEQ ID NO: 515661 - protein, 345 aa, unidentified
MKKVVAGIDLHSNNAVIGIMDLDGKRVTHRKVECKLSEITKFLSPYKKRLEQIAVESTYNWYWLVDGLRGLNYPVVLANPAGMEQYSGLKHADDTNDAFFLAELLRLKILPTGHIYDEQLRPVRDLLRRRLTLVHQRTALMLSFKSLYTRTTGQEMSLSQLKGIEIKAAQELYEHPANQLIAGMQIEHIEQLSRSVDKIEKVVLASARELPCYAKLTSLPGVGRILGMTITMEVGDIKRFAGPGNFASYCRAVAAERTSNQKKKGENNAKCGNKYLAWAFVEAANFARRFDLQCRKWFDRKAARTSNVVATKALACKLAKAAWYLMNEETGYDSKRMFGEAAKTK

SEQ ID NO: 515662 - protein, 507 aa, unidentified
MEPNYRRCCGIDIHKKSVTVCVLPPVDKPESGIRKRNFPTFTRDLKQLRTWLKNCKVTEIAMESTGQYWRSVWNLLEGHFEKLVLVNPQHIKGLNGYKTDPKDAEWIAGLLEGGKLKGSWVPPREIRELKDLTRQRVHVLEDMNRVKNRIEQLCQAGNIKVSSVATDLFGVSGRKMLKAIVEGKHDAGWMADYARGALRGRKRELELALDGSFTGNQRWLLDRELLQLEWLEAQARVLEQEIERRVVPFAEPMRRLMTIPGIDQKTAWTIMAEIGVDMNVFPDARHLASWAGLCPGNRESGGRRMSGRTRKANRYVKSALCQAAWAASHTKQTYLSAFYKRLQVRKGAQKAVMALAHHLITVVYNVLARSEEYVEMGADYHDQRNKPKVVSRLVKRLTRLGYYVVLDPIVREPGKSEVSRMQMPGTTSLAASEPSPLETARRSAKRVPLTKRRAASQSSLHARVGTIAKRKRGRPCKCVERGIICKHGLRPHPNLLEAKKVGDGRFS

SEQ ID NO: 515663 - protein, 482 aa, unidentified
MEKRNIYLNQSQELLSLFEDAGNNTKVMCVPMDYAKKDHLVMFCDGNGHILKKPFPVRNNPEGIEFLTEQVTRSCRHRQIDHKHVFFGGEDVGSYAENFVDTLRSGGWIVAGVNAHDAKKQRANLQASTDRLDLMGIASMLLNRRANCSPAQSGIYRNLRTSVRHRRKLVVMSTEEKNRMHAVVDRLFPGFLAEKKSGICPFSGASLYLMEDRFSPHQIRRRKQHKLIEILHRYGTKKPEDTAKKLQNYAGCVLSTPNEYISTFQLSLTQHVKHFRCLRDSIEQLEHEIAVWLAQTEGVFLTSIRGIGIVLAAGIAGEIGNPHNQKPVKNLVSYSGIIPRVKQTGGTQGKTHTGKVAKRCNRILKDYVVQAANHMGLHGPQDLMTDYKRREAAGQHADFGIARRYLRTAMCLMRKPQIYLPPEFRNTETKPEERAGYYLMAWPALREKWKKAGAIETAFDDNHFLGRWRNMVQELYEIKLKL

SEQ ID NO: 515664 - protein, 351 aa, unidentified
MGEVTTIGLDIAKNVFQVHGVDASGTVVLRKRLSRARVLGFFADLPRCVVGMETCSGAHHWARELCRLGHDARVMPAKYVKPYVKTNKTDARDAAAICEAVSRPEMRFVPVKSVEQQAVLVLHRTREILGRQRVMLINALRAHCAEFGIIVPQGARHVPELVARLDDPSDERLPDIAKQALRILVEQLEASSARLSAIEAQLRAWHEHDEDSQRLATIPGIGLITASALVASIGSGTQFNSGRELAAWLGLVPRQHSSGDKVRLGAISKRGDAYLRRLLIHGARTVVRWQRPEARPGTPWIKKLSKTKHANVVATALANKNARIAWAVLTRKQVYAAPHRAGVDATAALRG

SEQ ID NO: 515665 - protein, 388 aa, unidentified
MNALTNATSTNTILAIDLGKYKSVACIHNQATGEVCFTSVETSRSELRRLIGKEQPMVVVIEACLLAGWVHDLCGELGVRCLVANTASEAWKFKHLKRKTDKDDALRLAQLYLLGQLPTVTLPPATVRQWRSLIATRQNLVGRRVAVQNRIRAIFVAQGLPAPRGAKAWSSTGLAGIALQAKCLGECGPDELWRGLLELALSEYRQIGELVAQAEARLDALGKQSADVILLQTTPGLGPRTAETVAAYLHDAPRFQSSKQVSAYSGLVPRQHQSGEMDRRGRITKRGPALLRKLLVECAWCMIRYNAWARGIYQRLTGGGRRRKKQAIVALARKILVRCWAMLRDRKPWHDPQTGPKPALPPSKQRRQAEAQQRRQAKQEAALTPTAT

SEQ ID NO: 515666 - protein, 412 aa, unidentified
MEVLHPDCAGLDVHKRNVVACVIHSAAGGVVKKTLTFGTMLDDLERLRDWLQAEGCTHVAMEATGVYWKPVHNVLEEHFTVVIANAEHVRAVPGRKTDVKDAEWIATLLRHGLVAPSFIPDRAQRELRELTRFRTALIRDRARMVNRLQKTLEGANVKLAAVLTDVVGASGQRILQALLRGDSDPEAMAELADPRVLRTKRDALERALLGRLEGPLHFLVGQQLGQIQMLDGQIDACDQAIAELMRPFAAEIERLDAIPGVGTRTAQVIIAEIGTDLDSHFPSVRHLAAWAGICPANKASGGKRRRAPTRKGNPWLRQALVESGWAAGRSKKSYLGRKFHQLCARLGRKRAVVALGHEILIIIFHLLTRGTTYQDLGPDYLPERERTAVRRRAINALERLGYTVQISPTQAA

SEQ ID NO: 515667 - protein, 348 aa, unidentified
MSQSKQYVGLDVSLKETSICVIDDVGKIVWRGRTESTPEAIASAVKQHAPHAVRIGLESGQLSSWLFHGLKVAGLPVICIDARHAKAALSLKVNKTDANDAFGLAQIMRVGWYREVTVKGLDCQAVRALLVARAQIVSQITTTKNCVRGILKTFGRVLPKGLRSQFPGRVRAAIDGDPILGAIIEPTLRVLEAMRAQLLVYNKAVIQRARGDDTARQLMSAPGVGTVVALAYMTGVEDPARFKRSSSVAAYFGMTPRRYQSGEVDHAGRISKCGDGMVRGLLFESAKVLLSRSARPSALKTWGEALGKRIGPKKATMAVARKLAVILHRMWTTGTTFQWNAEAASPAA

SEQ ID NO: 515668 - protein, 435 aa, unidentified
MDEVADEPLYRDRVCGIDIGKAGMAATIRVPSEKNPARRAAETRSFGTTRREVLALADWLRSWQVPAVVMEASGDYWKGPFYRLEAEGFECVLADARQVKHLPGRPKHDQGDSRWLAACFERGAVTSCFVATPEFRVIRLHTRYRRDLTEERTREKQRAEKLLESAAIKLSSVVTDLHGVTGRDIMDHLIAGETSPKVLAQLARARARRKITELEEALEGAEFFTAEHAALLAAMLGRIDQLNAQIAELTQVIERLLAPHEEQLQQAESMPGWGRRAAQDTLAETGPDMNRFPTGAHLASWAGRTPLDNQSGKRKGKARSKKGNRYLAAITGETAVAAGKTATREGARYRRLSRRRGKAKAQVALGNTQLTVYHALLSRPGTRYEDLGPDYYERQRDTRRQIAHHVGKLGALGFEVTLCRIPGPDPAGPASTPAA

SEQ ID NO: 515669 - protein, 362 aa, unidentified
MEFFCGLDVSIEETAVCVVDDQGVVHLRGAVTTEPAAIVTALQPFLGRLRRVGHEAGALSPWLHPELLRAGLPAVCLETRHVRAAMSAQRNKTDAADALGIAHIMRTGWFRQAHIKTEACYRLRLLLTHRRTLKRKVLDLENAIRHSLKAFGIKLGGTARGAFDQAVRRAVADDPLTSELMDAMLAARAALWKEYKRLHDLVVKVVARNDLCRRFMAIPGVGPVTALSFMAAIDDPSRFCRSRDVAAYFGLTSRRWQSGTSIDVKGRISKIGDAEVRHALYEAASVLMTRFKGRDKVRTWGLALAKRGCHRKATVAVARKLAVIMHAMWVDGTCYVGDPTAPETDTAARAAAKNRKLLGALA

SEQ ID NO: 515670 - protein, 354 aa, unidentified
MNKIKQLSFEGKVIYCGLDVHKTNWKINARMEGIEMAAFSQNPDPLLLKNYVDKNYPGAELKVVYEAGFCGFEIQRSLKSLGIECIVVNPADVPCSDKDRKRKDDKRDARKLSIELAKGNLKGIYIPDKQMQDARSLVRQRHRLVQDQTRCANRIKHLLLSNGITTGEKSERWSLRFIKKLQQLDCGSISLKSSLQFAIEQYLQTRRIVKEITLAIGDLSKQEPFKKVQAVLGSIDGIGLINGMVIQTEIGDIHRFKRLDSLCDYAGFVPDIYSTNDRMVIRGISKRGNEFLRETIIESSWVLIRKDPAMLMKYNEYRSRMSANKAVVRIAKHLLSRIRFLWKTEQTYVRGIIG

SEQ ID NO: 515671 - protein, 350 aa, unidentified
MNNSLSAFDPCGIEVSHLTLVVALRCGDRDESPREFPNTSEGHQSVLRFLARSGRRVQVAVESTGLYGLDLALALHHAGVSVMVANPRAVRHFAQAMLQRSKNDQLDSVVLREFAARMPFQPWRPPSAAALKLVGVARRLEALTDMRAAEKNRLHAASLSEALPAIIRRDIERSIQTQQRAIDRLTRAAQEFIADNPELARRYELLISIPGFGATSAVHILAELNLLPADRDVRQWVAYAGLDPREYSSGTSVHKKVRISKAGNKHLRRGLYMPALVAVRCQAHVRAYYEHLQARGKTKMQALVATMRKLLHAIYGMFKHDQLFDGCKVYAAQQVSAPAPVPAPQEVLCP

SEQ ID NO: 515672 - protein, 350 aa, unidentified
MPATAQTAIAVVGIDIGKNSFHVVGLDDRGAIVLRQKWSRGQVEARFANLPPCLVGMEACVGAHHLSRKLKDFGHDARLMPAKYVRPYSKGQKNDFRDAEAIAEAVQRPTMKFVATKTAEQLDLQALHRVRERLVSQRTGIINQIRAFLLERGVAVRQGLRFLRAELPRILATPPDVLSPRMVRIVEDLASDWRRLDERVEVLSDEIEAIARQDAGCERLMSVPGIGPIISSAMVAAIGAGDVFTKGRDFAAWLGLVPKQISTGDRTILGKISRRGNRYLRVLFVQAAWVALVKVKPTRWGYGLRRWIEAAKKRLHHNVLAIALANKLARIAWSVLARGRAFEASTPQAA

SEQ ID NO: 515673 - protein, 452 aa, unidentified
MRSIALDAHRDFCEVAISEQGRVRLAGRIAATPEALRLFGESLQPTDQVVVEATGNAVGIARILDPYVGRVVLADAKSVRAVAKARAKTDKIDARLLARLLAAGFLGEVWTPDEQTRVRRRLVSRRAQLVRQRTREKNQVHAVLMRRLVGKPPMSDVFGVRGRAWLARLELPADERLTVDGCLRHIDMLDEEIGLVEQLIAADALASPEMRRLLTIPGVNAVTACALIGAIGDIRRFPTPSHLVGYLGLDPRVIQSGNEPARHGRISKQGPGEARHVLVEAAWYLARTIGPMRAFHQRIRARRGANVATVAVARKLAVICWHMLTHEQDYAFARPSLTREKLRRLELLTGAERHQGRRHPERVFAPRKQHELERELAAQAETAYKRLTDDWTARQPRATRSAGAATGRASSSQPEGDKPARQDRAPSSCPSAGGHPRSPQESHPAEVTSSGT

SEQ ID NO: 515674 - protein, 358 aa, unidentified
MEQIYREYVKSTRISVGVDLHKKHWAVTIMDRSELVKKYHIPGTWEALKKTLIPYAPAEVTVCYEAGYFGYWLHDEVEKWGGQCAVIAPSLIPQASGNRVKTDPKDSFKLAHLLSKELLKPIYVPAADKRAERQLLRTRTDFVEDRHRVQCRIKSFLTLNGIEAPEDRDWSVAFVEKLKSLRMPHPLEHYCLAAYLKQYEDLKELIKGVDQQLRQLAKSERYQNSVALLKSAPGIGTLTAMEFLLEIEDIHRFTSGERLAAYIGLTPSQYSSGEHTRLGRITKGGKSHLRGTLVEAAWSAIRQDQNLKTKYERIKMRAGAKRAIVAIARNVVVRLRVLLLTQQKYQYPEEPNTLNDAA

SEQ ID NO: 515675 - protein, 415 aa, unidentified
MSKDQEFAALMSLDWADKGHRGCIGINDLEEVEDFKLEQKASAIQEWAGQLRLRFKGKKIAVAVEQKRGPLIYALMKYEMFVIFPLNTTAVKNYRKALRASGAKDDPSDARLQLLFLRNHMDQLRRIEPDSTMTRKLRMLVEGRRKMVDASTALSNQITALLKEYYPIALELIGQLKTPLACDLLSKWPCLEAIKSVKPEDLKDFYYKRNCRNKKAVEMRVKLVWEALPLIDEKGIAATYSFVLRSLVAQMRVLLKQVKKYDCRIQKTFNHHRDAYIYRSLPAAGPALEPRLAVVFGEDRNKFDNAAAVANLMGVSPVTISSGKYRFVAFRMSAPKFARQSLVEFAEVSIRQSVWGLAYYQKCRNEGKSHNAAVRALAYKWIRIIYRCWKNRLPYDESIYLAALKRKKVPWLQAS

SEQ ID NO: 515676 - protein, 338 aa, unidentified
MEVYGGIDLHSNNQVVALVDAAGELVYRRRLGNELEKVVTELAPYRERLVGVAVESTFNWYWLVDGLQEAGHRVHLANPAAMRQYSGLKHGDDDSDAEWLAQMLRLGLLREGYIYPKAERGVRDLLRQRGRLVQQRTAQVLSIQNQVQRSTGRRLSGTSIKAASAEEAAGWVAEREVALSLTANLEVMRCVDQQVAVLEKAVLRRVKERPEYAGMQTVPGVGKILALTVVLETGDIRRFAAVGNYSSYCRCVGTQRISNGKRKGKGNAKNGNRYLAWAFIEAAHFAVRYCETIRRFQQRKEARTHPLVALKTVAHKLARASYYILRDGVSFELAKSFG

SEQ ID NO: 515677 - protein, 372 aa, unidentified
MNYNTVYVGMDVHKESFTLCSCKYEDEKASHYQRTPASYKNVLRYLAFLRTIYGEDTRFVCGYEAGCLGYSLYHQLENFNVECVILAPTTMLEQRSKRRIKTDKRDAEIIARSLAQHNYSPVHIPTETDNQTKEFIRMRDDHKAELKKIKQQILSFCLRQGYQYDGSGNWTAKHVKWLRSLKTEGLYKEILDEYLLTYTILTDKLNRLDQRIEELASKEEYTESVSKLTCFLGIKTHTALSVIVEVGDFQRFVSARKFAGYLGLVPGQHSSGDDRNGLGITKAGNTHVRRLLVESAQSYTRGKIGYKSRVLRSRQAGNSPQIINYADRANERLRRRYYQMVLKDGKKYNIAKIAVARELACFIWGMMTDNIY

SEQ ID NO: 515678 - protein, 416 aa, unidentified
MIRETRFERHRKRTRYSRNSCVKSRRSLLLWEAFVDWADAHHDVMVSDDAGRKVGGRRVTHTPEGLTELNAFLLSITGPERKEELACIIETTHGLLIASLLEAGYAVYPVNPKTVEHRRGAAGAKTDQIDAYLLAKHGRSEFADLRRLEPDSPIIAELKALARDQDSLIHSQTRLVNQLTAWRVTYYPVALHLFTKLQQPTTLAFLQRYPTPHVAQAASVEQVAQVLKQAGHPTPDKSAANIVETLHHPHLTADDVTTRTKSRLMLVLVRHLQPLLEEIAVYEKQITRLFLTQEDNEVFSSLPRAGKRLAPRLLAEIGDDRQRYADAASVQALAGTSPVPYESGNYSKPRRRLACMKPLRNALSQFAWQSTHTEAWAAEYSQRKRTEGKSHSVAVRALAHLWVRIVRHVGAYEIPA

SEQ ID NO: 515679 - protein, 374 aa, unidentified
MEKITRYVGLDVHGEMIAAAVGEGHGRVRSLGQFPNRPEAVRKFIEQLGGASGLKVCYEAGPTGYALYWQLTKMGVACDVVAPSLIPRKPGEKIKTDRRDAERLAECYQSGTLTSVWVPDAAHEALRDLVRARAAAKADESRAKHRLVKYLLRNGLRHADNSRSWTAPWWRWVRALEFEFEPQKVTLDEHVAEVLHQTDRLARFDAAIDRAIEKAPPGKRAVVEALQALRGVARLTAVTIVTEVGTFQRFRRPSELMGYTGLVPSEYSSGRRQARGGITRTGNAHLRHVLGEAAWHARHRPWLNVRLKKVLPTLPPGVSEIAWKAQERLHRKFTRLTFQRKPAGKVATAVAREFVGFIWAIGRLVEDRNVAGPA

SEQ ID NO: 515680 - protein, 336 aa, unidentified
MKKNEFRNFVGIDVSKLTLDAVFIFDKEMNKAVHHQFSNDEKGIKKLIGVLKKQKGVDVDNTLVCMENTGIYGKRLSLILFEMQWFVWVETPVAIFRSMGLQRGKNDKVDAKRIALYAMKNQEQAKAWEAPRKEIAALRQLLNTREALIKAFKGLSVSIKEYKETGNKELSEMMKVSTSNTIKGIKKDIQKIEESIDEIIKNDSSLSNLYKLTTSIPGIGKITSTELICYTNEFKNYTDAKKLACYCGVVPFEHSSGTSVRGRTRVSHMANKPLKTKLHLCAIVAMQHDPELKNYYQRKVKEGKNKMSVINAIRNKLVHRVTAVIKRQTPFVKMAA

SEQ ID NO: 515681 - protein, 335 aa, unidentified
MSGKKKNEAAPGWPAGRLYLGFDVAKAEVAVAAVAADAIGSGPVRARRIANTAQALAAFLAEIGPGRIALAAFEPTGGYERELRAALKAAGVRFARVHPNEIVAFRTLRGIKAKTDDLDAGLIAAFAAEELTRRGIRPMVETDEALGDLIARRRQLSAQRHAEICRAKIATQPTVKASLALVVEVLDGALADIQAAIDLHIESRPALRAIAGNLRSLKGIGPVSAATLLGDLPELGSLSGKEIAALVGLAPRTADSGKTKGKARTGHGRPAVRNVLFNAARIAIRHNRVMHDFYQRLVEQNGRSGKIALVAVMRKMLVTLNAIARDNQPWRHQNA

SEQ ID NO: 515682 - protein, 410 aa, unidentified
MSENVLGVDMDSKGFQCVLIDPGTNKSVKRKYLNMERTLMSFLSWIKNNDSPIICIEGKNGYSLPLESFLHENKYPFYSISSKQVKKFRESFVSENKDNEKDAEAVARLGLALYQQNQLDAYRAIADDKTLIEIRQFSRIEQKETERRTESVNVLWHSIHYASSELYLFLKGFNPDSNNENNIIQNKGILNLLADRPDLTEWKNLSYEDIFNSMGGQKYKGRDALAKSLMEIAPNIKSISPSIKTAIRLYANQIKAQDKVISELEKEQERLSEGDTIIEDMIKYKGIGCKTASAIRGEIMNPLRFKNDDHLASYAGFGMKKVATGNTVKMVPNSSYNRRLKNAFMTAAKNLIAHGQRDGGDKHLCAYFRDLKKNQKLNPTEAYKRVARSWLRITQRRWKVAIKRRESEMA

SEQ ID NO: 515683 - protein, 434 aa, unidentified
MRPNAGGIDVGATEIFVAVPADRDTDSVRSFPTFTQDLHELADWLQQCRVDTVAMESTGVYWIPLFQILEARGIEVHLVNAQHVHHVPGRKSDVLDCQWLQYLHSVGLLRASFRPEHAVCEIRSLMRHRQNLVEMACVHVQHMHKSLDQMNLQIHHVISDITGVTGLAIVDAIVAGITNPKELAKLRDYRIKASEETVTKSLVGDYRREHIFTLKQSLTAYRYYQQLIADCDQEIQQRIESFHPKPDDSAGAAAAGLSDSTPTSSTFDLHSHLERIFGVDLTRIPGFECLRIQTIFSELGVDLLSKFETDERFCSWLNLCPKDGTSAGRRIRAPKIKTKNRVTQELRLAAQSLHHNRSYLGDYYRSERARHGAVRAIKSTAHKLARILFHVVTTRQPYDETVFAKLEARNQKRRLHKLQSMAKQMGYSLVQAHA

SEQ ID NO: 515684 - protein, 354 aa, unidentified
MQSQIIASPKLFIGMDIHKKSWSVHLRTDLFDHKGFTMPPQPQTLVDYVSTHFDGHEVSLTYEAGCCGFSAARHFLSMGWQVKVVNPSDVPRSDKQQYQKTDKLDCRNLCKQLQQDQLHGIYVPTEPEEQLRSLLRQRNQVVKQLRTIKSHIKGLLLFHGIHLPEQFDNPNWSKDFIAWLRDIPWSQSTGAASMQSKLRILELLNKEYLQTSNELRAWCRKNQGKDYYLLKSIPGIGGLVAAAILAEMGNIRRFNNEREFSNCIGLVPAIHQSSETDIKKGITPRCKALLRSYLIESAWVAIRTDPEIQAYYRKHVGKNPKNVIVKVAHKMCRRILSVIKNERPYQISYSKTVK

SEQ ID NO: 515685 - protein, 342 aa, unidentified
MKFYCGIDLSARDCHVCVIDEQLKVVVQQKLRNELPKICQLLEPYQGNLKIVVESTFNWYWLIDGLQAASFEVVLAHTLGLYLITGAKVKTDRRDAYALAKLLLVGAVPAAYIYPVETRPVRDLLRRRLHLVQVRAGEYGSLRRLLLRQGVLSSKQQEIKTATEAELEQWFTHPLVRLHASQELQRIELYSEQIAELENTILGLAKTERSYELLLKLPGVGQTIALTILYEVGELTRFASVKDFSSYCRVVPGIAQSGNVTGRGRGSKQGNHYLKAAFSQAAVHAVRCYPKVRRCYERQLKRHQGRGRQMICYNIIAHKLAQAAFHVLKEQTEYREELLFGR

SEQ ID NO: 515686 - protein, 418 aa, unidentified
MTATHSIPSTVLVAIDISKHRHEVLIGVPGKKRRRRMTIMNTLEDFQRLSAALVSYGLPVRIGFEATGNYHRPLAHHLGQAGFDLKLVSSVGLARTREALHNSWDKNDPKDAQVILHMLEIGAVQFFHDPLVVGTADIQELSKTHEIVSRSKTELWHRILTHYLPLYFPEAERFHRSSRTDWFLAFLEKYPTPTMITAMSRDAFIADAWQVVGKKVSKERLLSDIYATAVNSVGLPVGPDSDAVRMFRLVLAEGRSLVRQRNEIEARAVELLSDLPDYQLLTTIPGIGPINAMTILAEAGDLRRFRHHRQFLKFCGMDLATVQSGMFRGQSRISKYGNARLRRTLWMAGQTAVLTKTNSFRDKFERYISKDRHNAHLRRKAYTAIAAKMARTVHAVVNHGEPYRPFFEGVSPGGRTSL

SEQ ID NO: 515687 - protein, 365 aa, unidentified
MTIVDAVRPVTGGVDARLDLNVAPCPVTGGVDTHLDVNVAAALDPVGGLLGVAEFPTTLAGHRELLGWLSGFGPVARVGVEGTGSYGAGVARFLRASGVEIVEVDRPNRQARRRSGKSDPLDAVEAARAALSGRASGAAKSRDGNVEAIRALVVAKRSARSAKIQALNQIRHLSFTAPEQLRQRLAGVSRHHLAAHAAGLRPATGAGADPVITATKTALRILGRRVLALDEEKAGIDALLSALVTQTAPQLLAVFGVGVDTAAALLVTAGDNPGRLRSEAAWAHLCGTAPIPASSGKVTRYRLNRGGDRQANCALWGIVITRLGNDPRTKAYMARRLAEGRSKPEVIRILKRYVAREVYHRLPRP

SEQ ID NO: 515688 - protein, 310 aa, unidentified
MDIIAVGIDVSKDRLDVALRPSGEIFAVERNASGLDRLIERLRQLAPRIVALEATGGFETVAAAALASASLPVVVVNPVQIRAFAKALGQRAKTDPIDAAVIAHFAEATRPEPRPLPDEATRLLADLVARRRQIIEMIGAERQREKRTSMPRLRKSIGRVVGMLEKELAGLDADMDDAVRGSPAWREKEDLLASVPGIGTTIARTLIADLPELGTLSRKQVAALAGLAPFARQSGQWRGRSFIGGGRASVRTALFMGALVAMRHNPVLKGFFERLRSAGKPKMVALIAVARKLLTILNAMVRDNKRWQNA

SEQ ID NO: 515689 - protein, 318 aa, unidentified
MTVLADRVDGVIGVDTHRDTLTAAAVSAVGGLLGQLAVAADAAGYRRLLDFACANIPGRRCFAVEGAGSYGAGLARMLVEHGEWVVEVDRPKRPVRRGGKSDALDAVRAAREALAQERLTAPRRRGDREALRVLMATRQGAVTARTCAINQLKALIVGAPEELRAELRVQLLATEAADLEVEIVKLVRAMASWLLELPGVGPFSAAQVLVSWSHAGRVRSEAAFAALAGASPIPASSGQVTRHRLNRGGDRRLNRALHTVALVRLHDDPRTRAYAARRQAEGKSGREIRRCVKRAVARQLFKLLERYDRSAVEVIKVA

SEQ ID NO: 515690 - protein, 346 aa, unidentified
MTIVGGFDVHREQITFDYVDGDGLVHWGRIRPATRRTLRRWLAEHCPDGAGEFALEGCTGWRYVCEELAAAGLDVHLGDPAEIAALRGPKKRAKTDRADAQLLRTLLLEGRFPESWIPPAHVVETRILGRLYCRLMDERRSWQQRIHAQLFQQGCPPVRALLTEAGREALTRVELSTAGHHYVDAALRRIDDLTRQIVPLRAQLVTFAHRQAGCRALQASQYGIGWLSAAIMWAEIGDARRFHNSDQLVRFAGLDITVYSSADHRAAGHLSRQGSPELRWAAFEAAKCAARPASPDHAYYQQVTARKDGKRPTLAVERKVLRRSYHRLRELGDAALTEPDPIDQAA

SEQ ID NO: 515691 - protein, 353 aa, unidentified
MAVYIGVDLHVRTQTVCWMNTADGEIHQHTLDHRRDDVRAFYAQFTAPAVVGIESSGYALWFHQLIEQAGHRLLVGDAYAIRQFARRRQKNDRRDAELLLDLLRREEFPVVHRPAPPSQDTLALLRYRHRLVRMRTMVKNGLQAVALNHQLRLGFRLFTVRGQQRFAALPLSGAYATQRQQSQVLLTTLEAQIAAVNQELATRAAADARVVRLRTHPGVGLQTALAVVHTLEPVTRFDRARRIAAYCGLDPSEHSSGDTTRYGHISKQGNRLLRFLLVEAAWSAVQHEEDLGRFFRRLRARKKPHAVAVVAVARKLVLRLYRMLQEGIDYEEFRRRGRDARRARKWTSPAQRG

SEQ ID NO: 515692 - protein, 341 aa, unidentified
MKNLFIGVDFSKEKVDVAIIFADGLTETAARVFNEFKTTVSGYKQLVKWVEQNSYGIDSSLWLFCGENTGDYSKGLCNFLYGKGYDMWLENAKSIKDASGLRRLKSDRADASMIAEYAMRNYDKAIMYEPLSESLAQLRELFLYRQMVVRHRCSFQVRRGEKRLTMEKSPIKTMISQSGRHIVSELNKEVEKIDKRIAELIKSDEELTEVFTIVTSVPGIGTQNAVCLMVYTDNFRRFNYDSRKIACYYGIAPFGKDSGTSVHSDPRVHYMANRQIKAMLTQAALAAVNFNPIMARYYMRLVERGKKKQVALNNVKNKLVHLITAMVRNRQLFTTEYKITA

SEQ ID NO: 515693 - protein, 415 aa, unidentified
MALKIVYKICCGIDVHKTFVVACIASTNDKGVTSYESHRFSTYTSGLKTLLQWLLDRNCKDVCMESTGKYWIPVYNILEQDCSIVLAHPKYVKAIRGKKTDKKDAKWIADLFKHDLVAGSFMPPADIRQLRNLMRYRFKLTCFKSSEKNRLQNCLTVSNIQLGNVVSDTFGKSAQAILDKLLENPADTSFDLEPLVYKSLKKKLPELRDAIDGYITPEQAGKLKVIKSHYENLEARKAELEELILALAAPYQQELTILQTAPGISSEFTAIGIISEIGTNMEAFPSAKHLCSWAGLTPTSNESAGKKKSVRVSKAGCYIKPLLVQCANAVVTSKKHPEMRNRYLRLKKRRGHKKAIIAIARMLLTALYHMLKNGENYNAELYQKSDLPPFNREITIEQALMIARNQGYKIKSATT

SEQ ID NO: 515694 - protein, 348 aa, unidentified
MTTMVEDARVITGGVDTHAGMHVAAALDSIGGLLGVQEFPATAAGYASLLSWLRSFGTLAVAGVEGTGSYGAGLARHLAAAGVRVVEVDRPDRQDRARQGKSDPLDAVSAARAALSGRASGAPRGRDGAVEAIRALMVAKRSARAERTQAVNQARALIMTGPEELRARFAGHSTAALAAAIAALRPRPGDVPGYATRVALRELGRRVRFLDAQLGRLNELIGPLVSARAPGLLALHGVGPDTAALLLVAAGDHPERLRSESSWAHLCGVAPVPASSGKTAGRYRLNRGGDRQANSALWRIVIVRMNSHPATRAYADRRSEEGLSKKEIIRCLKRYVAREVYRQLRDGA

SEQ ID NO: 515695 - protein, 400 aa, unidentified
MSLDRPFAETAAIRSELGAIFISLELSRSTWLMTSLSPGAGEKLSKREIKAGDVSALLARLAELRHKALARTGTSHPIIVIQEAGLDGFWLHRVLQEEGCESHVVDPASIAAPRRRRRAKTDRIDGEALLRALLAYKRGEPRVCSMVRPPTPEAEDERRICRERAELIGERVRHVNRIKGLLFSQGVRDYEPLRRDRRKRLLELRTGDGRPLGPHLKAQIERELDRLELLLEQVKTVEGARDRLLDRLVESRSQDATAPAEAQPSPVALLLSLNGVGPEFAASLWTEGLCRSFANRREAGAYPGLTPTPWRSGKIEHEQGVSKTGNARLRTKMLQLAWLWLQHQPKSALAQWFHRRLPGMTGKAARKRLIVALARKLFVALWKFTSAGVVIEGAVMKTTA

SEQ ID NO: 515696 - protein, 341 aa, unidentified
MKLTTIGIDLAKNVFQVHGADDKGRAVLKKQLKRAQMLPFFANLPPCRIGLEACGSAHYWARKLQALGHTVQLIAPQYVKPFVKRNKNDAADAAAICEAMTRPDIPTVPIKNAEQQAILSVHRARQGFVKARTAQANQIRGLLAEYGIVLPQGMSHVVRRVPEIIEDGERDLPGSFRLLIERLLDHLKELDRQVGELEAAIQSWHRQDTASQKLARVPGLGPLTASAMAASIGDARNFKNGRQLAAWLGIVPKQHSTGGKPTLLGISKRGDAYLRTLLIHGARAVIRRAEHKPDADPWLKSLLARRNTNVAAVALANRNARTIWALLAHDREYQPDYRMAA

SEQ ID NO: 515697 - protein, 337 aa, unidentified
MEQQQQYVGIDLHRRRSVIVRRNEAGQTLDTVRIDNHPVALAAELAKAGEHPEVILEATYGWYWAADVLEECGAKVHLAHPLGNNWGHRRVKNDERDATDLVDLLRLGRLAEAWIAPPPLRELRELIRYRGKLVHLRTSLKSQVHAVLAKEGVTVPMSDLFGVGGQVLLDEVRLADAYRVRVESLRKLIEHVNREITMLEAQTAPYFAGDLGYHTVQAIPGVGPVLAAIFVAEIGDISRFTSARHLCSWAGLTPTHHESDEKVRRGHITKQGSRLVRWAAVEAVARQRADTPIRRHHHSVGERRGTQIGRVAAARKLLILVYYGLRDGEIRCLAETG

SEQ ID NO: 515698 - protein, 343 aa, unidentified
MNKKQFQYFIGIDIAAQTFAASIFVDPETPVLTQENFENTTQGFFEFEHWLNEQHVSKQNSLFCLEACGIYSEAFAHYFYAAEYTVCLEHALKVKKAFKLSEHKTDAVDSKQIAEYAFRFTDQLLSWQPRSAIMEKIQHIVTAREQFIKQRTALQNELTAYKRHIVQVKLIITTHEKHIKDLTKSIKLLEKELTKMIDHDDTIRHQTLLLKSAPGFGLLLSTVMLITQHQLGESVSYKTISSYLGLCPFKYESGTSVKKRAKSRGYGPSIARKLLRLAAQSAVTHNEKYRYYYQRKLAEGKAKALVLNNVANKMIKVACALLKNNKPYIQNYVSINPNNIKVA

SEQ ID NO: 515699 - protein, 349 aa, unidentified
MTSMTDQITGGVDTHLDVHVAAALNQLGALLGTRSFPATTRGYRQLLAWLRGFGELVLVGVEGTGSNGAGLTRLLLSESVRVVEVDRPNRQVRRRRGKSDTVDAVAAARAAQSGDANGEAKTRNGNVEMMRVLRLVKQSARRAKTAALNQMRSIVATGPEELRERMRDLPAAKLVAEAAALRPNGRNDVLGANKIALRHLARRAQSFDAEIADVNALLEPLVAATAPDLLACEGVGTDVASALLVAAGDNPQRLRSERSFAKLCGVAPLDASSGKQERHRLSRSGDRQANSALWRVVMTRIVYDPRTKIYIERRMKEGLSKREAMRCLKRYVARELYAQLPRESLVDSP

SEQ ID NO: 515700 - protein, 391 aa, unidentified
MSDSLNPVQSSSAHPNAASGATSPPGFACFVGVDLHKCSVNLDARSPDQQLISRVKLSTKCTLRLAQWLTALPQPIHLAVEACPFVEWFIDFVRPIIEAHGGRVDIADATELELRRGKRRKNDDNDAGQVALALCRGDCPLGYIADEQVMHLRKLGRHWRHLSRTISRAKHAMASIFHAANLAGPKRDSEAAQRWILAQGHLLKEASRNALANYIDLIALVERQRAVLRRQIIFANRSPRFAAMTELLKSIPGVDEIWACIIAAEIGDFGRFPNADTLEFWGGIVPKLEESAGRRSTGNITKAGSAALRWALCKAAVTLCQSDARWEAVRQRLIQRRGKKAIANVAMGRRLLRTIYAMMRDQQPFHVAQPTPRNRAANAARLRTRARKEAA

SEQ ID NO: 515701 - protein, 412 aa, unidentified
MDVVYTRCCGLDIHKKTVVACCILSTEGPEPVKEIRTFRTMTADLLALADWLQERGCTHVAMESTGVYWRPVYNVLEGQCELLVVNAQHIKAVPGRKTDVKDATWIAELLRHGLLRGSFIPSKPQRQLRELTRYRSTLVQEHARTLNRLQAVLEDANLKLASVVTDIYGVSARAMLAAILAGERDGEALADLARGRLRTKRDQLKDALEGRVTAPHSFLLTEHLSTLEYLDEAIARVGGEIDQRLTADQEAIALLDTIPGVGQRAAEILIAEIGTDMSRFSSAKHLASWAGMCPGNSESGGKRLSGKTRKGSRWLRQVLVEIAHVASKTKQTYLAAQYKRLAARRGKKRALMAVGHTILIIVYMILTRKQPYQDLGAAYFDQREQHRVERRLVQRLERLGYEVSLQPRALAS

SEQ ID NO: 515702 - protein, 411 aa, unidentified
MRVHHTVCCGIDVHKRSVTACLMWGPADREPQYEIRRFGTMTSELKTMVEWLKQRNCEIAAMESTGAYWKPVWNVLEGEMELVLANAKQVRSLPGEKTDNKDGKRLASYLRHGLIRSSFVPPRDIRELRDLTRYRQKLLANGAAERNRIQKVLEDANIKLGSVLSDVFGVSGQRMLQALVNQPTADVEQVAALAHWRLAPKIEQIKQALEGHVTSHHRFMIDLSLGHMQYIEQQILRLDEEIARHIEPYQKQFQLLQTIPGIGGNASAAVLAEIGPDMSPFDDDGKLASWSGICPGNNESAGKKFSSNTRKGNPHLVSTLVESAWASTHAKNCQFKSRYYRLRSRRGSQRAIVGVAHALLRTIYVVLKTGEPYQEPLRLALTQNRRSRKAERLTRELRHLGYEVTLKIKTA

SEQ ID NO: 515703 - protein, 354 aa, unidentified
MTTIIGCDFHPSFQQIAYVDAETGECDERRLCHREEAEQFYRSLAGKQVRVGVEAAGGLRWFRSLLHGLGHELLLGDASAIRASCPRRQKTDKRDAQHILSLLVEDRFPAIWQPGEENEELRQLMLHRFRMVQMRARVKNQLASIAKNEGVLSSRVWSTRHRKQIESLPLTGWYEQRRKDLLEMLDEFDRRITPLDKALADAAEQSPEARLLMTQTGVGPVVSLAYVLVIGDWTRFPRGKQVGSYLGLIPSEASSGKKQQHLGHISKQGNTMLRWLLVEAAIKAQRFDPSWHRQYLRLSINKHHGVTKVAIAHKLAVRLYWMLRSRKNYEQIRERGSHAGQSAIPRGSALTPTI

SEQ ID NO: 515704 - protein, 343 aa, unidentified
MEHYAGIDVSLESASVCVVDASGRIVREAKVASEPEALITWFGKLGVEVSRIGLEAGPLSQWLYAGMREAGLPVELLETRHVRDAFKAMPVKTDRNDARGIAQLMRLGWFRPVHCKSLPAQELRAVLTARKLVQGKRHDIEMSLRGILRGFGLKVGPTTPRSFEGRVRQLVEGHPTLLAIADALLLARATLAEQLGKLQKRLVSLARDDTRTRLLMSTPGVGVLVALTYVAAIDDPARFRSSKAAGAHFGLTPKKYQSGETDITGRISKIGDASVRTALYEAANVILTRPVKGSSLKSWAMRVAKRAGMRKAKVALARKLAVVLHRMLADGTQFAADKAAAAI

SEQ ID NO: 515705 - protein, 425 aa, unidentified
MKSRAYRAVDVNRVEPAAWLQGRDEAMVHAGLDVGKKSILCTLRWDGGDFDRPWRARNPTEVVRLAELLSAVGRGRRLIVALEPTGTYGDPLRQALERAGLAVHRVSPKNASDYAEVFDGVPSQHDGKDAAVVAELSAQGRSWPWPMPVPTEAEQELAYQVEWMDGQRRQMMLWCGRVEALLSRHWPEATRLLPLGSGTLLRVLAEYGGPRGLAAAADALQRVQGWGRHYLSAEKAQALVDSARQTMGVTMGRWEEERLRRYALQIQHCQGETRAARRRLRELTRDQAAIQGMGAVVGVPTACVLWVELGDPSAYHCGSAYRKAMGLNLAERSSGQWQGKLKISKRGSSKVRRWLYLAALRWLKEEPVRSWYLRQKAQRRGEGKAAVIGVMRKLALALYQVGGRGEVFDRKQLYRSLTTASAESV

SEQ ID NO: 515706 - protein, 350 aa, unidentified
MYFAGLDAHLKYVTVAVLDRLGTLVLETTVPTREPERLFAVLAPFRPLEVVVETCPFWPWLYDLLVPAGIRFHLAHAKRLRAIATAPQKNDRVDARLLARMLLSGLIPEAYPRPGDQRELLRLLRHRTTLVRSRTRLAGRIHSQLHQQRLMLPREKLLRQATRTWLRDTAWPRLTAEQQAIVTTHLELIDHLTPLIQALERRIATAAAANPTAALLATIPGIGPYRSLLLAAELMPPTRFPRVEHLASYAGLAPVTRSSGGHTRHGSIPQGANRWVRGALVSAIPSHVRAAPHSPVTRAYAQLTARLGWRVARVAAARKLLRIVYIMLRRGEPWRGAGRVEDDVRDEVHA

SEQ ID NO: 515707 - protein, 410 aa, unidentified
MDVVYPRCCGIDIHKKTAVACVIVSDTKGPPRKETRTFGTMTDDLLALADWLASEGVTHIAMESTGVYWKAPFNLLEGQFEVLLANAQHIKAVPGRKTDVKDAEWIADLLRHGLLKPSFVPDRPQRELRELTRYRTVLVRERAAEINRVQKTLEGANIKLGDVASDILGRSARQMLEGLVAGTAEPSTLAQFARGRMRQKIPQLERALAGRFAVHQRLLVAQQLAHIDYLDEAIDSLSAEVAERLAPFEATLERLDVIPGVGRRTAEILLSEIGTDMHRFPTAGHLASWAGMCPGHHESAGKQHNGKTRKGCQWLRAALIEAAAAAAKTKDTYLAAQYHRLVRRRGSDKATVAVGHSILVIVWHLLQHDCPYVDLGSTYFDERDRTATERRLVQRLEHLGYSVHLDRSAA

SEQ ID NO: 515708 - protein, 316 aa, unidentified
MKTNQTESAPVYAGIDISKDGLDVAVAGQSPSHYANTAKGIAELIPALAQLPAPVQVICEPSGGYERDLLEALWAKKIAVSLVNAARVRAFARARGLLAKTDAIDAVVLREYGELLRPAALAAPAPQRQRLAKLVRRREQLVNLLAMEEQQLAQSRAAEIKKLGTQLIKALQKQIEELDTLIAAQIDEDATLKEQSARLQQVKGVGPVTAATLLAELPELGQLEDKQIGALAGVVPYNQDSGQHRGRRLIRGGRVQVRRVLSMSALVATRFNPILKAFYQHLLKAGKPKKLALTAVMRKLIILLNRLLKNPQFKLA

SEQ ID NO: 515709 - protein, 403 aa, unidentified
MIYVGDDWAEDHHDVWVMDEQGRRLASTRVAEGPDGLTSFHHLLAEHAEDPELVVIGIETDTGLWVSALDAAGYQVYAINPMAASRYRDRHAVSGAKSDTGDAKVLADLVRTDRHNHRRLAADSTAVEAIKLLARAHQSLVWVRTRHSNVLRAGLRQYYPAALAAFPDLGHRDALAVLHRAPSPAQGAALSVSKITGLLKAAGRQRYIDARAREIHTALRTSQLGASDPVTAAFAATTSATVAVLIVLNTQIGELETQLADHFEKHPDADIYLSLPGLGVILGARVLGEFGDDPNRYTDAKSRKNYAATSPITVASGRKRAVLARYVKNRRLYDAIDAWAYASLRSSPGARAHYDQRRRAGDTHHQALRAVGNRLVGILHGCLRHHTHYDEHKAWAHRTATAA

SEQ ID NO: 515710 - protein, 345 aa, unidentified
MSIVGGLDIHRKQLTFDYLDTVTGEVRRGQIAPADRAHLRAWLVRFAGRDDVAFAVEGCTGWRYVAEELAAAGVAAHVGEPADTAAARGRKRHAKTDKTDSAHLRVLLAEGRLPECWVPPAQILEYRALLETYHDVRREHTAWVQRIHAVFFHQGAPALGEGALRTERGLAALREAAAAHLSPGGQLQVATALDMLAAVEARMEVLRTQLRYAARHLTGAKVLAARLYGVGPVTALALTCWLAGAGRFSSSRKAVRFAGLDITVWSSDRKGPPGRLSRQGPPVLRWALYEAGKTCARASAPDHAYYAAVKDRKNSKRAALSEARKIVRQACHILTEPGDDALTAA

SEQ ID NO: 515711 - protein, 402 aa, unidentified
MTRSVFVGLDWAYRSHAVCVIDAQGSVLKHLTISHDAQGLGELRHALAAFGKALPIAIERPSGLIVDALVEAGHQVFAIHPNAVKASRPRYRSTNAKSDAGDAFMLADLLRTDGHRWHALQPQSAAIRGLRARVRTRDDLVTTRVRLANPLTALLDAYWPGAACIFAAVDSPIALAFIEQWPTARKLTARQIAAFCKRHGYSGRRSAGVLLERLQAAAPSLCEPTLAQAHATAALALVAVLKPLSVQIKALDAHIAQAMTALPQAISVMSLPRAGCICAAQILAELGDVPERFASAQQLCSEAGVVPVTYESGKSRAVTFRWACNHRLRRAITCLADNSRHASPWAASVYNAARKRGCDHPHAVRILARAWTRVLWRIWTNGTLYDPAIHSSACRIEISQEG

SEQ ID NO: 515712 - protein, 360 aa, unidentified
MQAQNYELNFKGQSIYTGIDTHLKSWKVCILTEQLEHKCFTQPPEPKALYNYLTRNFPGATYYSVYESGFSGFWAHRELEALGIHNIVINAADVPTGQKERLHKTDARDSRKLARSLRGNELTAIYVPSLSTLEDRLLVRTRATIVKDLTRFKQRIKSLLYFLGITYPEQFSKSGSHWSKNFIQWLKEDVHFTEESARQAFNIMIQEVEEQRKLLLRITRHIRALSTTEKYTSNCHLLMSIPGIGVITAMTLLTEIETIERFESPDHFAGYVGLIPNNHSSGDIKRDGKMTSRGNSSLKKIIVEVAWIAARRDPALSLVYNKLVQRMEPNKAIIRIARKLLNRIYCVLNTKKEYVTGIVK

SEQ ID NO: 515713 - protein, 349 aa, unidentified
MRFYTKQHQFYCGIDLHARLLAVCIVDQTGAVVLQKQLPAEKQLLLNVLAPFRPDVVVAVECLFAWYWVADLCRDEKIPFVLGHALYMKAIHGGKAKNDDIDAEKIARLLKGGNIPVAYVYPKGLRETRDLLRRRMYLVRQRAALITHVQIVNAQYNLPEFSKKLIYAKNRAELKIAERFDNPQLRKSVEVDLALIDALDERIAEVELHLERTAKVEDPQTFHLLKTIGGVGKILGLTLLYEIHDIKRFPDVGEFLSYARLVRCRHESAGKKLGSGGHKIGNAHLKWAFSEAVCLLVRHFPAVKIWQARHEKKHGKKKTLGILAARLGRTVYHMWRKREAFDVKRFLGQ

SEQ ID NO: 515714 - protein, 340 aa, unidentified
MRKYIRIGVDIAKNCFQVHALESEDCSATKRRLSRSGIVKFLAEVEPCKIGMEACGSAHYWARRFRAMGHEVKFTPPIYVKPYVKRGKNDAADAAAICEAMSRPNMRFVAVKSEDQQATLMAHKTRELLIKQRTMSVNALRGHLAEFGVIAAKGISHVEELVERAAAADLPAMVQATLGVLLAQLRSLDAAIDELERAIVADHRRDPVSRLAASVPGVGALAASAILASAPDPQAFKSGRDFAAWLGATPKQNSTGGKEKFGSITKQGNRYIRRLLVLGAISVLRAAPKRKGALCDWLAALRARKPAKVVAVALANKLARIVWAIITTGEVFRTSIYAKA

SEQ ID NO: 515715 - protein, 344 aa, unidentified
MEYYAGLDVSLRSCALCIVDSKGTVLFERELPCEVSDIAECLVEFPHPIERVGFEAGSMSQHLFFGLTAEGFDVVCMEARQVSAALSAMRNKTDKTDARGIAQILRTGWFSPVHMKSREAHGLRALLSTRKALLKKTMDLANEVRGLLKIFGVRLPKTVKHGSFDSVVRPMIEIDDVLAHALVPLLDARVVLYQHYLELDRRVKRAASHDDVCMKLMTIPGVGPIAALSFKSAVDDPTRFKRSRTVGAYFGLTPRRYQSGEHDNPGRISKAGDRDVRAVLYAAANALLMRTMASSQVKSWGMRLMRTKGRRRAVVAVARKLAILMHRMWIDGSEFRQDQVGGMA

SEQ ID NO: 515716 - protein, 411 aa, unidentified
MIKENYIYVGIDLHKETHTAVMIDCYNQKLGEITFPNRPAAFPKLVTKVKKCNTDGKEVVYGLENAYGYGRALAVWLIDKGYLVKDVNTAISHRQAKHRGAMYRKSDSDDAKAIALATLNMLDKLPDACPNDAYWSLGQLVHRRDNIMKQRTRLVNQLHEQLCIAYPSYKQFFNDISRPTALYFWEHYPSRKYLKGKSVEDLRAELVPVSHNKCSTKTCEKILDAVASDKVKNNAYQDARDMVTLSIVSDLQHYDSQLAEVDKMLEQMYKMLGCTLTTIPGVNVITAVKILAEIGDIKRFSNANKLAQFAGIAPLHLSSSGKGKDVATKQGNRRLQATIYFLAIQMVQVSSKGTPRNSVVRAYYEKRKAEGKTSQQALICISRRLISVIYGMLKNGTEYRMPVVENAGEKL

SEQ ID NO: 515717 - protein, 331 aa, unidentified
MTITTMPSNGERFNRVIAFEVSKADLVVYCAPQDVSSTIPNTKSAVRRYLKKQTRTKPGPEVSDLLVVCEATGGYERFVLEAAAELGLACHRAHGSRVRAYARYRGTHAKSDAIDARLLADYGLHGENLKLYQPPSPAQDRLRALLGRRTELRRAMEAEQCRLDHALDKDIAHSIKALIAVLQRLLAGIEAKIVLLMKEDADLAEKARLLQGVKGIGPITAATLLGYVPELGSLSRGAAAALLGVAPFDRDSGKIKGKRHIFAGRGEARSCLYMAAISAMRYNPKFKEFATRLKQRGKPFKLVAAATMRKLATVVNAMLRTGTPKTAQTLA

SEQ ID NO: 515718 - protein, 430 aa, unidentified
MKSNTQNAKIEAITEKTLVLGIDVGSETHYARAFDYRGIEYSKKPFKFSNTEAGFATFKEWILDLKERHEKDKVVPGMEPTGHYWFNLGKFLQDNEMKPVLVNPHHVKKSKELDDNNPTKNDRKDPKVIAGLVREGRYMIPYLPDGVYADLRTASNIRFQLQVELTRIQNRISRWFNIYFPEYKTVYGKPDAKSGMLILKAAPLPEDILTLGIDGVNQIWRDAKLRAVGKARAKTLIEAAEHSVGSKEGAVSARMEIRMLLEDYESRNIRLQEVMTLIEGLVKQIPMAEKLLEIKGVGIKTVSGFLAEVGNISRFNTPKELQKLAGLALVESSSGKHKGETTISRRGRKRLRYLLFEVAMSLVAKNPEFRELHNYYTTRRLNPLKKMQSLMAIAAKLIRVFYAMLTKGVDYDPKKMVSDIKRPAVYLQAA

SEQ ID NO: 515719 - protein, 371 aa, unidentified
MNSIVYVGMDVHKEQYTLCCYSYDTDKVEYKQTIPSDYKLVLKYMEQVRSRYEGEVSFVCGYEAGCLGYSLYQQLKDHAVDCKILAPSTMAVTNTHHVKTDKRDAANIARCLAFHTYSEVYVPDNDDNDVKEYIRMRDDQKLYLKKVKQQILAFILRKGKRFEGGKTYWTIAHLKWLKTLELSDLQREALDEYLLTYEYLTEKISRFDERIEELASVERYEEKVKHMSCLLGIKTHTALSMIVEVGDFERFEKAPKFASFLGLVPSEDSSDTRVNRYSITKAGNSHLRRLLVEAAQSYTRGNVGHKSAALKQRQKGNPPEVIAYADKANERLRRRFYKMTLNKGVNRNVAATAIARELACYIWGMMTEPVS

SEQ ID NO: 515720 - protein, 336 aa, unidentified
MPEIPRSRTVDRVNQTRIAQGRDKRGEMNQVYAGIDVSKEFLDVAVLPSDERKRYSNDEAGIGELTARLKKLSSALVVMEPTGGLEMPLAAALTLEGVKTAVVNARQVRDYARATGKLAKTDKIDALVMAEFASAIKPPIREFRDEATAEIKSIMSRRRQLLEMLTAEKNRLAIAHKSLKTKILSHIEWLKKEIADLDNDLRQRIEDSPIWRVKDNLLQSIPGVGKVLSATLLAELPELGKLNRRQIAALVGVAPYNRDSGKMRGKRSIWGGRASVRSVLYMATLVSTRFNPVISSFYQRLLEKGKVKKIALVACMRRLLTIMNAILKSQKAWCYV

SEQ ID NO: 515721 - protein, 315 aa, unidentified
MSGTMTWVGLDVHARSTQAAAIDALTGELSRVRFGAGIDAPLAWMAQLPGPVRACYEAGPTGFGLYRAAVGAGIAMQVVAPGKTPRGPSDRVKTDRKDAELLARLLLAGSLTRVVVPPPEVEAARELTRAHDACRRDLMTARHRVSKMLLRHGRVYPKSTTWTAEHRRWLSRQYFDHAASDLVFADLLAAVDGLSARKAAIALRLSQLATDEQWWPTVARSRCFRGIDTLTAFSLHLELGADWRRFEHAPSLSAWLGLTPSLNQSGESSRQGPITKTGSMLARRLLVDRRGTTAARHTSARRSPTARSDSLTTSW

SEQ ID NO: 515722 - protein, 322 aa, unidentified
MQANAILGVDISKKKFDACLLVGSKERHKVFYNNQEGFEKLVVWCNNHRADFIHLCLEATGCYSEGLVTFMYDLGHNVSMINPAQIKAFGKSELLRNKTDKSDAAMIARFCIANKPDLWKPISPEVSCLRELYRCLQALKDDKLQQINRLENKNMYSSCKQAILEVIATIDKQITALEKEINEHINNHSHLKNMIENIKTIKGIGHITAIAVVAEMPSVDNFDNARQFAAFAGLNPEHYQSGSSVNRKSRVCKIGSERIQKALYMPAIVVKNRNSHFQKFCQRLASKGKCPMVIIVALMRKLMHVFFGILKNNQPFNGGLVK

SEQ ID NO: 515723 - protein, 431 aa, unidentified
MKQERKPYLSVGIDIGADFSLMAIALPTQEIVGKSYKILHSSTRSVQGAVDRILALCQTHNLPARVYMESTSIYHLPLYYRLKEAGLEVFVLNPIVTHANQNTNIRNIHNDKLDARRIALLGLRPDLKTSLIPEDEIAAVKALLREYHVMKKETSTYICRLKNQLRQIFPQYLPLFSKVNGKASLEVLSHCPSPNAVLSAGADELIKLIQEASGKGEAMARKKAENLLTAAEEALSFGHGNSGITFLIGHYVEMIRILAEKTVAILKQTKRYLQERPDSLLARQTKLLESIPGAGFLTAVTIVCEIGDFSAFRRPKQLYSYFGLDPVVRQSGNSTGTNLRISKRGSPYARRCFYILALQSISLRKNGEPKNPVLRAYYQEKCKCKAKMTALGAVMHKLCNIVFAVLRDEQPFILISSQEHRQNYLSMRKAA

SEQ ID NO: 515724 - protein, 364 aa, unidentified
MLYSGIDLHRRLIVICTMNDAGAVVARTKMKTEPDAVVTYFRQWSEPHHAVVECTSNWYWLCDLLRSLGIVVVLAHAKYLKAISYAKVKTDAIDAHTLAQLLRMGFVPEAHQLPPEYRAMRDLLRQRMVMEHKRTNLMLHMTSMLAKFNIIDLPVGPSQSGFADFLTECTIPEQYRMTLLMYHQQCLVVTDHKKQLEHYFKAQLRPTATLQLLVSIPGVGDITGAIIAMETGDVHRFADAKHYCSYCRLAPGAKDSGGKHSHRSGSKDGNQYLKYAFTEAAIKAMMFYPDIKRFAVQLERRSNTTIARTVVAKELARIVYYILARQQPFETFKGIKVTKRHDWPRTCKPVRITGVPTHRELLTA

SEQ ID NO: 515725 - protein, 369 aa, unidentified
MDERITSFIGLDAHAESNAIGVADAGQMTTPRFLGTVGAKFSELTKALGKVGKAGELRIVYEAGPCGFAMVRQLREAGYHCEVVAPSKIPRKPGDRVKTDRRDALTLAGLARAGQLTFVTVPDERDEAMRDLSRARTDAVRARLKARQQLKAMLLRHDRRYTGKTSWTAAHERYLSEISFDHRAQDVAFVEYRRAIGEAHTRVGLLTAALSQELEQWRMRPLVRALMTLRGIDEVGATSLVAELGELKRFAHAPDLMGYVGLVPSEYSSGQKRSLGAITKTGNGQARRILIEAAWNYRFPARISLPLQKRQEGQPAAIREIAWKAQLRLAHRYRRLTARGLQHNKVCVAIARELTGFVWSIGQQVTIGA

SEQ ID NO: 515726 - protein, 408 aa, unidentified
MEVLYGKCAGLDVHKDTVVACIRIQEGPQASYRVQTFGTTTQALLKLSEWLVEYSVTHVAMEATGVYWKPVWHILDGEFELVLANAMHIKNVPGRKTDVKDAQWIADLLAHGLIRSSFVPPTAIQDMRLLMRTRKQLVRERGQHVQRIQKTLEDANIKIASVVSDITGVSGQAILRAIIEGETDPDQLVAVTTGRLKAGADTLREALRGRIRQPHRLLLKLHLDQIDGIEKSIADLDREVGALLDPFRAKSKRLTTIPGVSDVVAQVIISEIGTDMSRFPTAAHLISWAGLCPRNDESAGRRRSNRLRSGALWLKTTLIQAGWAAARSKSGYLPAQFRRIQSRRGPRKAVVAVTASMLKAAYYILRDDVDYRDLGAAHFDSVDREKVAARLIKRLTTLGVNVQVLETA

SEQ ID NO: 515727 - protein, 458 aa, unidentified
MEGKNVPNKNRKRQSRLLQTVQPDAAGIDLGSREHWVACPALPDGLPNVERFGTTTPELLRLADWLKQQHIATVAMESTGVYWVPLFEILDSRGFEVHLVNARQISRVPGRKTDMLDCQWLQLLHACGLLRGSFRPGDDICQLRALIRERNTIVDQRSDWLRRMQKSLDQMNICVHHAVSDISGVTGMAIIRAIVEGERDPRALARLRDRRCQKTEAQIAEELTGNWRPEHLFNLGQALKVYDQLSAVIADYDTEILKCIDSLQSPASKDSSAPPPASKGKANKLLKQGQEPFRQALYRMSGIDLTTIDGIGVNTAGVVLSELGPDLSAFPDEAHFVSYLRLAPNISISAGKKVPGKFKAVTSTRVSNALRMAATTLRNSKTALGAYYRRISWRKGAKVAVFATARKLAQLVYRLLRHGQAYVDEGAAGYEARWNQRRLKSYTKALNEMGYKVELLTA

SEQ ID NO: 515728 - protein, 414 aa, unidentified
MEGEINKSCGLDIHKHFFIATILSRSGEKQQQRFARDDDGILNLKNWVTSEKCDVVACESTSDFWVPIYGALTDHLPVIVGNARDMKAFTHKKTDKIDSEVIAQLALNKMIQPSRVFPKRHREFRSYVRLRLTLVRKRTDIKNESHAILSSEMLHLGDVLTDIFGKNGRAILAGISSGKNVDQIIEYLSPNVRKKAVQIRDILDREISQSAAIRLQICLNLIKHLDDEIETLEREIFNYAYQKHKREMEILMSVPGIGELGAATLIAEIGSFSDFPTGDKLASWLGIVPNVYQSADKYHNGRITKRGSKVARWILTQIAQAAARKKNSRLKEFFNRKKKSIGYAKAIIALARKIATIIWHLITKDEMYQDETGYEKGEVQKRKIVETEIFSVDERITIISGIIAIMGKKEQEST

SEQ ID NO: 515729 - protein, 309 aa, unidentified
MGIAEGEVFVGIDVSKARLDVHRLPDGGATAFDYSPEGLARLRDWLGSAPPNLVVLEATGGLQLRLAAELVAAELPVAVVNPRQVRDFARATGRLAKTDRLDAEAIARFAASIRPEPRPLPDAERQALIDLVTRRRQLVDMRTAEKLRLGSVHQVLRPSLLAHVDWLTNAIDALDADIDGAVRHSPLWRDDLRLLTSVPGVGRGTASTLIALLPELGTIPIGKLTALVGLAPLNHDSGTLRGQRHIRGGRTPVRTALYMATLSAIRCNTAIRDFNQRLRAAGKPPKLAITACMRKLLRILNAIASSKTP

SEQ ID NO: 515730 - protein, 367 aa, unidentified
MSKSSKLFVGMDVHKDSIDLATGEERGEVRHHGAIGGDLAALSRAVRKLESLGKRLVFVYEAGPCGFVIYRFLRARGHECWVVAPSMTPRQASDRVKTDRRDCLKLCRLARAGELTPIYVPDAADEAMRDLVRTREDAVIMQRQARQRLSALLLRNDIRYAGKSAWTQAHRRWIAHLKLPAPPQQIAFEEYVQAVNEATARIERLEQAIATERGHWRWRPVAQALEAFRGIQAIHATRIVAELGDLRRFAHPRSLMGYLGLVPTENSSGARRRQGAITKAGNSSARRAFIEAAWAYQHNARVSWVIARRQTDLPQPVIALAWKAQLRLCARFRKLAARRVHRNKIVVAIARELAGFIWAAGHSVKPA

SEQ ID NO: 515731 - protein, 478 aa, unidentified
MNVKEGKAKKQADIKNSIMNVLSQEELTKRIAAVEAGMKAFTWRELETGGKFGKNDKLTFISDDMLILGCDIGSDTHYIRAIDTRGRELSRDAFSFSNNAEGLQSAKAWALRIAAEHQKRQIVLGLEPTGHYWFCIAAWMVSNGISVVQVNPYAVKQTKELEDNSQLKDDRKDPKLIANLVKDGNYGMPYLPEGLYAELRQLSMLREQLIEDRTRNVNRLHREMKIYFPEYMDAFGKLDGAFTLAVLKAAPFPEDIVAIGAEGLRALWRSTNLRGRGYSRAEQIVKLAGGSIGLKQGTSAGKAAVRWFARQLLVLSEKLEEIETALCEKCREIPYAENLLEIKGIGEKVLSGILAEMGDIARFDDVKEIQKLSGLGLVACNSGKHKGKTKISHRGRKRLRYWLFQAAKSVVAQSEEFKVLHTYYTTRPDNPLKKMQSLIVIACKILRIIFTILRTGQRYDPVKMLGDIRHPGGTTQAA

SEQ ID NO: 515732 - protein, 423 aa, unidentified
MTKLSSTPAGAVLVAIDMAKNRQEVLIERPEGGRRRRMTVLATKADYDGLAEQLAAIGRPIVVGFEATGNYHRTLAHRLLTEGFEMRLISSVALARTREALHNGWDKNDPKDAQVILHMLRIGATQRYVDPLVAGINDLQELSKTHEAISRMKTQTWHRILTHYLPLYFPEIARFAGNSRSDWFLALIERFPTPASITALDREAFSAAAWPLIGRKVSKARLINDVYETACASTALPVTEDSAAVTMFRMVIAQGRSLIQQRDEIERLAHARLAEHVDYQLLRKIPGIGPINALTILAEAGDLRRFGHHRQFLKFCGLDLATCQSGTFRGRTKLSKYGNARLRRTFWMAAQVAARQRDNSFRDKLGRYTAGHADDADRRRKAMTALTAKMARVAHAVVKTGTEYRPFLERPDTRWKDPSLLVP

SEQ ID NO: 515733 - protein, 404 aa, unidentified
MYDKTKFIYVGLDLHKEQHTAVIMDCFNEKLGEITFQNKPSEFGKLITKCKKYCTDGKGIVFALENSYGYGRALAAWLIERNYIVKDVNPALSYAYRKSVPQYKKNDSYDAQCVARVAINELNKLPDAMPEDMYWTLSQLVNRRANLKTHHIRLKNQLHEQVCVAYPSYKQFFQDIGRPTALYFWEHYPSPRLLRGKTVEELAEELIPVSHNQFSTRKCQKILDSVKADGDTTRDYQPERDEITRGLVKDVRHYVAQLEEVDKAIADFLPRFECTLNTIPGVSDTTVAKLLSEIGDIRRFPNADKLANFAGIAPVNFSSAGKGDDKPSKQGNRRLQGTIYFLAIQMIQLSSKGLPRNPAFYAYYQRQLARGKTKPQALILISRKLINIIYGMLKNKTEYVMPKV

SEQ ID NO: 515734 - protein, 344 aa, unidentified
MPSILGGLDIHRKQLTFDYLDTVTGEVACGQVAPADREHFRSWLARFEDPGEVAFAAEACTGWRYVSEELRRAGIEAHLAEPADTAAARGRKKRAKTDRADARLQRELLAQGRLPECWIPPSHVLECRALLETYHDLRAEHTAWVQRAHAVLFHQGAPAFHDLSRADAPAQLAELARGHLSAAGQVQVGVYLRTLAALEAELDATRRRLLAAARQMRGAKVLAEAIYGVGPVTALALTCWLAGAGRFTSARKAVRFTGLDITVHSSDSKRSPGHLSRQGPPVLRWALYEAGKTHARSVAPDHGYYAAVKDRKDGKRAALSEARKIVRRACHILTELGDDALATV

SEQ ID NO: 515735 - protein, 354 aa, unidentified
MNYVGVDIHKRYSVLVAVDERGRELARGRISGNSVHAFAQFFEALQGPGKVVLEACWNWGRIYDVLSEIEQVEEVVLAHPLKTRLIAEAQIKTDSLDALALATLLRGNLIARAHVPSKATRARKELLRQRLYWARLRTRVRNRVHAVLDRQRELEMPQCSDLFGRKGLNALSKLRLAEPDATLLSEELDLLKLIDGQIKAQEGRIVAFNANEQATQYLQSLPGMGKILAAVAAAEIDAIERFDGAAKLCAYAGLVPTTYGSGGKVHQGHLLKSRNKWLQWAFIEAAWVAVGCSSYFGGIYHYHRARGKKANIAITIVARRMCRIAFTLLKERRNFQEQHKTFPGRSAVRLTAAA

SEQ ID NO: 515736 - protein, 422 aa, unidentified
MVTKDTTSFERVIGLDCHPDTFTAAVVRGQTPAQALIGKVFNKVPMAQLQSWAKKHTTAQDLFVLEASGNSFHVVRSLASIQRRALVLESCQLGKLKEAHANNDRISAVRIAKAYLAGTAKTVWVPDLKTQERRDWFHAHEKTIKRTTQMQNRLRSYLSDNGVRLKKGTHLAQPDPVVETLLRQAKAWSVRQWQIIEGLLMELRHADEQRRFWRSAIAQEVLGDPELLKIVRLCGVRDLIAFALGAIIGDIKRFARPGSLVKYIGLNPAFDDSGQGQWHGGISGHGRKDLRSLLIQSAQAILRSKDPLAQWGRRLAARKSSTKLSVAAVARRLAVAVWYLMSGQWSQLQEIDQRLKIKVSRIISQIGTEALKKAGKTRPALRDETYQSLKTGTTYLLDAKKMFTPKPKFERPMTLAEEYGLK

SEQ ID NO: 515737 - protein, 372 aa, unidentified
MNYNTVYVGMDVHKESFSLCAYTIETEKASHYQKTEADCKNVLKYLEFLRTIYGDDANFICGYEAGCFGYTLYHQLTANNVKCIILAPTTMLEQRSKKRIKTDKRDAEIIAKCLAQHNYSPVHIPTAKDEETKEFLRMRDDHKLALKKVKQQILAFCLRHNYRYDGKSHWTAAHLKWLKALTPEALYKEILDEYLLTYQTLSDKIERLDKRIEELATQDEYKEAVKKLCCFIGVKTHTALSVLVEVGDFKRFASAQHFASYLGLVPGEDSSGDDQNRLGITKAGNRHVRLLLTEASQCYARGQVGFKSKELKSRQSGNTPAVIAYADKANERLRRRYYKMVLNKYKKHNVAKTAIARELACFMWGMMTDNIA

SEQ ID NO: 515738 - protein, 374 aa, unidentified
MMSEMVKGKFSVGVDLHKSQFTVCVLDGLGEHQLEEIYYVNASGYEKFKLDMHTFEQEFGCEIILAVETTGNVRYFKNQMEAEGFEVLVVNTNKFKVISQSTKKNDKNDASTLAYYLYKEMLPESHIADQSSQELRRMIKSRSLLVSTNVKLKNQIHGMMLGYGINTKGGQLQSIKKRQALLWDLEDHGFSGAAASLKVILQSIETIEAQIKEIEKRLSEMTKEDEDVELLMGIPGVGLITATTIAAYTKDIEKRFEGDFKRFASYIGIVPSVHNSNEVVRMGRITKRGPQELRTAIVQATMGLLRLSKRTGSWKLITDYKTMKISKGSGVSIIATTRKLARIIFAMLNNREPFNVELMVKNKCLFTVNEVIGA

SEQ ID NO: 515739 - protein, 478 aa, unidentified
MTPSKDYCLEAPCPPTPLLPPLPVLSDALQVCNPHAAGIDIGEAEHWVAVPPGRDPQPVRRFGTFTVDLDALADWLIDCGVITVAMESTGVYWIPLFELLEARGLQVFLIDPRQAKRAPGRPKTDRLDCQWLQRLHAYGLLAAAFRPADQICVLRSYLRHRQMLLTYGAHHIQHMHKALQQMNLKLSQVVSDLTGATGMAILKAIIAGERDPLTLAKLRNPHCQHSEDDIAKALQGTWRAEHLFALQQAVELYQFSHQQLTVCDQHIQTHLGTFADKSHGQPLPPKARRHKKANEPRCDARTPLSRLAGVDLTTIEGIEEGTALVILSEIGTDMSRWPSVKHFCSWLGLSPQHKISGGKVLSRRVRPGAQRVALALRLAARTVHKAHTALGAFFRRLRSRLGAPKAITATAHKLARLVYSLLKHGSAYVQQGLDAYESQYRERKVKAMARQAKALGYTLVALGTPEGASLDAVTVPIP

SEQ ID NO: 515740 - protein, 366 aa, unidentified
MKKISTEQIFRDDILKKQKLTIGMDLGDHWSCYCVLDEAGNIILEQKVAMTPEAMKQTFSKIPPSLIALETGTHSPWVSRLLTELGYKVIVAHAQKVQLITKSNRKDDRHDARTLARLARIDPELLGPVRHRSAQAQIHLTVIRARAELVSARTALVNAARGLVKSYGQRLPKCGTQQVSRELGAGLHAELREVLEPLLQEVESLNERIQEYEVRMEKIAKENYPHVELLKQVKGVGTQIALTYVLTLDDPHRFPKSREVGCFLGLRPGRRDSGESQPEMNISKEGDRYLRTMLVQGAHYILGPFGEDSDLRRWGLKLAARGGKNAKKRAIVAVARKLAVLLHRLWVSGEVYEPLRNSQKAMRAAA

SEQ ID NO: 515741 - protein, 367 aa, unidentified
MPRLHRDGEVVHVAFDASKNVLVTGVLRPGEETPTIERVFNDEPSVRRFVKGFPDPGRLRTCYEAGPCGYELQRLLQSLKVPCEVIAPALIPVAPGDRVKTDKRDARRLVRQFRAGELVAIRVPSRHDEAVRDLCRARADAVEDLTRAKNRLGHFLLRHGRIWRGGATTWTFKYRNWLGQQSFDEAALRVTFARYRATVECREAELESLESELTNYLEEEPFATPVQRLSAYRGVDRLGGLVLQAEVCDWRRFANGGAAGAFCGLVPSEYSSGDSVRRGSLTHTGNAHLRRQLIESAWAYTNGPSLGVTLRRRQDDVSPDTQARAWASQVDLCRRFRALDKRKPVRGVVVAAIARRLITHLHAEMVA

SEQ ID NO: 515742 - protein, 356 aa, unidentified
MTIVAYSHPFVVGVDTHARKHVFAIIAAASGERIENRDFPATGAGINRAIAWVARRTEADLATLWVIEGAASYGAVLAGAVAAAGYQVAEATRMDALPRRGVGKSDPLDAHRIASAVLSLEEDKLRRPRLNEGVRAALRVLVTARHSMTTDRTRTVNALTALLRINDLGFDARKSLSGSQILEVSRWRVREEALAVSVARSEAVRLAKRIGALDAEIKANGSRITGLVEVSEAAPLLQESGFGPVTAAICLTAWSHQGRVRSEAAFASLAGVNPIPASSGNTVRHRLNRGGDRTLNKALHMVALTRMAFDPATIEYVAKRQAEGRTKKEIRRCVKRYLARRIYRTLNANSPQPLLR

SEQ ID NO: 515743 - protein, 335 aa, unidentified
MSSLAVFVGMDYHQDGVQVCVLDQKGRQMVNAVRGNCWQQIAETVPEGVRVFATIEACCGAADLAEELIGKAGWSVDLAHPGYVARIKQSPDKTDYSDARLLADLERVGYLPKVWLAPEPIRELRRLVRYRQQLANRKRGVKLRVRALLRDQRVKSPAETKPWRKDWLSWLRACEELGEASRWILDKHLAELDTVQGELRQVEKRLRTQTADDPVVQKLLEQEGVGLITAVTLRAEIGRFDRFRTGKQLARFCSVSPRNASSGNRQADAGMIRAGSPELRRVLIETANRLKWQSDVWSAFSERLKDRGKQRCVITAAVANRWIRGLFHQMKHLAV

SEQ ID NO: 515744 - protein, 378 aa, unidentified
MPSGITIRVAIELSVSTWLVAARLPGVEKSRLYRLEGGDTAALLTLIEDLRSRASTKPGRPVDVACCFEAGRDGFWLHRVLTAHGIAAYVLEPTSILVNRRARRAKTDRLDAEGMLRVLAAWLSGDRQVCSMVHVPSPEEEDAKRPHREREHLVQEKLRIENRIEALLFTQGIRGRPSLRSWERDVAELRTGDGRKLPPLLRAELDRLRRRLVLVLEQIREVEAERTEALAATTDDAMSQKITALQGIRGIGENFASVLVREVFYRSFANRRQLASYVGIAPMPYQSGGLDRDRSISRAGNPRARTTLIQLAWLWLRYQPDSALATWFRERVGTLQGRTRRIAIVAMARKLLIALWRYVETGVVPDGVKIRAAAGATA

SEQ ID NO: 515745 - protein, 402 aa, unidentified
MNAVGIDVSKSKSVVAIMRPFGEIVSTPFEIKHTASDIHSLVELINSVEGESRIVMEHTGRYYEVLAHQLLEANLFVSAINPKLIKDFDNDSLRKVKSDKADAVKIARYALDKWQNLKQYNVMDELRNQLKTMNRQFGFYIKHKTAMKNNLIGILDQTYPGVNTYFDSPARSDGSQKWVDFASTYWHVDCVRKMSLNAFIDHYQNWCKRKKYNFSQSKAEEIYGKAKELVPVLSKDAITKLIIKQAVDQLNSASTTVESLRTLMNETASKLPEYPVVMAMKGVGTSLGPQLMAEIGNVSRFTHKSAITAFAGVDPGVNESGTYEQKSVPTSKRGSADLRKTLFQVMDVLIKTHPQDDPVYQFLDKKRAQGKPYYVYMTAGANKFLRIYYGRVKEYLSSLPES

SEQ ID NO: 515746 - protein, 405 aa, unidentified
MQKIYERCCGVDVHKRTIVACFRKGNQQEMRQFGATTGVLRELAKWLLEGGCEKVAMESTGAYWKPVYNVLEVLGVEAIVVNAQHMKAVPGRKTDTKDAQWIAELLQHGLLRASFVPDKEQRELREVSRYRKGLIEERSREVNRLEKTLEGANIKLSSFVSNIVGKSSRRLIDSAISGTVSQDNILDMLHGHMHAKKDELLKAMEGVMTVVQKKLIQAILDHIDDMTRRISDMDDILTDEMRKYDDAIAALDEIPGIGRQSAQTILAEIGLDMRRFPTASHLASWAGLSPGNNESAGKRKSGRTCKGNQTLKVTLIQSAKAAVRHKDCFFRAQYDRLAVRRGRNRATVAVAHSMLRAIFHMLKNNQPYQDLGSDYYTKFNTEKKINAYLKKLSDLGWQPPAAATA

SEQ ID NO: 515747 - protein, 340 aa, unidentified
MNEITTIGLDLAKHVFQVHGVDASGVTVVRKRLRRSEVLAFFTRLPRCLVGLEACATAHYWARELQTIGHEVRLMPAQYVKAYVKRNKNDAADAEAICEAVQRPTMRFVPVKTAEQQAALLLHRGRERLVRQRTALVNALRAHLAEYGVIAPLGLRNVARLIAIVRDEIDTRLPAPARQVLEVLATQVEQLEAAVAALEKQLIAWHKANPVSQRLATIPGIGPIIATAVAATVVEASGFRSGREFAAWLGLVPRQHSTGGKARLGGISKRGNRYLRRLLINGASANLLRSKATNADPWVIGLRRRRPSLVVAVALANKTARIAWAVMHRQENYQRMAAAA

SEQ ID NO: 515748 - protein, 343 aa, unidentified
MNPVIGLDISKEESHGQAFLDRGKPYREIFHFEHTRDGLEILLQVIHDIEHESGHRPTVILEATGHYQSPVVQFLEEYHYLFFVINPLISNRLRKTNLRKVKTDAAGAYLLGELYYREEFEPFKKRGVQLLNMRDLTRQHESFSKMCVQTKLQFQAVLDQVFTAYKGVFGAMYANVSLRFLHEFPTSSSVLEVSEETLKITINTLLSSKHGRSERWINERVQRLLDAAKQNPFQQTMYASHLINLKILISLILQYQEHLSELEQTIDALATEIEEYELIQSIPGIGPKIAATILAEIGEVDRFDHPKKLVAFAGIDLSVFASGKLQQHVIESLNVVPDSLDTH

SEQ ID NO: 515749 - protein, 372 aa, unidentified
MHFVGLDMSLEATAICVVNDSGEIFREGKAETDPEAISTWLKVVDVPIEGLGLEAGPLSPWLCEGLQATGLPAVCIETRRMKGATAAMAVKTDRTDARAIAQAMRVGWYTAVHVKTAESQELRLLLTNRKTLLTSRVTLENEVRGTLKAFGLKVGRISVAAFEARVIELTADQPRLQAMVRPMLAARQALRLQFDALHVMVLQVVKSHSVCHRLLTVPGVGAVTALTFATAIDDPARFARSRDVGTHLGLTPRKYASGEIDRNGAISKSGDRLAREALFLAAHALLTRVAQWSALKAWGMAIAKRRGLRRAMVAVARQLAVIMHRMWADGGEFRWSRDEIVASAAALAAQEIAHSSPPASDVPRGRGRDDCA

SEQ ID NO: 515750 - protein, 320 aa, unidentified
MDQPTLKFAGAQSIGVDISKATLDAHAYPVGQAHSVPNTPHGFKDLLKWLQAYEVVRVVFEPTGAYHHDFERALAKAELPLCKINPLQAKRYAQSRGKRAKTDAVDAAMLARMGHEHNLEPKPIFSQAIDEMKELSVARLALVKDRTAASNRRHVRRSPLLQRQCKARIAHIDTQIAQIDAAIAAIMATQPDLMEKEKILLSIPGIGPATVRAFIIDMPELGSIENAQAASLVGLAPIARDSGAMRGKRHIGGGRAHVRQAIYMPALVACRYNPDLKAKYNAMIKLGKSPKIAITAIMRKLVVLANALLSKGKLWTPKPA

SEQ ID NO: 515751 - protein, 426 aa, unidentified
MNCKLNEKINQVEETSLVVGIDIGSTTHYARAYDWRKVELAKVFKFSNTLEGFESLSRWLGNIQAMRQKNKIIVGIEPTGHYWFALGQYLQGHGIKLVMVNPYAVKQSKELDDNNQTKNDAKDPSVIAKLVIDGRYSIPYVPQGAYADLRIMFTNRTRIAREIGAIKNHLARWFAIHFPEYKEVFRDYASKGSILLLKVAATPSSIVALGAEGINKIWRDAKVRAVGIKRATTLYETAKKSIGQTQGTAAAEVEMKLLLEDYEAKMRQYASIMAALEEAVGRIPGAERLLAIKGIGLVTVAGFLAETGDLGRFESPKQIQKLAGLSLRENSSGKHKGETTISRRGRHGLRNVLFNAVIPLLATNDEFRSLHEYYTTRAVNPLRKKQSAIVLCGKLIRIFYVILVKNAVYDGQKMLADIHRNGNQAA

SEQ ID NO: 515752 - protein, 333 aa, unidentified
MEKKWFIGIDISKKTLDVVIYVPTKKHADETNYERFLNKDEGYKSLLCWLKKKNMAKKRLVISMENTGIYSFDLCLFLEAASIDYCSFNPLHLKRSLGLVRGKNDRVDAERIAYFAYLHRDELSYSKLSGSSIIRLRDFAAERKRFVKQQAEYKGFLTDRKDCEMTSTIERAAHMVKILDEEIASVEEEMLQIINSDPSILRNYELLNSIKGIGTINAMNTIIHTNNFQAFETARQYACYLGIAPFEHSSGTSIKGKTRVYPTGAKLLKADLSQAANSAIVWDKEMKKYYERKRKEGKAYGVVLNAVKFKLVGRMFAVVKRGTPFVELMTYKK

SEQ ID NO: 515753 - protein, 412 aa, unidentified
MSKTEITAVGIDVSKGKSTVAARRPGGEIVLMPFTVLHTAAGLAELTHTLQGLDGDIRVVMEHTGMYWRPIALALKKCGFFVSVVNAMLIHDFSDNSIRKVKTDKADALKIANYALTFWRDLRDYSPEDETRQMLKIQSRLYERTLNSSVSLRNGLISLLDQTFPGANKLFDEQRTKSGHIKWVDFVRRFWHKDCVAASSLASFANTLQKWCKRTGYHYSFSDAERIHDIARNSVATLTKNDSTKLIILQAVDSLNAVYDTLQILRNEMQRLASMLPEYEIVMGMQGAGPITGPQLMAEIGDVRRFTNKAALVAFAGVDAPPFQSGTFDSKSRHVSKRGSPHLRRALFTVCSVILQLSNPENAVFQFMDRKRAEGKHFYVYTVAGGAKFLRIYYAKVKEHLDLLASQSSSAA

SEQ ID NO: 515754 - protein, 356 aa, unidentified
MSRKLDTSPAVIGIDIGKNSFHIVGQNQRGAIVLRQKWSRGQVEARLANLPPCRIGMEACVGAHHLSRTLRALGHDARLMPARYVRPYSKGQKNDYRDAEAIAEAVQRPTMKFVATKTTDQLDLQALHRVRERFVGQRTGIINQIRAFMLERGIAVRQGLRFLRAELPRILATRTDALSPRMLHLIEDLTSDWRRLDTRIEHLSSEIEALARQDKGCERLMSVPGIGPIISSAMVAAIGTGDAFSKGRDFGAWLGLVPKQLSTGDRTILGSISKRGNRYLRSLFVQAAWVVLVKIGPKYWDRYGLQSWIEAAKKRLHHNVLAIALANKLARIAWAVLHKGRAFECVKTNEAAYRPA

SEQ ID NO: 515755 - protein, 445 aa, unidentified
MVQIIYKRVAGLDVHKKTVVATRMRVTEESRVEWETETFGTTTPDLLELHDWLLEWSISHVSMESTGDFWKPAYNVLEDTFEVLLVNAQHVHNVPGRKTDAKDSEWLAELMLHGLLKASFIPPRPQRALRDTTRYRTTVIQERTRVVNRVQKLLEGANIKLSSVATDIMGVSARAMLAEIAVGQTDAALMADLARGRLRNKIPELQRALTGLVESHHRFLLAQQLAHIDFLDEEIEALSAEIGRQLEAMSGPSSPAEPGAGADGIEGASNSDKPAGPLTWNEAVALLDTVPGIDERAAEGILSEIGIDMSRFPTDKHLASWSGRAPGNNQSGGKCFSGRRPKGNKSLSSILTQVAHAAARSKGTFLNARYHRLAARRGKKRAIGAISHSIIVSIWHILTYREPYLELGGDYFDQRKKEAKVSYLIRQLERLTGGAVNIEIQPVAA

SEQ ID NO: 515756 - protein, 350 aa, unidentified
MTSLTDIAEIVIGIDTHVDTHTAAIVQTATGGVVAEITVPTTPAGYQELLEAAEEHSPLRVWAIEGTGGHGAGLTHLLAREDEVVFELDRPRRAMRRNGAKSDPLDAVRAAREAMARPHHATPRTGRQRQALSVLLATRRSAVEAVTTAQRQLFSLAIAAPEPLRAKMRDRKLPEMTQIASRFRVQPTWDTETATTARMLRDLARRAQVLQAEADEHKKQIRAIVQSWRADLLAQKGVGPIVAATILCAWSHPGRVRNEAAFAMLAGVAPLPANSGKVTTRYRLNRYGDRQLNRALHTIALSRQRYDQATKNYTARRTAEGKTPREIKRCLKRYIARDLYRQLENPPLPT

SEQ ID NO: 515757 - protein, 312 aa, unidentified
MTDITIGADISKDHIDLHSLPGGETLKVVNNRKGFAILLKWIGTRAVKRVVYEPTGPYHKTFERVMTENGLPLSKVNPRLARRFCQATGRFAKTDRIDAELLARYGALLEPRILQANTQTLNDLKELLVARLALIKDRTAAKNRSKSLSSLLLKKQNADRLRHIERQIKTVDEAIMILIAQNPCLKIRFEILLSIPGIWHITAFTLLIEMPELGELDEKTAAALSGLAPMNRQSGRWTGRAFIAGGRAIVRQALYMPALVACRFNPDLKAKYDQIKASGKPPKVAITAIMRKLIVLANALLRKNQKWNPKLA

SEQ ID NO: 515758 - protein, 360 aa, unidentified
MKLEDLVTHVVGVHTHKDTHTAAVVVAATGGAEQIEEVLANRDGYEALVELADSYCDAGDRAWAIEGTGSYGAGLAAFLKRRGEWVIEIDRPTRPAQRDGAKSDPLDAVRAAREALGRTSWAEPRARGEREAMRVLVTTREGAVRDRTRAINQLKAMIVSAPEDLRDKLRSDSGSALIDRCARLRANPSRGEDDNATIAALARLAKRIQHLNREIHDHDHDIDTLTQRHCPQLLAEYGVGPIVAAQVYIAWSHSGRCRNEAAFANLAGTAPIAASSGATVRYRLNRGGDRQLNRALHTVVLSRSRGHDTTQRYIKQRLADGKTARETKRCLKRYLSRHFYRLLEHPPTTHDSPESPPTHP

SEQ ID NO: 515759 - protein, 413 aa, unidentified
MTEDNFAWFAGIDWGSERHQACVIDAQGHIVGEREFPHGGAGLAALCDWLVSICGAAETMAVGIEVPHGPVVDSLIDRGFVVHAINPKQLDRLRDRHSVAGAKDDRRDAYVLADGVRSDRRLFRRVHVSDPRLVELRAWTRLAEELAEERVRLSNRVQHELWRYYPQMLKIADDDVAALWVLDLWDLAPTPAKARRLRAAAVEKLLKQHHIRRIDAEGVRRILQEPAIKVADGVAEAASVHLRSLFTRLRVVGRELRQAKAKLDKLCTAIGETDAESGKGLQPQDVMILRSMPGIGPVNLATLLCEGSGALSRRDYQALRTLCGAAPVTKRSGKSHIVIMRYAAHTRLRRAAYHWARVATQHDPKSREQYAALRRRGKTHGRALRGVADRLLGLACVLLERQTPFDPNLAQAK

SEQ ID NO: 515760 - protein, 387 aa, unidentified
MAQVNDLSRSLTAFDPISTLVVVVEMSKASWLVSGVVPGVERQPLKKLEPDATALLRLIERWRNEAVRAGRPISRIALAYEAGRDGFWLARWLIARGIEAHVIHSASVAVSRERKRAKTDRLDAAMLMRVFLGWLRGERGHCGMVAIPTMEEEDARRPSRERESLVDERSRITNRMKSALARLGIRGFKPHLRKAPERLAGLRTAEGTGLPANIIEEFRRDMARLALVREQISSIEKTRAERLERAPDTGPHAMVRLLARVIGIGIETADMLVREILSRKLRDRRAVARYAGLTGSPDESGLKRREKGLAKAGNARVRRGLIQLAWRFLMFQKDSALAQWYRTRTEGPSGARKTTMIVALARKLLIALWRLVTTGEVPDGVELRPAA

SEQ ID NO: 515761 - protein, 408 aa, unidentified
MNAVGIDVSKGKSMVAALRPMGEVALLPQVFLHTGVGLEQMAYAILALGEDTRVVMEATRRYHEPVAAALHEYGIYVCVLNPLFIKQSGGGSIRKVKTDKADAMKIAKYVLDNWVDLREYTPMDTVRQQLKLCSCQYNLYMKTVVSLQNNLISLTDKTFPGVNELFSSPERADGHQKWVDFVMTFWHCDCVCRVSEKAFTERYQKWCKRKDYHFNAEKALDLYASSCGHFTTLPKNDNTKLLITTTAQQLLAGKMTLAALRAEMTRLAKQLAEYDTVLAMYGVGETTAAQLMAEIGDVRCFPRRSSIVGFAGVDPGVDDSGKHSAKSVPTTKRGSPHLRKTLYQIICTYLKKSPEDEPVYQLLNKKRTEGKPYFVYMTAAQNKFLRIYYARVKECLETFDAQQDTVQN

SEQ ID NO: 515762 - protein, 397 aa, unidentified
MYIVGIDIAKRKHEAAVIGGEGTVIIKPFSFTNNCSGYNRLLAMLTRAKLPLDEVSFAMEATGHYWLALFTRLQKEGFRVQVINPVQTNSIRSFYIRQAKTDPRDALLIAEVIRFGHFSESTLHPENIYELRELCRGRHAIVSMQADVKRKVVALLDQVFPEYETAFTNMFSDTSMAILQTCPTPKELSEMPLEELCHLIEVSSHKRFRMAKAQELQELARNSFGFAMAGDVFSTMIRLYAKHLDFLKQQVREMDRKIAEIMDTLDTPITTITGIGPTLGAYILSEIGDISRFSSAAKLAAYAGIDPTMRQSGEYNGVRNRMSKRGSPYLRHAIWLAASSAVLHDPALKLYFQKKRDEGKPYMASVGHACRKMVSIIYAVMRDNKAYTPCIPNEISA

SEQ ID NO: 515763 - protein, 339 aa, unidentified
MVRIITGGVDTHADQHVAAAIDHNGGVLGTESFPADVAGYEALLAWLVGHGEIDRVGVEGTGSWGVGLARFLHSHEVVVVEVDRPNRQHRRKVGKSDDIDAISAARAALTGSAAVIPKTRDGSVEEIRILLVARRSAREQRIQTLNQLRHLVFTAPEPIRCRFKDRPKTGLVTEVAKLRPRLGSDPVSYTTLLTMRGLARRIKHINTEMKTIDTRLRLLISETAPSLLELHGVGLDTAASLLVTAGDNPDRLRSEGSWAHLCGVTPIPASSGKTTRHRLNRGGDRHANAALYRIVLTRMSSDPRTRAYVTRRRAEGRSNREIVRCLKRYVARETFKHLT

SEQ ID NO: 515764 - protein, 462 aa, unidentified
MTQSIPRKPPELPAETLPDAKTIDGVWTQLNRTVRQAVAKVVPRKGRHAAPDGGVDRLDHMSARRRGDPSHSMQVARVAPDWPVAILMHGGRVVGDRITYVGLDVHKDGIVVALAEDGLRGEVRDYGRIANTAAALQRLARKIGQEGVELRLCDEAGPCGYGIQRQLSASGHGCIVVAPSLIPKRAGDRVKTDRRDAASLARLHRAGELTAVWVADAGHEAMRDLVRARLDAVHALRRARQQLSGFLLRQGCHYRRPAWTKLHRRWLAGLRFEQAVHHIVLEDYIAAVEAAQARRDRLTAQIEAMLPNWTLAPVVKALQTMRGMALVNAATLIAELGDLSRFANPRQLMVYLGLVPSEHSSGTSIKRGGLTKAGNSVARRLLIEAAWCYRFPARVSRELRLRQEQQPKPIREIAWKAQLRLCARYRRLARTGKPANVVTAAIARELAGFVWAIARQVPPALG

SEQ ID NO: 515765 - protein, 412 aa, unidentified
METIHERVAGLDVHKDTVVACVRVPGGRGRRESHVHEFSTTTPGLMALRDWLVSHQVGLVGMEATGNCWKPVYYALEDASECWLLNARHLRNVPGRKTDLADAAWIAQLLEHGLVHPSFVPPPEIRELRDLTRYRKAQIEERVREAQRLDKVLQDAGIKLSSVASHLMGVSAQAMLRAMVAGERDPEILAELAKGKLRRKLPELAEALEGRFRGHHALLVGEILAKLDHLDEAIERLSDEIERVLGPFAPQVELLRTIPGVDRRMAEALIAEIGVDTSRFGSSARLASWAGVCPGQHESAGRQRHGTTRKGSKWLPMHLTQAAKAAARTKGTDLAAQYARLRGRRGGSRATIAVAHSILVAAFHILERGTPYEDLGADWFIRRHSPERHARKLVHQLETLGFDVRLEERAAA

SEQ ID NO: 515766 - protein, 347 aa, unidentified
MVHIGIDLHKRESQICWLDEGTGEVRHQRIQTRRDRFEAVLGPATPATVLIEASTESEWVAQCIEALGHRVRIVDPSYAPMYPQARGRRHKNDTRDALALATASLRQTYREVHRVSAARQRVREVLTMRETLVRTRTRLISVVRSDVRREGRRVPSGAPSSFPTRVRTLALPTAVAESVTPVVTLLELLETQLLLLDTQLAQHVAGDAEMQRLQSAPSVGPVTSAAFVATLDTPARFPSARQVASYLGLAPKDDSTGDRHRTGRISKRGSTRVRYLLVQAAWGILRSHSPEGQRLREWGAGVAARRGGRVAAVAVARRLARILYAMWRDGTAFEPTSGASPAVTTTH

SEQ ID NO: 515767 - protein, 347 aa, unidentified
MPSLPATVAETYRFVVGVDTHAATHSYAIVDDRGALLDQATFPTTPAGLRRARDWISRRTESDLDSVLVAAEGTGSYGAVLSDVLAEAGYRVVEAPTPRRERGRGKTDALDAALAARATLVMPLARLRDRRAGQTHTALRVLTVAREHLNIERTRCINALTSLLRSHDLGSDARKSLTAQQITAIAGWRRREEALGTSTARAEAVRLAKRVLVLDEELTENRVRLTEIVTVEAPDLLELHGVGAVTAAIVLTVWSHPGRIRSEAAFAAIAGTAPIPASFREHRASPPQPRGRPPTEPSDEHHRADPYAHRPSNPGLHRPPPGRRQDDQGDPALPQALGHRADLPHPD

SEQ ID NO: 515768 - protein, 372 aa, unidentified
MSAISKTTDRVVIAIDPHKASWTAAVVDASSQPVATIRVPVSRDGYRALRRFADRWPDPTWAIEGASGLGAPLTARLRTDGIDVVDVPAKLAARVRMLSTGHGRKNDDADAVSVGIAARSAPRLNSAAVDDTVTALRAIVDHRDNLVKTRTQTVNRLHVVLTNLIPAGAQRDLTAERAAELLRGIRPRDPAGKTLRGLAIDLVSEIRQLDRRIAKAASDIQAAVTDSGTTLTALCGIGALTAGKILGRVGTIDRLRSAAAFVTYTGTAPIDVSSGDVVRHRLSRAGDRQLNLCLHVMALTQIRQDTPGRAYYQRKRSQGKGHKEAMRCLKRRLSDVVYRQLRHDANNSAETGPGGHSGAALSSSAASSNPAH

SEQ ID NO: 515769 - protein, 409 aa, unidentified
MRIIGLDIHRAFAEAVVWDDGKLKRMGRVDMRRPLLEAFAKKLSKEDVVVVEATGNASSVAAVIAPHVKKVVIANPKQVRIIAHAKIKTDTIDASVLAQLYASGFLPEVWIPDEPTQALRRQVTRRNQIVRQRSRLKNIIQSILHSHLIPSCPHADLCGASGRAWLFHQILPEDERLAVERHLREFDRLGEDLKVIERDLARSALGDEGVKRLMTIPGVDMVVGLAIVAAIGDVGRFEQSQKLVSYLGLNPSVRQSGPGPAYHGRITKQGRGHARGMLVEAAWAAARAPGPLRAFFLRVRARRGQHVAAVATARKLAVVIWHLLRKGESYAWARPALHARKLRDLELKAGYKAERGQRGAAHAYNIKSHRDEERRWVEQAETAYARFVAGWNPRGPKRARTGAANEGRQ

SEQ ID NO: 515770 - protein, 347 aa, unidentified
MRKIAYLAMDVHARNCVLGDMDGNGEFHGNRSFKTCEINIIKALKTIKAKRKYLVIEAGPLSNWVAQVANDHVTKVIICDPRENALIYKSSQKRDKVDTKKLCRLLRLNEFKEVYRPENDQRAIFKAAVQHYLDLRDQLKALKQKIKAMYRQWGVIDVFTESVYSVSGRDKFLNQLKHRPIYLQLKRLYTLLDATADMKQDAQKSMTSLGRKYPEIKEFKKMPGMGIVGPHTFDAYIQTPHRFAKSSRLWKYCRLGITDHTSDGKPLGYRRLDKSGISELKAVSYRAFLSAIKGDNEIRRFYLSSLKRTHDKKHARLNTQRKILSVMLSIWKKGSAYRAELFLDPST

SEQ ID NO: 515771 - protein, 354 aa, unidentified
MALPMLSDPTRLVTGGVDTHKDTHVAVVVDHLGRHLGLESFPTNPAGYSALLSWMSGFGPIERVGVEGTGSWGAGLARFLSARGVSVVEVARPDRRARRLVGKSDPIDAQAAAISALSGRETAIPKAGDGPVESIRVLRGCRHSAVRDKTAALNQLRSLIDTAPDQLRGRYRDLTTTELITKARRARPRPDIADPAAAVGVAVKELAQRWVTLDEQIVRLDTHLEALVTATAPNLVAVFGVGIHTAATLLVCAGDNPHRLHSSAAFAALCAVAPIAASSGKTQRHRLNRGGNRQANSALWRVAMTRLAFEDRTKTYADRRTTEGLSKREIMRCLKRAIARELYPIIITDLNPQT

SEQ ID NO: 515772 - protein, 424 aa, unidentified
MQNTAARKRKQVPEGYLVIGVDPHKKRHAAVAITQDFTTQAKFKFDNTREGLEMMLDRAKVEMLKSGCRGVIFAIETGGHYWRNIAYYLDERGIPFRFINQYTLKRRREGKDLNRRKNDYRDSEVAAQLLCTGEFVESVIPQGVYAELRTSHNAYQRLVKERTRITNLVKGLLDALFPEFTQVFKDPGGLTALSVLSTCPIPRVIAGMTEDEFVATIEARHKGRRLMRKKLKALHYSAKTSIGIDAGARSLSSEIAFLVDKFELIRRQICIMEGTLVRLVDETEEGKYLLSIRGLNYIAVAGLLAELGCFKLYRSAKQMIKMAGSNPTESESAGKKRSKTPMSKQGRPLLRYCAWTSVIPMLRFNSDFRAWAKQRRERPAHANPLSGREIVGAALNRLLRLAFALVKNQTYYQDVKPALIPVAV

SEQ ID NO: 515773 - protein, 412 aa, unidentified
MQVIHPRCCGLDVHQKTVSACVLVCPENGQKHKEVRTFGTWTQDLQRLADWLREQGVTHVAMEATGVYWKPVWAVLAGPFELLLVNAQHIKAVPGRKTDVKDSEWIADLLQHGLLRGSFVPPPEIQDLRDLTRYRAQLTQERSRVANRIQKLLEEANIKLGSIASDVMGTSGQQMLRAIIAGETDPERLAQMARKRMRSKIPELCLALEGKVRDHHRDMLRRLMRHWSFLGEEIASLDAEIRSRMLPFEPAVALWQTIPGIHELTAWNLVAEIGVNMDQFPSPQQLASWAGVCPGNNESAGKRRSGQTRYGAPWLKRALCQAAWAASHTRNTYFSAQYRRLAARRGKKRAIIAVAHSLLIVIYCILKQNRTYQELGGNHFDQLHAERHKRYFVKKLEALGFQVNLVPVEQAA

SEQ ID NO: 515774 - protein, 339 aa, unidentified
MKKVSTIGIDLAKGVFQVHAVDEQGAVVVRRALRRSKLLTWFAQLPPCLVGVEACATAHYWARELCKLGHDVRLIPPAYAKAYVRRNKNDPADAAAICEAVSRPSMRFVAVKTEQQQALASLHRVRDLLMKQHTMLINQIRGLMAEFGMVTARGAQHVGELLSILADPHDQRVPGPLRDALLASAEILRAIDRKLEGIERRIVALGRDDATYRRLITAPGYGPIVSSAMAAMVVDPAAFRRARDFAASLGLVPRQNGTGGKVKLGPISKRGNGYLRRLLVNGAMAVLRGKRAKNDPWLARLLATKPRKLAAVALANKMARIGWALMMRQEDFRRLPATA

SEQ ID NO: 515775 - protein, 386 aa, unidentified
METTFEREAEAATDVGQAIYVSVELSQSTWLVTSFSPATDTKMARKGLPVGEVSQLLSLIANLRCKVHSKTALWLPVIIIQEAGLDGFWIHRVLVDEGLESHVVDATSIAVPRKARRAKTDRIDGEILIRALMAFKRGEPRACAMVRVPSHDEEDRRRLLRERKALVVERLAHANRIEGLLFAQGISDYRPLNRDRRSRLEDLRTGDGRPLPPFLKAQISRELDRLELVIDQIRAIEAERDELLACERKRANSAVAMLENVRGIGPEFASLLWTEGFYRHFDNRRQIAAYAGLAPTPWQSGSVDRDQGVSKAGNPRLRTTMIQVAWLWLRHQPESALSGWFRQRAASSGSAQRKKIVVALARKLLVALWKYVSAGIVIDGARLKNA

SEQ ID NO: 515776 - protein, 390 aa, unidentified
MHVVAHQPEAPGAIRSDLGAIFVSLELSRSTWLITSLSPCAGEKMSKHGVAAGDIGALLARFSEFKQKVFARTGKSFPIIVIQEAGLDGFWIHRVLQSEGIESHVVDPASIATSRRRRRAKTDRIDGEALLRALLAYKRGEPRVCAMVKAPTPEEEDRRRLSRERKTLIGERVEHVNRIKGLLFCQGVSDYEPLRRNRRQRLDELKTGDGRALPDHLKAQISRELDRLELLLEQINAVEAGQNTLFAAAKAEAPTPAPVTMLLDIKGIGPEFASILWMEAFFRSFANRKQIAAYAGLAPTPWQSGAVNCEQGVSKSGNPRLRTTLIQLAWLWLRHQPQSALALWFKERVTRNGGRFKKTTIVALARKLLVALWKYVTAGIVIEGAVMKAA

SEQ ID NO: 515777 - protein, 309 aa, unidentified
MEIVVGIDVSKERLDVAILPQEGVFAVGNDHAGIDELAERLKGIGVDAIALEATGGFEMLAVAGLSAAGLTVLVVNPAQVRAYAHAIGRRAKTDPIDAAVIAAFVLATKPEIRPLRDAETQALSELVARRRQIVQMVVAEENRLRMALAKQAQKSIKRLLKALRRELESLDADLDSHIRKSPVWRVREALLTSVPGVGATTARTLLAELPELGSLDRRQIASLAGLAPWTRQSGKWKGKSFIGGGRGKVRAVLFMAALVASRYNPDLKAFRDRLVAAGKPKIVATVATMRKLLTILNAIIRDGRPWQNA

SEQ ID NO: 515778 - protein, 360 aa, unidentified
MAKARTLVGLDVHAAKIVAAVLDADTGELQWFAMNGENARAAAFCAGLPRPVRVAYEAGPTGYVLARELAMRGVECVIAAPSKIPRATGDKVKTDRRDAEHLVRLLLAGKLHAVRVPGPEEEALRDLVRARETLRLDLMRARHRLSKMLMRHGIQFDDGRAWTERHRAWLKTVSLEWPAAQTTLLDLEGVIDVLVHRREHLEREIVSNLPGSPWDRQVGRLRCLRGVDTLTAVGLCAEVGDFARFARAEQLMSYLGLVPSESTTGTSRRLGSITKTGSAHARRLLVEAAWHYRKPPAIRKTLTDRQADQPPEAVAVAWTAQRRLHRTWTRLEARNKRRTIIAVAAARELVGFCWAIAQIE

SEQ ID NO: 515779 - protein, 347 aa, unidentified
MGKSITDLSSVTTVGLDLAKHVFQVHGIDASGRVIVTRGLRRKDVLAFFAQLPECLVGMEACGSAHHWARELIKLGHDARMMPPAYVKPYVRRQKNDAADAAGICEAVTRPSMRFAGVRTLENQAVLMHHKAREMLVAQRTQLINALRGHLAEIGVIAAQGLKNARELTRVILAEGDETIPACVRAALAPLVRQLHALDQEIARSDRTIAAMVRGDEMARRLMTIPGLGPVTASAIAASVQDVSAFSGPREFAAFLGPTPRQNSSGGKERLGRVSKMGNRYLRKLLVVGAHAVLYHRKPHEDALRSWAKKLMQTKPFKLVAVALANKMARIAFAIMRGRTTYGTASP

SEQ ID NO: 515780 - protein, 388 aa, unidentified
MGPVVGLDVSKGASVLQAFTERNKPYGRCKRIAHTPEGFEQLGELLKELEKSTGFEPAVVLEATGHYHRSLVAYLEREGYQHFIVNPLQSKRAKGTHLRKVKTDAMDAWHLAEMYYRGDLKPHRTWSEALTELQHLTRQHEFICPMLVQAKQNARALLDQVCPAYETVFDNLFCTTSLQVLRQMLSSTPVTAETIQAAAGSSHGQAWVQEKLERIQALPPLSQSSKAQQMALLGVLNMVLTGQEQLRQLEKAMEELAMMLPEVELLRTIPGVGDKLAAVLAAEIGDASQFETPKQLVAYAGLDPGVHSSGKFTASSSRISKRGSKRLRRALYLAAQCGIRNGVNERLKAYFEKKRKEGKPCKVAVIACANKLLHHVHAILVKGEPYKA

SEQ ID NO: 515781 - protein, 345 aa, unidentified
MLYVGLDLSRKRLDWQALLPDGERAAIGAVPPDREGLAKLVCRLGDADEVIAVIESMSGARFVHDRLELAGWDVRIADAVKARGIAPLACKTDTIDTWVLAELARLELVPEIWLPDPEVRAERERARFRLHLVKHRSSLKNRVHAILFQHGVPNTSSDLFGTSGRALLARLRLPEPWASTVAASLELIDVLDEQVGECERELRAIGAEHRYIPLLMSCPGIGWVLAFTIASEIGDIGRFPTPRKLVGYTGLCPRVEQSGERDRRGPLRKNGPNHLRWALVEAAHTAYRHPLYRPILERKRAQLGRKRGTKIAAIDVARRLTEAIWQMLTRDEPFAPAGATASLAA

SEQ ID NO: 515782 - protein, 310 aa, unidentified
MVMCFAGIDISKDSLDVHVIPDGVSFSVSRDDKGLEELAARLLPMAPQLVAMEATGGFETMVAAALNSRGLPGVVVNPAQVRHFAQALGKRAKTDPIDAAVIAAFAEAIRPKARLLPDAETLALSELMARHRQLTEMLKAERAREMRAASKRACQSIKRVIATLKAELKSLDADIDKTIRASAAWQVRVDLLQSVPGVGPTTARTLLAELPEIGSLSRREIAALAGLAPWTRQSGQWKGRSMIGGGRTTVRTSVFMAALVASRHNPVLKAFRDKLVQAGKPKIVAIIAVARKLLTILNAIVREQKKWQTA

SEQ ID NO: 515783 - protein, 365 aa, unidentified
MTEITRAPVARVGVDLSKRVYQVHAVDRAGRVMLVKAMPPQRFFEWCAQLPAGCVVAMETCGGSHHVARRLQGLGLDVRLIAGHFVTPHRMAGKSGKNDANDAAAICEAASRPHMRFVPIKTAQQQGQLALHRLREGYKEERTALINRVRGLLAEFGLVFPKSPEALRRVLADVVEDAANELPGLARLAIQRTHEHWIDIELQIAWCDDRIAEHVRADERAKKAAALLGVGLVTASAIAASVGDFKQFANARQFGAWLGLVPSQNSTGGKASLGRITKRGDDYLRTLLIQGAKSAVMTAHKRSDRISQWLVQLKERTSWQKAVVALANKNARILWAVLTRDAAFDPDHVPPVPAARISPKLQPAG

SEQ ID NO: 515784 - protein, 343 aa, unidentified
MRTITTIGLDIAKSVFQVHGVDADSDVVLRRPLKRRYVLAFFQKLPPCLIGIEACASSHYWSRELQALGHTVRLMPPAYVKPYVKRQKNDAADAEAICEAVTRPNMRFVPTKTPEQQSCLMLHRTRHLFIRQQTALINSIRAHLAEFGIVAPVGRGGVERLLEVVADANDARLPEIARACVATLGSQLQALKAQILAFDRCIMAWHRSNETSKRLDAIPGVGPALATALVASVADPKAFRSGRDFSAWIGLVPKQNSSGGKDKLGSISKQGDRYLRSLFTAGALAVIRYAKLHGTKHRPWLTALLARRPTKVAAIALANKMTRMAWAMMTRGERYKEPVALAA

SEQ ID NO: 515785 - protein, 388 aa, unidentified
MAKIIRIGIDTSQSVFQLHGVDEAERPVLRKKLRRSQMLEFFSKLEPTKVGMEACGASHYWARELTALGHQVVLIPPQYAKAYVKRNKNDPADAEAVCEAMSRPTMRFVPVKTAEQQAALMLVGTRETLIRRRTQLTNSIRGYAAEFGLVAAKGLDKIEPLLARIAKDEKLPALAREMFATHGKEYDRLKEEIAAIEAKQMAWHKENECSRRLVEVPAIGPITASVMVMKVPDAAAFRCGRNFSAWIGLTPKDHSTAGKKKLGVITRAGDEYLRRLLVAGATSVIKQVLAGKCRASPWLAALLKRKPVKLAAVALASKNARVAWKLMVSGERYDRTRYGAGETPEFAAREVRAAAVTGASASRTSLAPRSKPRKSHSKSHQRREITST

SEQ ID NO: 515786 - protein, 322 aa, unidentified
MTLLSLGIDVSKLKFDVALLRESGKFKHRVFPNTAAGFVQLSAWLEKQQAGRVHACLEATGAYSNSLATYLHEQGHLVSVINPAQIKSYAESHLSRAKTDKADATLIARFCSERHPPEWRPLPREARDLQALVRRLDSLLEMRQMEENRLGVAAAAPVKESLSQHIAFLDEEIKRTEALIRSHIDSHPGLRGQRELLITIPGIGETTAAKLLGELMDVKLYESARQLAAFAGLAPRLHESGSSVKKRAKLSKVGAPRLRKALYFPAIVAIKHNPYIKELSARLRRRGKCPMQIIGAAMRKLVHLAYGVLKSGRPFDPELKTA

SEQ ID NO: 515787 - protein, 417 aa, unidentified
MSTNLNVGIDISLRKGAVSFLNQEGKQLGKVFEIPNSPSGFDQLNEKISQAVNQYNFQRIFLGLEATSNYGFHLMDYFTKTTLPCEVKVYQINAKYIKRFKKAFPEREKTDLVDAQFIAEYLRFGKLPVDYKPEALRLPLKRLVRYRYHLVKSIEREKKVFIANLFLLFPGWVQERPIKTLGATSMAVLNDLSLDDIVNTPLEEMATFVAKAGKNRSPDPEAIAEKIKQAARESYRIRPELANSCQFILASITKTIAALKKALAELDNAIACESKGFINPLLSIKGIGPVYATGIIASIGDIKRFSSDDQLAKFAGLVWKRNQTGETEVQEKRLVKECDKYLRYYLVEAANSLRTHNEEYQAYYLKKYQEVNTHQHKRALVLTARKLVRLVFALLANNQFYDPQRRFQSPVAPCEKV

SEQ ID NO: 515788 - protein, 370 aa, unidentified
MILIGADTHKHTHTLAAINTPGGQLLDDKTIPASKNGFIEILDWARSLPDPERVWALEDCRHLTGPLERFLTTTGERVVRIPPNMTARERGQQRTRGKSDPIDARAIARAALREGIDTLPTAHMDAGSLEIKLLLDHREDLTKACSGDQQRLRWHLHDLWPDFKIPVGALDRTVWLERISRKLSRAEHCARVRIARDLVRSLKQHTRRARELQSEITTLVESKAPQLLALVGCGALTAAKILAETAGVERFSSDAKLARLAGVAPIPASSGKNNRHRLDRGGNRQLNCALHRIAVTQGRTHEPARTFLAKKETEGKTRREALRALKRHLARVIWRALQPQATQNQKPKKPPAAPPPTTPRAEPDSTPALT

SEQ ID NO: 515789 - protein, 342 aa, unidentified
MVTTIGIDPHKATHTAVAINETETVLGELTVPADRSQTKTLLDWAQNLDGGGRVWAVEAAGGLGYLLSQQLVANGEHVVDVPPVLASRVRLLGSGRSDKNDPNDARSVAIAALRQPGLAVVRPEDHTQVLRMLAKRHLELTGLRTQAACRLHSVLVLLRPGGLQPRLSATKARRMLQGMRSLDPIGEQRRTMARTHLGNIRRLDREIKANKVLISKAVATSGTTVTDVYGVGPVVAAFLIGYTGDIGRFASANHYAAYNGTAPIEVSSGGKKRHRLSMRGNRMLNHAIHMAAVTQIRHSDTPGRNYYDKKQAEGKTKKEALRALKRRISDTVYQQLITDHQG

SEQ ID NO: 515790 - protein, 450 aa, unidentified
MSPLALDVVTKTGKTPVLGRMLSKYVGRKTSSIENDITKARNHLRQRGKIMRVVFGIDVSKASSEVAILVNGEKIHGYTIPNDAIGFNRLLEDLGTVYQPEIVFEATGVYSRRLQAFFEDNSYTYTRLNPLESKKQLDSLRVRKTDKIDAEKLAMSQFILNRKPSYVQEALYQELRDLSRFYQNLTEDIVCAKNRLHKVLQITFPELENILSAPTGEQYWNLVITFPCNSFVLESDDATLTAIIRQSTAKRISEKRVTYLVDKLTKLANQSYCAVKKTSPVIEEVKYYAGELLRLSEHRQGVVEEMVTLAQSLPEYEILLSIPGIAETTATSIIGELGDIRRFHSANQINAFIGIDLRHYESGDFLAKEHITKRGNPYARKILFKCIHNIASASHTNPCHIADFYEKRKRQSQVTSTKPHTIASIHRLIRTMYYLITHNKLYDYTSIQNR

SEQ ID NO: 515791 - protein, 356 aa, unidentified
MTTMTDTHGEIIVGVDTHEKEHVAALLDERGRLLDTRAFPAQERGFWQLLAWARSHGPVCVAGVEGTGSFGVGLTRFLQAEGVQVVEVTRPNRRARRHLGKSDPVDAQAAARAVLSGEATAIPKPREGIVESIRVLQLARRSAVKARTQAGQQIRSLLITAPADLNQQLAGLRLNDQISRCLRLRPGAGHDSNATTRRALRSLATRWQTLDREIRELAGEIDTVTKIAAPRLLAQPGIGPETAARLLVVASDNPERLRSDAALAALCGASPVEASSGKIKRHRVNRGGDRQGNNALWTIANNRLIHDPETRAYADRRRAEGLSRKEILRCVMRALARRLYPLLIADITNAATLDLT

SEQ ID NO: 515792 - protein, 596 aa, unidentified
MSETLSLSFAHSGGLGNGGWRGALRIAQRQAPLRGEGLCERGGRFPAEPGVGSFGVVVVTPGGQRDAGMVQGREERFVQELIAQAAVEAFDEGILGGVAWRDVMPVDLLVIGEGQDRVRGELGPVACWECSAVEGYGRLRSPKIAQQAAITGSRVSMVVLRTTPQRRSAMAKVEHTSDARVLVGIDISKNRHEVLIAVPGRARRRRMTVLNTADDYRRLIDVLQGFELPVTIGFEATGNYHRALMFALGAAGFDLKLVSSIALARTREALHNSWDKNDPKDAQVILRMLEIGAVQVFHDPLVAGTCDIQELSKTYEMVARAKTELWHRILTHYLPLYFPEADRFHRSSRGDWFLAFLEAFPSPHMITSMDKEAFIEAAWPVIGRRVSKAALLADIYETSKASVGLPVAPDSDAIRMFRLVLAQGRSLIQQRNAIEERAAELLSAHPDYRLLRSIPGIGPVNALAVLAEAGDLRRFQHHRQFLKFCGMDLATVQSGLFRGRSKISKYGNARLRRTLWLASQAAVLKPANSFRDKFERYIAQDRHNPDLRRKAYTAIAAKMARTIHAVIKSGEPYRPFFEGVSPGGRTPLCRAVEAGS

SEQ ID NO: 515793 - protein, 313 aa, unidentified
MTQSLPQTIGIDISKIHLDAHAYPCGDARQFANTAPGFAALLKWIGQWPVERIAYEATGVYHRAFEQALASLPLVRINPLRARRFAQATGTLAKTDRIDAGILARMAATLQPAVRPGKSPELAQLAELMNARDGLVRDRTALKNREKNLALPLLKRQVKARLEQIARHIEAIDKQAQALINADAALLRKREIIVSIKGLGPITAAQLIATMPELGSLENKQAASLAGLAPLTRQSGQWAGKAHIHAGRANVRQSLYMPALVAARFNPDIKAKYTQLISAGKPAKVAITAVMRKLIVTANALLKANRLWQESMS

SEQ ID NO: 515794 - protein, 344 aa, unidentified
MIYLGMDISSKSFVVHGIDEKKRVLVKGEIEPTRRGLKDLIKGLGFQKKLVIFEAGNQLKWIAKTLKEMEGVEIHVVHPNEIKWINQSSGKTDKIDARKLAHLGRGDMLPRKVHIVEGKIRELRELLSARQQLQSKRVALINSIRGQMKQEGHSLPGKFFQGTQWREKLKRIKIGGVQKLIIESFMGSIDSLLRAEEKLTEKIGAIRDKRIELLESIPSLGRLSSRVIISALDDAGRFDGKKCVAKYGALAPRIYQSGAITHLGRINRDGRQEVRRVLIQCAHVIARMSSYGARPLREFFERIMKRRGKKIAIVAVARKLLTIAYGVLKSKTVYDPLRLTGVKA

SEQ ID NO: 515795 - protein, 400 aa, unidentified
MISVGIDVSKGKSTVCILKPYGEIVSKPFNITHTQKDLSELSSMLFRLNDEVKIVMEATGIYHLPVLTYLQEKGFFVSVINPYLMKSYRNESLRKAKTDKIDSRIIANYGIDHWFKMKEFQTSGEIYEELKLLGQQYRHYMKLHLLSLAELTHLLDLTMPGIKNLLASWNETNRKDKRSDFVERFWHYDVITSMSEQEFTEEYILWAKEKKYVPSQEKAKVIYTLAQESIPTLPSETSSVKILVTEAVRVLKEVDATIGLILSRMQEIAKTLPEYSVVREMGGVGNTLAPKLIAEIGDVRRFRNGKALVAFAGIDPPPYESGQFVGCNRKISKRGSASLRKVGYETMRSLKMRSRPEDPVYRYVVKKESEGKSKKSAKIAGLNKFLRIYYARVTELYKNI

SEQ ID NO: 515796 - protein, 351 aa, unidentified
MNTVTIGMDLGDKNNVVCVLNAKGKMVIETTIKNDRKSINIFFSKYKGALVAIEASTHSPWISRQLAALGCEVLVGNSRKLRVIWDSNDKADNRDANILARIARFDPKLLYPITHRGKQAQIDLEIVQARDNLVKNRTNLINHVRGSVKAQGERLLTCSTESFHKKVEDSMPDFLKETLTPIVKIIGQLTEQIKEYNRKIEQISKEQYPETELLRRIKGVGPVTALAFVLILEDPERFAKSRQVGSFIGLTPRRDQSGEIDKQLKITKAGNPLLRRLLVSAAQYLLGPFGEDCDLRRFGLRLSARGGKNAKRRAVVAVARKLSVLLHHLWRHGEIYEPLHINKQRKLAKAA

SEQ ID NO: 515797 - protein, 385 aa, unidentified
MAPIRMPEAVIGLDVGKSSHWACVATRDGEVLLSAPVANREDDLDSLFGRFPDALVVVDQSRNIGALALARARAAGMSAAYLPGLAAHGAARLFAGDAKTDERDAMVIAKTALGIPDALLPVGDPGPTIAAARALAAQRNFLTCENTRNKNRLRSILLESCPAFEALVDLSDGSQLRLMASLGGAWSVAAAGPRRAAALTRGAARGKIEALVRSTTSSTRPDASVVAAEDRAVKLLARRISENSAEIEAITAEISALLEGDDTYRCLLTVPGIGPKTASELAISIDIEDFPSHDRLASYCGLAPRNRQSGTSISSVTASRQGNKRLKNLLIFSCNCLTRTEGRWGDYYTRCRERGMSHGKALKALARKRLKVIYAVMRDRVPYAA

SEQ ID NO: 515798 - protein, 343 aa, unidentified
MQSISTIGLDIAKSVFQVHGIDATGQVVVRRQLKRRHVLAFFTKLQPCLIGIEACASSHYWARELQAVGHTVRLIPPAYVKPYVKRQKNDAADAEAICEAVTRPNMRFVPIKTVEQQGCLVLHRTRHLLIRQQTATINSIRAHLGEFGIVAPVGRRGVEHLLEVIADPNDTQVPEVARACVATLGVQLRQLKAQILELDRRILVWHRSSEASRRLNQIPGVGPLLATALVASIADPKAFRSGRDLSAWIGLVPKQNSSGGKEKLGNISKRGDRYLRSLFTAGALAVIRYAKLHGTKHRPWLVALLARRPTKVAAIALANKLARIAWALMTKGSRYRQPAALRV

SEQ ID NO: 515799 - protein, 275 aa, unidentified
MSDSIVVGIDVSKNQLDVAFDPVGKTLAFANDAQGHAALIKMIKPLSLQLIVLEATGHYEQLFVSALLAEALPVVVINPRQARDFARAIGKLAKTDAIDAAMLARFGRTVQPEIRPLADQKTLLFQEKLARRRQLVQMHTAESNRLKQARSEPVQQSIGQMMDLIKQQLADNDDDLGRMIHDCPAWREKEQLLKTMPGIGKQTARILLIQLPELGRCSRQQIAALVGVAPINRDSGKRRGQRTTVRCGLYMATLVASQHNPVIKAHYQHLLALGK

SEQ ID NO: 515800 - protein, 323 aa, unidentified
MAKRITICAGVDTGKRKLDVAIDGSSEELQIDNTVEGHKTLSDWLRRHRVKRIGIEASGGYEQAVVAELRRKRFVVVVFQPAQVRAYAQFHRQRAKNDKIDAALIASCTTAVRTIHAPPDPRLLPFAEHLTMIDQIGEDIARLKNRLESCRNPHFQQVWNEDVACLNKREKTELKAVVAAIRQHRDLAERLDLVESVDGIGLPTAVAILVRLPEIGKITREQAAALAGIAPYDDDSGEQVGVRHIDGGRERLRRALYTAALPASFRWNKQLIALYRRLIAAGKGHKRALIACARKLLIFANTVVARGTPWQHEQPPITATPGA

SEQ ID NO: 515801 - protein, 356 aa, unidentified
MSKNITADQAITIGLDLGDKYTQCCSLDDSGEVEEVFRVRSTGPGLSKRFGSLAPCRIILEVGTHSPWVSRLLSKLGHEVIVANPRRVRLISTNDSKNDAVDAELLARLGRADPKLLSPITHRGPQAQKDLVLLRNRDGFVRSRTQLINQARGFAKSLGDRLPSSSSVSFPKRVREAKKGEIFPGLETLLQLIDSLTAAIADMDREIERLCREQYPETKLLRQIKGVGPLTALCFLLTIEDPHRFKKSRSVGAYLGLRPKQHDSGEQQPQLRITKSGDEMLRRYLVNGSQYILGPFGPDSHLRRVGLRLAERGGRAAKKRAIVAVARRLAVLLHRLWVTGEEYQPLGYGSTDLEAA

SEQ ID NO: 515802 - protein, 347 aa, unidentified
MIIIGCDLHTRTEQVAMLDTETGEVIEKRLDHESGEAKRFYAELKEPALVGIETTGYTRWFAEMLSELGHELVVGEAGKIRAVRPRKQKHDRGDAEHLLNLLVRGDFPKVWLPPPAERDVRVLVEHRHQLVELRTRAKNGLQAMALSYGIRKRGRLWSQAGQEELKKIPLREGMGRRRQDLLRLLAQLNAWVKELDQRIEEEVAGRQAAQLLMTHPGVGPQTALATVLVLGPVERFPDTRHLTSYLGLIPEEESSGSRQRFGHLTKQGNRLMRFLLVEAAQTASRFDPGLKRVYRRLAFRKGAAIAKVAVARKLAIRLFIMLRDQIDYAEFVRRGSHAGMLGDVALA

SEQ ID NO: 515803 - protein, 430 aa, unidentified
MGLIVPTTTHPEREDQPLPYEWFVGIDWGSQQHQVCVLDRDRRRVGERAVDHDGASLSRLADWLWTMSVGQPQRVAVAIEVPRGAIVEGLLERGFHVFAINPKQLDRFRDRHSVAGAKDDRRDAFVLADSVRTDRPSFRRLHLDEPHLLLVRELSRAEETLLEEFRRSANRLRDQLHRFYPQMLQLCSAADAPWLWDLLDLAPTPAHAALLSAEQVQRVLKAHRLRRITATEVLACLQAPALPVAPGTAEAAQAHCGFLLPCLRVLAEQLRACGQQVDALLRTMADEPGAGERPSDVAIVLSLPGVGRKMTAWLFAEAAQPLAERDYQVLRTHSGVAPVTKQSGKRRLVVMRRGCNPRLRHALYHMARVAMQRDAHFSSVYTALRAKGQRHGQALRTMSDRLLRILVAMLRNGTCYDASRIRRESAVQMG

SEQ ID NO: 515804 - protein, 449 aa, unidentified
MAQSKKITKGMPIVNDSAAGIDIGSRFHVAAIPPHNEKETVKTFQAFTSDLHQLADWLLESGVTTVAMESTGVYWVPVYEILEERGLEVILANARDARNVPGRKTDVNDAQWLQKLHACGLLRASFRPDRDIAALRAYLRQRERLLDYCAAHIQHMQKALTFMNLQLHHVVSDITGVTGMKIIRAIIDGERDAGKLASFRDPRCKASEATIESSLSGNYQPEHLFVLEQAVSLYDFYQLREHDCDDQISAALTQLNHQKTPPDEPLPKPRHKTKQSNALSFDVRSDLYHLVGTDLIQIHGIGPYLALRLISEVGTDLSRWPTAKHFTSWLALSPGSKISGGKVLSSHSKKSNNRITAHLRLAATTIGRSNTALGAFYRRLSARIGKAKAVTATARKIAILFYNAMRYGMNYNDPGASYYEEHYRSRVIKGLHRRAAEFGFTLQAAECVS

SEQ ID NO: 515805 - protein, 312 aa, unidentified
MTKTICGVDISKKHLDARIAPGEAFARFTNDAAGIAKLAAFCGEHKVELVVMEATGGYERLAFTLLWEAGAACAIANPRSVRQYAEAMGFLEKTDRIDAFVIARFAHSKGLKPTPPSSKIQCRLKGLVVRLRQLTDDLVINKQRRHQVEDEEIRATFDDIIALIKRQSRRLEGEIASLIDDDPLWAVLDKTFRTVKGVADRTVARIMAELPEIGTYDNKAISKLVGLAPLAHDSGKKNGKRSIRGGRSGVRSILFLVADIARRYDPSLADFHRRLVAAGKPKMVVRVALAHKLLVRLNAKARDARAQYANAT

SEQ ID NO: 515806 - protein, 350 aa, unidentified
MVVVGADVHKRTHTFVAVDQAGRKLGEKVVAATTVGRHKALVWARVEFGNELVWGIEDCRHLSARLVRDLLSAGQQVVRVPPKLMAQTRASARTRGKSDPIDALAVARAVLREPDLPVASHDAVSRELKLLIDRREDLVAQRTSAINRLLWRVHELDPERAPKPRSLDLAKHRELLRAWLATQPGLVAEPARDELADISRLTEAINALAKRIAERVRVVAPALLALPGCAELTAAKLIGETAGVSRFKSESAFARHAGVAPIPVWSGNTTGRVRMTRSGNRQLNAALHRIAVTQVRLDGIGRAYYRKRRDAGASKTEALRCLKRRLARVVFHHLHTDHQTRNQPCQTAAA

SEQ ID NO: 515807 - protein, 375 aa, unidentified
MTNYTTQVAMDTHKKEHKVALHYPGDEQIVEFTVKNTTRDIKKMVNKIKKHAPADVRFCYEAGVCGFTLKRRIEALGCKCEVIAPSLTPQKPGDRIKTDRRDAKKLLAMFKAGLLTEVYAPDQKQEAAREMTRCRQTAQENLKRIRHQLLKFLTRQGYVYTNGNHWTQRHLRWLCSLEFDEQPLLRDVFDNYFTQMQHCMQRLDSLDKEVEKLAESKTYKEVVGLLRCFHGIDTLTAITTITEIFDFGRFSSPGELMSYLGLTCSESSTGEKEHKGSITKAGNKRVRRLLIETAWHYRHPYIARCKALRQRRKDQPQWVIDIADKAGQRLRKRYWYLINRGKMPCKATVAVARELAGFIWAVFKEYQARNQEKAA

SEQ ID NO: 515808 - protein, 335 aa, unidentified
MEFEFFIGIDVSKNELDFAVRQGSRLLFHQETNNQPDAIKGFLKELKKQRGFELNKAVFCMEHTGIYSNHLLLLLHKQKANICLQAATHIKQSLGNIRGKNDKVDAIRISEYAYDKREKLRLWEPKRNVVQQLANLASARSRLITAKKLLKTPLGEHRDFSTKQIARQSLHSCNHSLKAIEADLERVDKAILFIISTDNELKRLFDLVTSVTGIGTITAAHIIVTTNEFKDISDPKKFACYAGVAPFTEESGKLIRKARVHHMANKKMKTLLHMSAIVALRYNEDLRLFFERKVKQEKKHKMSVINALRNKLILRVFACVNQNRPYEKNYQRLLA

SEQ ID NO: 515809 - protein, 410 aa, unidentified
MLFIGDDWAENHHDVELMDTSGRRLAKARLPEGMAGMVKLHAMIGQALGDDIDAEGVAARVKIGIETDRGPWVQALIAAGYTVYAVNPLQAARYRQRLAVSGAKSDAADAHMLADMVRTDSHQLRPMAGDSVDAEAVKVVTRMHKTLIWERTRAGQRLRHALREYFPAAVEAFEDLDAVDTLELLAKAPDPDSAARLSVSQISAALKRARRRDVATKAAAIQAVLRTEHLGQPAVVTAAYAVSVRALVALLVTLNEQVKALQGQVEEHFGRHPDAEIILSQPGLGAILGARVLAEFGDDHDRYATAKARKNYAATSPITRASGKKKTVAARFVHNDRLVDALMTQAFSALQKSPGARAYYDRQRARGASYNAALRQLANRLVGILHGCLKTGTAYDEATAWPHHLIEAAA

SEQ ID NO: 515810 - protein, 370 aa, unidentified
MGNRSMFVGLDVHKETIDVSIAEGDRRGEVRHFGVIKSDLEPLDKVVRALRAPNRCLHFVYEAGPCGFGIHRHLTSHGEDCVVVSPSMIPKRSGERVKTDRRDSQMLARLHRAGELRAIYVPDDTDEAMRDLVRAREDAVVVGTQAKYRLKAFLLRQGRRYPGREGWTLPYRRWLSDLSFPSAAQHIALQEYRDAIGETEQRIERLTEQLRQLAPAWRWAPVVAAFQALRGVSFITGVSLVAELGDLTRFRHPRELMAYLGLVPSENSSGPRVRRGAITKAGNPHARHLLAEAAWAYQGKPRIGRKHADRQEALPKVVCDIAWKAQLRLTTRFRRLVARGKAKPKVATAIARELTGFIWAIAQEVSPAPQ

SEQ ID NO: 515811 - protein, 356 aa, unidentified
MGEGSWVGLDVHARSVVAGVIDQASGEVRSLRVPPGSDATVSWLQTLPAPVRVVYEAGPTGYRLARACAEVGISCVVAAPSKIRRAADRVKTDRRDAERLARLLRLDEITPVRVPGPEEEAARDLVRAREDARGDLMRARHRLSKLLLRHGAVYDATAWTRAHDQWLRRQRFPSGPRSIVFDECYGRMVDAKTRRDALDTAISELAAREPYVDVVERLVCLRGVSTLTAFALTVELGDWSRFRPESLGPFLGLTPSESSSGERRRQGAITKAGNSHARRLLIEAAWHQRQPSRRSITLERRRTGKPAAVRAQAERSGRRLHRRWQALEARGKPRTIVVVAVARELAGHCWALATMD

SEQ ID NO: 515812 - protein, 354 aa, unidentified
MIIIGVDFHPAYQEIAAVNTDTGEYQEKRLAQPQEAEEFYGSLAWVGQAVGVGMEASGQAQWFERLLEGLRWELWRGDAAVIRAKRGRKQKTDREDARHILKLLLKDAFPRIWVASWENRDLRQLLWHRHRMVQARTRVMNQLQAVALKEGLHCKKRLWRASGRQQLECLQLAPWSSRRRGELLELLDRLNPTIAELSQAVEREAEKCPEAQRLMTHPGVGALTALAFVLIIGNAERFGCGKQVASYLSLVPLEKSSGNRRRLGHITKPGSSLVRFLLVEAAQVTVRSVPEWRSKYHHLVLRRGRKTAKVAMARKLAVRLYWMWRKGWDYEQWKKFGSYVGQPGHRDGAQSITE

SEQ ID NO: 515813 - protein, 427 aa, unidentified
MPYKIAGIDVHKRMLHVVVSDVQVDGEYDFTRRVFGSLPEALRSLAAWLVEQQVEEVVMESTAQYWKPVWGTLERYWKRICQTREGALATSGTLHLAQALSNRGRRGRKKDFRDAERLVKRLVAHELTLSFVPDVEQRLWRTVVRTKYQLTRNRVQLQNRLEALLEEAHIKLSSLVSDLLGASARRMLEAIAGGETNRETLAALADRGLRATQEQLQDALGVCQELNPVYRRLIKMVLDEVASIDKRIDQLNQEMASLLRPHEDQVKRLAEVPGLGVDSAQQIIAEVGATAATFPSEKHLSSWVGACPGDEESAEVNYSRRSPEGNRHMRRILNQAANAAAKHKGSIFQILYGRYVPRLGHNQTIGIIAHKLCRLVWKILHRGIRYEERGPEVSKASKQKRIRKMIRQLRRLGYRIEPSPSQSAVTA

SEQ ID NO: 515814 - protein, 344 aa, unidentified
MKIKLLGIDLAKNVFQLCALNQANKVLFNRTVRRVRFCSTIAKLDPTTIAMEACSSSHYWGRTFETMGHKVLLVPAQHVTPFVRGGKSDARDALAICEAAQRPGLHPVPIKSIEQQDIQLLHRLRQRQVQHSTALANQIRSLGREYGVIFPAGIKSLISQLPEALEDGSNELSPVARYALADQHRCLIEVRKAMTTFLHQIEQLAAQHPAYINLLPLPGIGPMVASAYIAAIGNGRQFKCGRQVSAWLGLVPRQYGTGGKIQLRGVTKNGDRYLRTLMIHGARAVISRGLKTRPELAHWVQPIIDRQGFNKAVVALANKLTRISWVIVTTGESFDVKQAFKPAE

SEQ ID NO: 515815 - protein, 428 aa, unidentified
MNTNQPPVGTADQYAAFIAIDWADQQHVFSLQVAGQTKKETGTLEQKPEVIGPWIAQLRARFGGRAIAIGVEQSRGALLHALLGYDFLVLYPIHSTTVAKFREAFKSSGAKSDPLDTDQILLILTKHLELLKPLRPDTVATRLLARLTQDRRKVVDLRTTHIQALLAGLKEYFPQAIELFNGNVTSRLSADFLKKWPDLPAFQAAKPAVLKKFYYGHNVRTPEVIEKMLQLAATAQPLTTDPAIVESGRQLSRLHSQVIQTLNASIAEYDERIAAVFASHPEAKIFTGLPGAGAALAPRLLAFFGTDRTRFATASNVQCFSGIAPVTKSSGRSKVVHFRLACPKFARQTFHEFARLSVAQCQWAANFVEYHTGRGKKYQAVIRALAFKWIRILTQCWKNRTPYDEQKYLADLKKRGSIFATLHLEKKS

SEQ ID NO: 515816 - protein, 321 aa, unidentified
MNYVGIDVSKATFVVAYSSAKGSETKTFKNTNKGVHKFIQTITPEDTHCVMEATGNYSMLLVYLLSKAGITVSMENPLKIKNFARVMLSVVKTDEIDARMIAMYGEKMNPAPFKLRSDSLMVLKQKRTVLRQLKKQLNANTNLQESMEALPFIDSVCKKILDKTMKFLRKQINEMEKELSSIANIEYRKQMDLLTSIKGIGVTLATALIVATGGFTYFDNAKQLTRYLGLSPTYQQSGTSVNRKGHINRNGDSYLRSQLYVAAFSSLRCNTECKACFDRLRANGKPGKVAVIAVANKLIRQAFAVVTQGKEYVDGFISAKK

SEQ ID NO: 515817 - protein, 387 aa, unidentified
MPKQNDLSRSLITLEQDATVIAVIEMGQSSGLVAGIVPGLERNPLKKLSPDHDALLPLLHRWRKEAVQAGRTIKRIVVAYEAGRDGFWLARWLRAREIEAYVIHPSSVPVSREHRRAKTDRLDTELLKRAFLGWLRGEPKHCSMAAIPTLADEDAKRPGRERQSLVGERTRIINRLKANLARLGIRSFRPNLAQASNRLEALRTPEGSAVPANTLAEMQRDMDHLRFIKQQIKEIETTRAKRLAGAPNEQRHAMVRLLARVVGVGIETADMLVQEVFSRNMRDRKALARYAGLTGAPDESGKKRRERGLAKAGNARVRRGMIELAWGHLVHQKDSALTAWYRKRTSDARGGTRKTMIVALARKLLIALWRLVTTGETPAGLLLRAAA

SEQ ID NO: 515818 - protein, 448 aa, unidentified
MPAVHAKPTQRKHAAGIDIGATSIYVAVPVDRDPQPVRSFQTFTEDLHRLADWLQRCRIKTVAMESTGVFWVPLFQILEQRGFEVCLVNARHVKNVPGRKTDVADCQWLQYLHSVGLLQASFRPAQQVCALRSLLRHRDSLVQTASTYAQRIQKALDQMNLQLHHVISDITGVSGVTILDAIVDGERDPLKLANLRDYRIKATTETVAKSLVGDYRPEHLFTLRQSLEAWRYHRKLIAECDDEIQRHLVQFASKADPKQNPLPRPRKVSSSKVYSSAPDYDLRTEHYRILGVDLTEVPGINTLLVHTLLAEVGPDLSKFRSAAAFASWLGLCPDNRISGGKILSVRTRHVQNRAALALRIAAHTLHHNQSVLGHYYRRMRAKLGAPKAITATAHKLARILYHLLTTGQPYQESIFEERETQHQQRTLFSLHARARALGYQLIPLAPTT

SEQ ID NO: 515819 - protein, 409 aa, unidentified
MDQLIERCCGLDVHRDTVVACVRGPGPNGRRQHQVRTFGTTAVELLALRDWLEAHAVTDVAMESTGVYWKPVFYVLEEAFTCLLVNAAHIKQVPGRKTDVKDCMWIAQCLEHGLLRGSFVPPAPIRELRDLTRHRKVLIQERTRAANRLHKLLEDAGIKLASVATNILGVSGRAMLEALVHGTTDPAVLADLARGKLRKKLPALRQALAGRFRPHHAFLVGQLLAHVDYLDEAITTMSEEVEGRLAPFAAQLTQLDTIPGINTRTAEVIIAELGVDMSCFPSDRHLASWAGICPGNNESAGKHQSGKTRKGNRWLRMTLIEAAGAAIRTKDSALGARYRRVMRHRGHKKAVVAVAHAMLRAVYHLLAEGTTYREPGADYYDRHHTHRVTRRAIQLLERQGYRVVLEPAA

SEQ ID NO: 515820 - protein, 403 aa, unidentified
MINVGIDWAEAHHDVYVEDDEGDELAKGRVPDGIEGVERIHEMLSAHADDPAQVAIGIELDRGLLVEALVAAGYEVHAVNPLAVSRYRDRLAPAGAKSDPGDARVLAEVMRTDRHLHREVAGDSSQAEAIKVLARAHQNLIWTRQRIGNQLRSVLREFYPGALRTLSDLASADAIAVLGIAPTPTTARALTKAKVRRALASGGRKRRLDDRASEIVEALRAPQLGAPALVEEAFGHQVASLVAVLRTLAAQIEELRAEVERSFEGHPDAEIITSLPGLSSVLGARVLAEFGDDRTRYADARARRCYAGTAPITKASGTRRVVLARVARNKRLADACYGWAFSSLHGSPGARAFYDRLRASGKTHNQALRALGNRWVGILHGCLEHREPYREDLGWRSGLKTAA

SEQ ID NO: 515821 - protein, 234 aa, unidentified
MRKSSKLLVGMDVHKDSIDVATGDEGGGEVRHFGAVGGDRAAVLRLVRKLEATGKALVFVYEAGPCGFGIYRLLRGRGHECWVVSPGLTRRSNADRVKTDRRDCPKLCRLARAGELSAIYIPDEAGKRVERIETAIRAELPQWRWQPVVEALQAFRGIRAIPAVRLGAELGELSRFTSVRHLMGYLGRVPSENSTGAHRNPRTPTTRSTPPNPTTRPDRRRGALAVGEPSSERY

SEQ ID NO: 515822 - protein, 340 aa, unidentified
MRQLYVGSDLHGNNNLLGIIDERGKRVFKKRLANDSELIKEVLKPYKEELVGIVVESTYNWYWLVDALMEEGYKVHLANPSAIQQYSGLKHEDDKHDAFWLAEMLRLGILPEGYIYPKEERPVRDLLRKRGHLVRLRTSLILSLQNILSRNLGRKVSVNDVRRLGEDRVTPLLERSEDLALAGRVSKETIDFLTYQIHTIERVVQKRITLKEEYRYLLSLYGVGKILALTIMLETGPIGRFETVGDYVSYCRKVPSEWTSNGKRKGSGNPKNGNKYLAWAYAEASEFSRRDYPEPRAYYQRKMQKTNAAVAHSALGHKLARAAYYVMRDQVPFKPEKLFG

SEQ ID NO: 515823 - protein, 347 aa, unidentified
MRFYTTQHPFYCGIDLHARTMYVCILNQAGETLVHRNMTATPEALLKAIAPYREQIVLAAECMFTWYWLADLCAEHGIPFILGHALYMKAIHGGKAKNDKIDAHKIAVLLRGGMLPQAYVYPAEMRATRDLLRRRMHLARKRGELLAHVQNTNSQYNLPAIGKKIAYKANRDGVAERFADPAVQKSIEVDLALIGYYDALLRDVELSIVKTAKHHDANTLYLLQTVPGIGKILSLVLLYEIHDIERFPRVQDFASYCRLVKCARESAGKRSGTSGNKIGNAHLKWAFSEAAVLFLRDNPAAQKFLARLEHKHSKGKALTILAHKLARAIYYMLKRQTAFDLDTFLRG

SEQ ID NO: 515824 - protein, 375 aa, unidentified
MKSITKFVGLDVSRDKIAVAVAERGAGAARYLGVYPNTLEAVRKLLNRLGRPEELHVCYEAGVTGYGLARFLRGLKIECMVVAPSKIPLAPGPRVKTDRKDAVMLAERLRTGDLVSVWVPDEADEALRDLVRARKARMEDLKRAKQRVNMLLLRHGITKPEKTTPWSERYRAWLRGLELPQKNSQAVLQEYIIAVEEVEQGVRRLELLIKDTAANSPHAPVIQALQALRGVQVIAAATIVAEVGDFTRFAHPEQLMAYAGMTPRESSSGDRVSRGGIMKTGSAELRWICNQIAHSYRYSPKVAGDLARRLEGLSPEIQAIAWKAQIRLHKKLVRLMAKGKCRQVAVTAVAREFLGFAWAIGQKVCFETAVGKRSA

SEQ ID NO: 515825 - protein, 342 aa, unidentified
MDIEFLRVDLGKTVCSLAGLDASGAVVFRKRLQRHRLLDFLGGLPTCVGAMEACGGAHHIGRYCLQLGHEPRLMSPLYVRPYVKLHKNDDRDAEAIAEAATRPTMSFVAIKSEEQLDLQALHRARERLVTERTRLINQGRGFLMEHGVRVGTGRHVFQKELMRLAAEGAADLSTRMLSMLSDMAIELGTINGRVDAIDTEIKSLAKADADMQRLMEIPGVGPTIASALVAAVGTGSSFAKGRDLAAWLGLVPRQITTGGKAKLIGISKHGNRYLRKLFIHGARTVLHLVRDRSSPIPRWADGPKERAHVNVAAVAMANKIARIAWAVLTKGERYRPTALVGA

SEQ ID NO: 515826 - protein, 431 aa, unidentified
MKGGDFMKNNLISTLFVGIDVSSKTNVLCALDFKGNKLLNLKALNNQPGAESILESILKCLDSNSLKYVVIALESTSFYSTHIANYLSSNEILLAYKPFVYCLNPKTVANYRKSFVDMDKTDPLDAYIIADFARCGRITSAPWRGSQFLALQRLTRHRLHLVESITREKAYMVSNIYLKFSELATLDKGEKPFSDTYGATSAAVLTEFLSLDDITYSPIEDLVAFVRDKGKNRFSNPLKTAKLLQKAARDSYRLDRMLYEPLNVSIASSFNVIKALEDEIKVIDKSIDKAIKGINTTEYQSLTSIPGIGSVLASGILAEIGTITSFRSHDALAKYAGLTWRVNQSGNYSSDNTRMTKTGNKYLRYYLIEAANSVKNHLPEYKEFYQKKYSEVTTHQHKRALALTSRKLVRLIFSLLTKNQIYSKDKVGEIQ

SEQ ID NO: 515827 - protein, 407 aa, unidentified
MEGLSERVPVDRVIVAIDPGKVLNRVWITTADGLVGRPLSLPTSRSGLERLDELVGVNGPPVFALEATGSLHRAWAAELERRWPGSLRMFAPSQTRAARSQLGTRKFKTDDRDCAALVWLARQGAGEPASDSVVEALRAAVSHRRQLVLALKPLRQRLHDQLNALAPGLSAPKGHGRALALETSTGRAVLARAVAFAGRPPSVRSLKARADGRLSDATAAFWSTRWQDCLPPPTDAELRAERMDRDLARFDALREDIAFVDEQIEQLLADSAGEILTSLPGVSTTRAAAFAAHTLPIERFETPERLYSATGLAPTSYESSTVRRRGGISRTGVPEHRDALIGIARGLGQFAPAFKQRLAELRARGKSPLEARVALARHACRPCRRMLRTQEPYDDRRYDRARRDRGR

SEQ ID NO: 515828 - protein, 417 aa, unidentified
MKKNSNSQTKSGQKAKARGPVQRDSKEVMAELVAKLSERLGPKPAQENGTEGKPQDASQGEPAPNRDRLTVGVDLGDRWSNYCILGLEGETLGEGKLRTAREDVAEFFRALSAARVILEVGTHSAWVREVVVGCGHEVLVANPRLMDGTKRRKRKNDRIDANKLARLGRVDPQSLFPMQHRSPEVRQDLVVLRARDALVTVRTQLINATRGLVKSMGARLPQCSSPSFANQVEEALPTEVREALLPLVRLAETLSDCIKVYDERIEKLGREKYEHTELLRQVKGVGPLTSLAYVLTLENPDRFAKSRDVGAYLGLVPKQEDSGDSQPQLGISKTGDVMLRRLLVGSAHYILGPFGPDTDLRRYGLRLCARGGKNAKKRAAVAVARKLAVLLHRLWVSGEVYEPLRHGPPTAAVGEAA

SEQ ID NO: 515829 - protein, 348 aa, unidentified
MDRYIGLDVHAQTTTFAIMSAKGKRLAEKVVETHGQLLLEALAAVAGDLHVCLEDGMHAEWISELLAGRVNEVVVIVPPERIGPKSDARDAWWLADQLRLGIPHKRIFKTQLSALREAVRCYQTFVKHSTRAKLQFRFLALGRGLAVRRTQLVKESERIELVSQLPPVRQARATLHAELLDFTERMRQQALGQLEKEVRTCTDVRRLMGVPGLGSVRAAQIVATVVTPYRFRTREQFWSYCGLGIVTRSSADWMPRNGKLVRSDRFVARGLGQGNTTLKCVFKSAALDVVKHYPDHPWSVAFQRAVDAGKRPNLARLTLARKIAETVLHIWKHKEDYDSTKHRIQATA

SEQ ID NO: 515830 - protein, 338 aa, unidentified
MKLYGGIDLHSNNSVVALLDEQDEVVYHKRLGNDAQGILAALAPYEEAIEGLVVESTYNWYWLVDALMDAGYQVHLANTAAIVQYSGLKYSDDDSDARWLAKLLRLGLLAEGFIYPKAERAVRDLLRRRSRLVQQHTANLVAVQNLMARNRGRSLSANAVRRLTPEAVERLLPEPNLALAVQSTLLAMRGQEAAIDLLEHQACAQVRLRPAYRHLLTVNGIGKVLGLIIMLETGPVQRFAKVGNYSSYARCVGSERFSNGKRKGRGNTKNGNKYLAWAYIEAANFAVRFNPTIKRYYQRKSAKTNGIVAIKTVAHKLARACYYILRDGTDFEVTRAFT

SEQ ID NO: 515831 - protein, 416 aa, unidentified
MNAAGIDVSSRKSTVAVLRPFGEVVRLPFDVAHNTEGLASLAEQLKALDGETRVVLEHTGRYYEPVAKALHEAGLYVSAVNPLLIKEYGANSLRRVKTDKADAVKIARYALDNWADLRDYTPMDTIRYDLKTLNRQFQLASKQRTASANNLIALLEQSFPGIRKCFDSPVRSDGTQKWVDFIHTFWHVECVRKQSLNAFSERYRKWCKRHGYIFKQGNAVEVYSLSKNAVVLVPKSEVTKVLVQEAANQLTSISRSVETYRAEMERLASTLPEYPVVMAMYGVGKSFGPQLMAEIGDVRRFERKQSLVAFAGIDPMPNQSGDKNVRSNKSSKRGSPYLRKTLFNIMWIYLKCSPQDEPVYQFLDHKRSEGKPFYVYMTAASNKFLRRYYAQVRDYLSTLDDLPPVDMDSTGLKPSD

SEQ ID NO: 515832 - protein, 322 aa, unidentified
MSLPGPLCVGIDISKATLDIAASSAIAQFSVANDADGFDSIIAELRKHSVALVLMEATGGLEAAVACALQAEGFELAVVNPRQARDFARAMGYLAKTDSIDARALAQMAEVINRHPERDRFIRALPDAERLVLNAIVVRRRQLIAMLVAERNRLYPAHPQSRKSLNIIIKALEDELARIDDDMNNHIRSHFKALSERLSSIKGVGTMTVAALLAEVPELGRLSRREISALVGVAPVNRDSGTMRGRRTIFGGRAGVRTALYMSALVATRFNPVIKEFYTRLVAAGKPKKVALVACMRKLLTILNAMLRKNEEWNESYHHVVP

SEQ ID NO: 515833 - protein, 464 aa, unidentified
MAHKSLSFKKKQHFLQLIKDIPTDRILFCPVDVSKHFHVALLHDIRCQPLSDFFEFSASKIGFTSFIDKLEGAFTIQAPQLVLIGMEPTSVYYEGLLHNLRGRYATITTPKLQLCIIDPAAVKENRRQHSLRTQKTDQIDAAAIGELLTRGLYTPAYFSSPQAILIKELARSLNDHRQQMLALWNRLLTRLDRVFPNLLINYRDEKPFARQPLESKLLDDLLHLCPDPYLILDLTTADLIELFHQQDRPLGPKRAEKIIQAAQRALLPPKDLHQVHLQLFKAELETLDFLKAQIAKLERQLEQLIIQSPARHLLAIAGNSAKLTAELIAALEDWQRYDTIQTVWAAAGFAPIAEQSGSSSAKPKISKRGSVHLRNAIYKMTCSVIWHEPAFGIPCFQRLLNHHPFVPTILHVGRKLTGTALAILKADRAFHPPIADYSLAKEKLSLLQQQYLKQKKQTASQDRK

SEQ ID NO: 515834 - protein, 355 aa, unidentified
MNSVRYVGLDVHRDTISVAVLDESGRLIMQSVLATRAAAILDFIHGIRGRVHVTFEEGTHSAWLYDVLARRVAKLVVCNPRKNALLKSGSKSDAIDARKLAELLRAGMLSPVYHGESSALEVQHRARSYTMLTEDTTRVMNRLKAVFRGQAIGCTGKKLYGKRHRQGFLVKLGEGGLRRRAECLYEQLDALQPLRHQAKLELLVECRKHAAAKWLQSVPFLGPLRAAVLIGRVQTPHRFRGKRQFWTYCGLALETRDSGEYRVVNGQVERRKRPVLIRGLNWNHNHQLKDLFKSAATAASARDGVFHEFYLGLLNKGMRPEMARLTLARKIAAIALKIWKEGETFDQGHVKPQAA

SEQ ID NO: 515835 - protein, 441 aa, unidentified
MDTSRTVIGFTELTHFAGFDWASEKHDVAVVDRQGQKLLELSFPDTAEGWGALRAKLAALAAPAKDLGRIGVAIETCRGPAVERLLEMGLTVYPMNPKAAERYRDRKAPSGVKDDTLDAWSFADALRTDGHDWRTLLPDDPATQELRILCRDEIGLIRERTALVVRLREALHEYYPAALEAFDDWTLESAWDFIARFPTPQDLARKGQRTWEKFLHTHRLGHPETYARRMAVFARAAEFVSPSAAVTSAKSLLAVSIVKQLKTLQEQLHTYRERIEEAFAKHPDHDTFDSLPGAGGKLAPRLLGELGANRAVFASAEDLQCYAGTAPVTLRSGKRCWAKLRRACNKTLRFTVHLWVDQSRHFCAWAQAYYQKKRAEGHNHATALRCLGQRWLKILWKMWQDHTSYDEARHALDQVRHGSWVIGLLPPTQTTPAPAVPLPAA

SEQ ID NO: 515836 - protein, 414 aa, unidentified
MALIRWVGRAIGLDVHREFCVVAICEDGKVRSAGRVPSTPDGLRLLAESLLPTDRVALEVTGSCWEVARILEPFVQQVIVVSPDDTGISSARAKTDKLDSRTLAGLLWKGELDAVWMPDERCRTLRRRLARREQLVRGRTRAKNEIQAVLQRRLQAKPGFADLFGVKGRRWLADLELPLEERESVDAGLRQIAFLDAEIAAVDKLIARQALDWPEIRRLMTVSGVNLICAASFLAAIGDPSRFMSSRKLVAYLGLDPKVRQSGEAPARSGRISKRGSANARWALVEAAWSVVKQPGPLRGFYERLRARRGHGKAIVATARKLTVLFWCMLTRSEDYAHQRPALTKKKQRQLELTAGAPARSKQAAGIWSTNRAILHAERALAEQAEVSYQRMITDQQAGRPSRKVGASATPERA

SEQ ID NO: 515837 - protein, 291 aa, unidentified
MEVTTIGLDPGKDVFQVHGITADGAVVFNHSIRRRQLLKFFETLPSCLVGIEACGSAHHWARELSAIGHEVRLMPAIYVKPYVKRGKTDAVDAEAICEAVTRPTMRFVAVKSKEQQALLTIHRVRQLIVRQKTQMLNVIRGLLRELGRVIGNGPVAALRFVKTFQTDDCLDIPDVAESMLKTLCDPVISLDERVKFYDKLVEYHSRIDERAERIRTLPGVGPITASAIVATIGDGKQFKNGREFAAWLGLTPLNRSSGGKERLGRISKKGDRYLRRLLVIGMTSQVKRARG

SEQ ID NO: 515838 - protein, 355 aa, unidentified
MVGMVVVGVDAHKRTHTLVAVDQVGRKLAERTVATTGDGHLQAVTWAAQWPQPQVTFALEDCRHLTRRLEADLLRAGHRVLRVPTRLMATARRSGRQPGKSDPIDALAVAQAALREPDLPVAHLDGPTRQVKLLADYRADLVVERTTLCNRLRWHLHELDPELQVPSRGLRRYKVIDELAARLVGVDGTVAQIARELLVRCRELTVRINQLERDLRDLVRVLAPGLLAIPGCGVLSAATILGETAGATRFRSRHAFARFNGTAPIPVWSGNAVRVRLNRGGNRTVNWALHMIAVTQARGVGPGQAYVERLLGAGKTRPEALRLLRRRLSDVVFRVLLADENRQAATQPADTPIAA

SEQ ID NO: 515839 - protein, 361 aa, unidentified
MKRALKDNQDAFAGQDFYIGIDVHQKQWTISVQSNQMALAKPLTIDPSARSLSSYLQRQYPGGKYHAVYEAGYSGFWPARDLLTHDIDIIVVNPADIPTMHKERSTKTDSVDSRKLARSLENKELRAIYIPERQAEEYRLLNRYRSQLVRDETRIKNRIKGILAEFNYRVPVDLEGNRWSGAYLRWLQAVSFETPYAQKAYNERLAQLAESRQRLSTVLRELKQMAIQEPAIGSRVKLLQTVPGVGFLTAILLVVELIDMHRFKRFDDLVSYIGLAPSIHQSDERSYSRGLTKRQHKELRSRMLESAWIAVRKDPVLTLKYGQLCKRINKNKAIIRIAKMLLNRIRTVWITQTPYAYGVIE

SEQ ID NO: 515840 - protein, 412 aa, unidentified
MAVFCGIDWAEDHHDIALVDQDGALLAKRRIGDDAAGFAALLQLLAEAGDDPDAPIPVAIETSHGLLVAGLRATGRPVFPINPMSVSRYRDRHSVARRKSDAGDALVLANILRTDLAAHRPLPADSELAQAIAVLARAQQDAVWARTEAHNKLRSLLREFYPAVLAAFASKRGGLLRREARALLAAAPTPRTAARLTLSQLRTVLRRAGLQRGLDVEAQRLQQVLRADYLHHPPLIEEAFGQQTLALLRQLDTACANAEQLAAATAQHFAQHPDATIITSMPGLAELTGARVLAEIGDDRNRFADARGLKAYAGSAPVTRASGKSTTVLHRRVKNQRLASVGYVWAFAALTASPGARAHYDRRKNAGDRHVSAQRNLFNRLLGCLHHCLHTRQTYNETVAFPTQQATDTRAA

SEQ ID NO: 515841 - protein, 339 aa, unidentified
MGVYAGLDVSLDAVSICVVGETGEMLWQGKVLGEPEAVTAALDRWRDGLARVGLEAGATSEWIGGHLVDEGFPVVCLESRHVKAALSAMTVKTDRNDAHGIAQIVRTGWFKTVHLKSAAGQRLRTLTAARKAAVRALTGNEQVIRGLLRPLGLKIGAVTRVRFEARVRQLVGTDRLLLSVFEPLLRLHKSLRENLADLHRLVLRAVRADPVCRRLMTMPGIGPVTALTYRATIDDPERFRRSRSVGAYLGLTPRRYQSGEVDRVGRITKVGDGDTRTALFEAANVILRPSTRWSSMKAWAMKIADRQGVRRAKVALARRMAVTLHRMWVDEQDFRWTAA

SEQ ID NO: 515842 - protein, 344 aa, unidentified
MGQYVGLDVSLEVTTVHVLDEQGKRVWHGTCISHPAAIEATIRKHAPEVVRIGLETGPLTTWLWQALTDAGLPMVCLDARQAKAALNMRINKTDDNDAEGLAQLVRSGWYREVRVKSREAMLVRSLIGARTQLLGIVTELSNQIRGLMKTFGLVVPKGAGKVFEANVRRLLEDEAAVAAIVVPLLDSWRAVRTQTADLDRQLLAVVRENAECRRLMTIPGVGAIVAASFVAAVETPENFTTSRAVGAWIGLTPRRYQSGEVDYDGHISRRGDARLRALLYEAATTMLTRVQGESDLRRWSLALRNRLGFKRAAVALARKLAVVMHAMWKKSTDFNPRAAMSAGT

SEQ ID NO: 515843 - protein, 387 aa, unidentified
MQFFAADSQKGAFKDKEMVIMDFDAFVGLDVHKDSISIAIADPVRSGEVRRLGQIPNRAESVAKLVRQIKARHSRPEFVYEAGPCGYVLYRQITELGCTCRIVAPSRIPRVPGERIKNDTKDSEMLARLLRSGELNFVWVPDPVHEAMRDLVRARHVAACDVREARGHIQMFLLKNGLRYDAKSWSYRHRIWLADRSFEHAGQQVAFQSFLNRLEQAESRKEQLDAQIKQLSESWALAPVVNALQALKGVGPIVASTVIAEIGDFGRFASPRQLMAYLGIVPGEHSSGGSVRGRGITKSGNALVRALLFEAAWSYRTPPKVGQWQIVHRPKVDQVYKDIAWKAQLRLNGRYKRLIARGKKSNVAITAVARELVGFIWDIARRVPVNG

SEQ ID NO: 515844 - protein, 359 aa, unidentified
MLRIRKVVHPPVKDKRPTGAGLTGLSERYDHYVALDWAERVMALAHTKDPRKKPVAFERPADLKELRAYLSSLSGRVILTFEETTSAQWLYLELCDRVARIVICDPYYNRLLLHGPKTDKIDAAKLCTLLCAGLLKEVFHTSETLYELRRLVSGYEDLVRLGVGALNQRDALKRAAGPTGRAAGRFAPFVREHLEQTIALYQTMKPAYEKKFEALCRSHPLARRQKDLPGIGTIGAVKIVATVVDARRFPRAGQYLSYCGLVKHQKFSGGRSYGKRKARYHRTLKSVYKTAVHTALKGDNPVREYYDRLLRQSVAEHNARNACARYLARVSYGMLKSGERYEPERWKKTTTTTQEGADR

SEQ ID NO: 515845 - protein, 346 aa, unidentified
MEITTVGIDLAKTWFQLHAVGKSGKTVLKKKLSRGQMIEFFANLPTCLIGMEACASAHQWARKLQSLGHTVKLMAPQFVKPYVKTNKNDMADAEAICEAVSRPNMRFVPIKNLEQQAVLSLHRVRQGFVKARTAQANQIRGLLGEFGMILPQSIGYIKTRVPELIEDASNELPGAFRLLVQRLLDHFKELDRQVSELEGQIQSWHRNNTVSCKLAQIPGIGPITASALAASIGDAKNFKSGRQVAAWLGLVPKQHSSGGKQNLLGISKRGDSYLRSLLIHGARSVIYYASKKPQLHPWINGVVNRRSNNVAAVVGKTRGFRSTQSAWTRLRCRPAIPIKDSDSISR

SEQ ID NO: 515846 - protein, 400 aa, unidentified
MLSIGIDVSKGKSTVCGMKPGGEIVYAPFEVQHTREGMSELVSLLHNSGEEVRAVLESTGSYHCPVVAALLENGIFVSVVNSLRMKRFCSQSIRKVKTDRIDAMQIALYGLAYWQELQPTKLPEDTYRELQLLARQYYQMTSLLIKAKVDFNAICDQVLPGMQELMNDHAGRHKLSDFVLRYRHTTHILEMGETRFRKDYCKWAEKKGYRNCERMAVLIFATAQNGIPVLPNAPSTQIVITEAIRVLHTVEASRDAILTQMQALAKTLPEYSLVREMPCIGDTLAPRLIAEIGDVRRFHSKRALIAYAGIDAPPYQSGKFCANNRHISKRGNRYLRKTGYEVMQSYVMHKPANDPIFTFIEKKRGEGKSGKLAMVAGLNKFLRVYYGKVTELYRSLPAIE

SEQ ID NO: 515847 - protein, 353 aa, unidentified
MIVIGVDPHKSTHTATAVDPATNSDVGSLRIEASLAEYRRLIVWAKAWPERTWAIENADGLGHHLALWLLALGEVVLDIPTTATARVRELSRGGRRKNDRIDAAAAASVAALQGDARQVHPETTSDSLALLDERRVNLSHSRTRTVNQLHALFRELMAGGAPTSLTSTSATAALRGFRPRTGPDRIRVELARELIADVRRFDEQLKANAAKIAVLLDEHGTRLREIDGVGPVLAARLLGRTGSPGRFASAAAYANYTGTAPVQIASADSCQHRLSRYGDRQLNSAIYTIAMVQIRMPASAGRVYYDKKIAEGKSPRYATRALKRHLAGHLWRIMLTDENRTTRAPSEVVAHAS

SEQ ID NO: 515848 - protein, 400 aa, unidentified
MNITHSIGLDVHKSSARYHIFDSAAHRVARGPLKAAKAAVQQLLEKLHADDPATVLVVAEATGMLHLDFCEAFEKAGCQVVAINPLYGRNRSISNSIRDNKKDKLDAESLAELGLRDREELLKRFAFHCPVERFELQRYVSSSKILRKSLTNIIKHTATTVHTLFPELDELRLSINQVRVRRILRDHPSPARIAALEVAELSRYLGNKAAALKQAAAQSFAIQAIGATCEEGLLGTLLDTIEHLQEHLKQMDRKIDQLLIPCAGTETIRLARSIPGFGANTTPAILAFIPPERLQQGSKKQITRKLQALFGTDPRVKESGKWKGTTKISKRGIEIARTALFQTAFCGMTHDPQLRQCYGSLKARGKNHKQTTVDLMRKQLARLVSVLVNQKTFTPIPSQL

SEQ ID NO: 515849 - protein, 345 aa, unidentified
MKHYAGLDLSMETTQVCIVDENGHKCASEKVESSPESLAVMLERRGPIERAVIETDRMSPAICLGLRELGVPVVCIDARQAHQCLKAMKANKTDPHDAAGLAQLARTGFYKAVHVKSPAAHGARSVITARSHLVEARVRLDNMIRGLCATFGYRPCSGQGKAFLERISQAAYIPGLGEAIASLLAVREELVAQIKEMDRRLRIIARQSQACEILMTIPGVGVQTAAAFAAAVDEAGRFRQSRNAGAYFGLVPRRHQSGELDWTGRITKQGDGMVRKLLYEAANSILTRSRESFALKEWTKKIAKRRGLKKARVAPAHRLAVIMHAMLCDGTLFQAWVKVKPVCQR

SEQ ID NO: 515850 - protein, 326 aa, unidentified
MFFIGIDVSKAKLDCCLSLDVEGTKRRAKSVPNSKPGILGLLAWCAKHQLAAQDLHAIMEGTGVYHEQAALALTDAGVTVSIVNPAQAKDFGRSLGIRTKTDGVDSLVLARFGALPNPRPWTPPAKEARVLQALLSRREAIAQDLRRERNRLEKADATDTPASIRQSIVDAIIFLEKQLAKLQQDIDNHIRKCPKLKADRDLLVSIPAVGPRVGNHLLAVIHNHHFQSAGQLAAYLGLVPIERQSGSSILGRPRLSKAGPARIRAVLYMAAVVATKHNPHIKALYQRLQERGKSKMSALGAAMRKLVHLCFGVLKTRQPYQANYAI

SEQ ID NO: 515851 - protein, 415 aa, unidentified
MLSVPINKACGLDLHKRFLIATILSRSDEMAQKRFERNDQGILDLKSWIIEKQCDVVACESTSDFWVPIYDTLINHVTVIVGNARDMKAYSHKKTDKIDSEFIAQLALNNMVKPSRVFPKFHREFRSYVRLRHNLVRKRTDIKNQAHAILSSEMFHLSDVLTDIFGKNGKMVLSGISSGKKFDEIVDKLSPNVRKKSEQIKEILEREMSQSAAVRLRTCLNLIQHIDEQISILETQMFNYVYKHHKHDMDILMSCPGIGELSAATLIAEIGDFNDFSSGDKLASWLGIVPNVYQSADKYHNGRITKRGSKVARWILTQIAQAASRKKASKLKEFFNRKKKTIGYQKAIIALARKIVTIIWHLITNNEMYEDETGYQKGEIQKRKIVETAEISIDERISIISEIFAIVNKKNTDVT

SEQ ID NO: 515852 - protein, 423 aa, unidentified
MKTPDNYVAFVGLDWADRVHRVCLRAADSTRDEQSDLTHDPLALHTWARELRERFPHGKIAVALEQSKGPLIYALMQHAPLELFPLNPAMLAKYRAAAKAASGVKSDPLDAHLACELVRLHRDWLRPLPAVAAPVRELQMLLEARRGLVDQRTALCQQLTAALKGYFPQALDLVNTVDTPLCWALLRRWPTLAAVQRARAETLRRFYGEHGVYSAERVEERLAVVRRAVALTDDPAVLAALPVQVTVLVAQLELLHAAIVDYERRIAALFSCQTDAALFAALPGAGAQLAPRLFVAFGPDRSRYDSAEGLQRYSGIAPVKKQSGHTCITQWRWHCPTFLRQTFHEFAGCSIPQSRWAHAYFQLQLERGKTPNKAKRALAFKWQRILFRCWKSGTAYCEDIYIAALRQHGSPLVARIDALDNAA

SEQ ID NO: 515853 - protein, 338 aa, unidentified
MNIVFLGIDLAKNVFQLCGLNQAGKPVYTKRTGRKELLQTLANIPACLIGIEASTGAFYWQREFEKLEHKVKVISPQYVKPFVRGQKNDGNDAQAIAVALMQPTMQFVPPKSPEQQDIQALHRARQRIVNHRTATVCQIRGLLLDRGIPIGSAVSRARRAIPLILEDAENGLSSRMRRTIAELYDLFNDLGRRIHFFDKEIETVFRQSEACQRIAKVKGIGPETATAVVAAIGKGTEFKNGRHFAAWLGLVPRQHSSGDRQVLMNMTKKGDKHLRTLFIHGARAVVRVATNNNDGHMNQWVNQLKERRGFNKTTVAVANKNARIIWSMLRNETGYQVV

SEQ ID NO: 515854 - protein, 339 aa, unidentified
MKLYTGFDLHSTNNYLAIIDKNGKRVFKMKLSNDPEKILDTLRPYKTDIVGIVVESTYNWYWLVDLLMAEGYKLHLANPAEIQKYSGFKYADDQHDAFWLAEMLKLGILPEGCIYPKEDRHIRDLLRKRGHLVRLRTSLIISLQNIISRNNGFKIRVNDVKALKVDRVAPYLKDNEDLALAGKVSKDSIDFLTRQIRAIEAVVEKKMELRGSYNYLLTIPGVGKIIGLTIMLETGPISRFAKVGNYVSYCRKVSSKWISNDKVKGKGNKKSGNKYLAWAFSEAAELARRYDTKVRAYYNRKMQRTNKMVAYNALSHKLARAAYYIMKDGVPFMPEKCFV

SEQ ID NO: 515855 - protein, 348 aa, unidentified
MSQSKQYVGLDVSLKETSICVIDDADKIFWRGQVDSTPEAIASAIKQHAPHAVRIGLESGQLSSWLFHELKQAGLPVICVDARHAKAALSLKVNKTDANDAFGLAQIMRVGWYREVTVKGLDCQAVRALLVARAQIVSQITTLKNCVRGILKTFGRVLPKGLRSQFPARVRAAINGHQVLGTIIEPTLRVLEAMRVQLRVYDKAVIQRARSDDTARQLMSAPGVGTVVALAYITGVEDPARFKRSSSVAAYFGMTPRRYQSGEVDHAGRISKCGDGMVRGLLFEAAKVLLSRSARPSALKTWGEALGKRIGAKKATVAVARKLAVILHRMWTTGTTFQWNAEAASSAA

SEQ ID NO: 515856 - protein, 340 aa, unidentified
MEVSTIGLDLAKNVFQVHGADAAGAVVFRKQLRRSKVREFFARQPACLVAMEACASAHYWAREIGKLGHTVRLIPPAYVKPFVKRQKNDAADAEAICEAAQRPTMRFVAVKSEEQQASAVVFRARDLLVRQRTQTINALRGHLAEYGLVVARGPAHTTKLIERVEAPSSDLPEAGRLALDMLVDTLRSLEQRIKCLDVEIARRAREDEDARRLATIPGVGPVTAAALVALALAAAIFKRGRDFAAWLGLTPLERSTGGKQRLGKTSKMGERTLRRLLIIGASAVVRHAARRGVPEGSWLGRMLTRKPRMLVIVALANKLARIVWALLAKGGVYRAPAMVG

SEQ ID NO: 515857 - protein, 431 aa, unidentified
MKIDRGSCRKYFGEVIHMKKVYDNCCGIDVHKKIMVACFIHGKEQEIREFGATTRELLLLADWLSQGGCQMAAMESTASYWKPLYNVLETSGLNAIVVNAQHMKAVPGRKTDVKDSEWIADLLQHGLLQPSFIPNKAQRELRELVSYRKSLIKVKTAELNRLQKMLEGANIKLSGTIADIDGVSGRNLLNALLSDQKVDETKLDEMRRKKQIAPNLKASNEQLLEDLNGMLTPLQKKMMKELLSHLDELIRHIKNLDDDISENMNGEEKKATAVIQDIPGIAAIGAQQIISVIGTDMSRFPTDAHISSWAGLCPGNNESAKKRRSGRSRKGNAMLRTTLITCAHAAVRNKNSFFYAEFQRVSGHRGSKRAYVAVAHSMLKAIYHILKDGVVFKDLGADYYNQFNKERKINSYLKKLRSLGWQPDAMNYLPA

SEQ ID NO: 515858 - protein, 323 aa, unidentified
MNKDIKYFGIDISHLVFDVTESDGNYYQFKNNPVGFKKFVKHLDINSHCVMEATGYYHYQLAYYLQENSIKVSVENPLAVKRFIQMKLSKIKTDKSDSKLICEYAKQVELKLWQGNSKHQTECLQMTRLLSVYTKQSTMLKNKLHGEAVLGNPSKAVLSSLKRSLKQVQKEIKTLEEKLMILVKQVHQDILTRLKSIPGIGNKTALMLVVLTDGFERFTSGSELCSYAGLTPIIRKSGSSVKGRPRISKIGNQKLRNLLFMCSFNACKYNKACKDLYERLVAKGKSKKLALIAVCNKLLKQAFAIAKSGLIYDDTYRSTLAKN

SEQ ID NO: 515859 - protein, 342 aa, unidentified
MEEITTVGIDLAKSIFHVHAVDKAGAVVLQKAFKRRRLIAFFQKLPPCLIGLEACGSAHHWGRTLQQFGHDVRLIPPTYVKPYVRRQKNDAADAAAICEAVTRPTMRFVPIKIEEQQSALMLHRARSLLLSQRTALICAIRGHMAELGLIAPRAVRNMKPLLDVLADGDDESLPPLARDALAPLVAQLAHIDIQIARLDRELLKWHRDNPVSQRLASIPGVRPVTAALAASVTDPSMFASAREFSAFLGLTPRQNSTGGRTKLGRISKMGDRYLRTLLVSGAVSLLSPKRKHTCALDAWARNLIEKDKPIKLVAIALANKMARIAWAIMARGEIFRHPAPAV

SEQ ID NO: 515860 - protein, 401 aa, unidentified
MHKTCGLDVHKDTIFCSVCDGKNHQVVKEYSTLTSSIIDMGEYLKSEGVDDVALESTGMYWIPVWNILEEMGFHLTLVNPYLIKQMPGRKSDVKDAQWIATLLHKGLVRSSLIPCKEIRELRIYSRKYVRLQQRKTFVLQEMERNLEMCGIRITSFVSNISGKSVMKIIRAVIDGESNPEVLAGHIHGRIVNKHKRKTIVESLRGHITPQHRFQLELLLEEYELLCRQSDRCEEEMSRLCYQHFHQELTLLQTIPGIGLLAAMIVIAETGADMKAFENSGKFAGWTGLRPRNDESAGKFKSTATTKGNRYLRAILVQIAWAASRTKGSFFKEKFTRLCLRKNRKKALIAIARKISVLIWNVLNYQEVYNPQKLIVYEPGKVQAKMDYHQKEFRRLENLMKN

SEQ ID NO: 515861 - protein, 349 aa, unidentified
MEQFVGLDVSQQLTHICVVDREGGVVWRGTCLSTPEEIAATVRIRAPHAVRIGLETGPLSTWHWHALKKMGLPVICIDARHAKAALSMQVNKTDRNDAFGLAQIMRTGWYREVGVKSVENHKVRAVLGARAQLVGTRTDIRNQIRGLLKVFGVVLEKGGDKSFEARVSEVARGNGDVLELSLQTLMATLKVVREQVEKLDRMAIGLAKQNPICRHLMSIPGVGPLTAVAFVTTVEDPGKFRKSRNVGAFFGLTPKRYQSGETDVSGRISKWGDPLVRAYLYEAANVLLTSCKKWSALKAWSMRIAKRSGMKKAKVAVARKLAVIMHQMWTTGEEFRWSNNGNDKEVAAA

SEQ ID NO: 515862 - protein, 322 aa, unidentified
MAKRTMICAGIDTGKRKLDVALDRGSQRLQVDNAPAGHQALLDWLRQHRVRRVGIEASGGYEQAIVAELRRHGFVVIVFQPAQVRAYAMFHLQRAKNDKIDATLIAICTAAAKKIHAPPDPRLAPFAEHLTMIDQISDDIARFKNRIETCRDVRIRQVWKEEIARLKKRERAELKAVAAAIRQHPDLAERLDLIESVDGVGLKTAVAILVRMPEIGRLSREQVAALAGLAPYDDDSGAYSGARHIAGGRERLRHAVYAASLPASMRWNLQLMAFYKRLIAAGKLHKVALVACARKLLIFVNTVVARATPWTTHQEARTTAPA

SEQ ID NO: 515863 - protein, 347 aa, unidentified
MRNYVGLDVYLKTTSVCILDEKGKRLLEGEVDSTPEAIGDFLGKTGLKIEQIGLESGNLTHYLKKGLLKMNYRVAIMESRKMAAILATIINKTDKNDARGIAEALRVGHFQECVHRSDEAVEIRTLLHMRQTAIEEKTHIINSLRGHLKVYGIKFSKKAGKGFRKMVEEAVVNLNPRIQRVIQSLLNILDAINKELQALSKEVESVASTNEDVQLLQTIDGVGPITALAYKTEIDDPKRFENSKDTAAYIGLTPSQYSSGEVHRQGGISKKGSKRTRYLLVEAASALLTRCKVWSKLKAWGMKIQKKKGTRKATVAVARKLAVIMHRMLVTRKPFERSPDKKEKIAA

SEQ ID NO: 515864 - protein, 367 aa, unidentified
MKKVSTRAVAQSRKICQPQLTIGLDLGDRNSWYCEVDEVGQIQREQRVRTSAKALREVFGAMVRSRIAVEIGTHSPWINRLLSELGHEVIVANARKVRLIGESRKKDDRLDAQTLARLARIDPELLYPVKHRSVQAQADLTLIRARAGLVRARTGLVNAARGLAKSYGERLHGCNVRNMNPEKAESLSPELQAALEPLLNAIESLSERIVEYNERIENLAQQSYPQVALLKQIKGVGTLIALTFLLTLEDPHRFRKSRDVGCYLGLQPGRRNSGQSEPQMHISKEGDPYLRTLLVQGAQHILGPFGPDCDLRRWGLKLAERGGRNGKKRAIVATARKLAVLLHHLWVSGEVYEPLHNSCPTTVAAAA

SEQ ID NO: 515865 - protein, 365 aa, unidentified
MPSTTNKITNFEGQRFYIGIDVHKKSWTVTIRSMHLELGHFSQLPNAEPLARYLHSHFPGGRFLSAYEAGFCGTSPHHALCNSGIHNIIIHPADLPQSDKQKNNKTDLHDSRAIARYLEGGMLSGIHIMPRDQQERRGLYRCRQSKVVDVTRSSNRIRSLLYYAGVELPERFKEKEYINKNFIDWLNKLKLSTLQGTQVLQHYLEDLIYQRKQLLTITQRLKTAIAAHYKERYTSLLTVPGIGPITATALLAETGDLSRFKDPDQYCSYLGLVPSEQSSGTTIYTNRLQPRCNTHLRPLLIEAAWTSIRRCPVLLLYYKKHAGKNSKHAIIKVARKLALIAKGVAINKTVYQADYIQLKNPIVTN

SEQ ID NO: 515866 - protein, 387 aa, unidentified
MPQPNDLSRSLVALDQNSTIIAVVELSQSSWLVGGVVPGIERQPCKKLEPSPEQLLAVLHRWRDEAARAGKEVSRIALAFEAGRDGFWLARWLEARGVEAHVIHPSSVAVSREHRRAKTDRLDTELLKRGFLGWLRGERGHCSMARVPTIAEEDAKRPNRERECLVGERTRIVNRIKATLARLGIRNFKPTLRKAAERLATVHTPEGVPLPPNALAELRRDMARLGYVVGQIREIEQARQKRLEQEPETGPHAMVRLLARVVGVGVETADMLVHEVLSRPMRDRRAVARYAGLTGAPDESGAQRREQGLARAGNARVRRGMIQLAWRFLMFQKESALALWYRARTADSRIGTRKTMIVALARKLVIALWRFVTTGETLEGVILRPAG

SEQ ID NO: 515867 - protein, 403 aa, unidentified
MNNVAGIDVSKGKSMVSVLRPFGEVVAKPFSIGHTGSELKELADYLKSLDGETRVVMEHTGRYYEPVARFLHDEGVFVSAVNPKLIKDYGNNTLRKVKTDKADSRKIARYGIDNWAELRQHTPMDTIRMQLKTLNRQQSLYAKTKTMMKNNLIALLDQTYPGVNALFDSPVREDGSQKWVDFATTFWHVDCVRNMSLTAFAERYRKWCKRHGYNFSQSKAVEVHAGAQDLIAMLPRDALTKTMVRQAIDALNAISASMERLKAEMQALAAQLPEYPVVMAMHGVGDSLGPQLMAELGDVTRFTHRNAITAFAGVDPGADQSGTHEAKSTRVSKSWAPELRRALFLVMDCLLKTQPQDDPVYRFMDKKRAEGKPYLVYMTAGANKFLRIYYGRVKEYLASLEGN

SEQ ID NO: 515868 - protein, 359 aa, unidentified
MARIVERVADRYDVVVGVDTHTDTHTAAVVDRLGAVLAQVTVSTDPDGLARLLDFAVAHTPPQGRRLWAVEGTRAHGQGLCRVLDAAGEDVSEAPKPAAASRRRGGKSDQLDAVAAAHAVLALPLQRVAAPRSDGPREALRLLLVCRRHHSDARTATINLVKALILTADDTLRHTLRGLSTTTQIARLAALDLPETTDLPCEEHTRRRELTTLARHIQTLDAALADNHRRLRALVTHLCPPLLDQPGIGPVTAAIALTAWSHPGRVRSEAAYATLAGTAPIPVASGRTNRHRLNRGGDRTLNSALHTIALTRRRIHPETRDYITRRRTEGRTTKEITRCLKRYIARQIYRTITNHHRTT

SEQ ID NO: 515869 - protein, 349 aa, unidentified
MVADELDYVVGVDTHRDEHTLALVEATTGAVLAQQTVAASAGGYAQALRFAQQQAEGVRLWAVEGAGHYGAGLARYLSERGETVLEAGRSSRSERRLRGKDDQLDAVRAARAALASEPLARPRSGERREALRLLLVARRSAVEVRREALVQLRSVIVTAPDRLREELRGLPVRRLLERCSNLRRSNSARADQRATRLVLRSLARRIEAPTLEAAELEGEILAQVRALAPQLLEEPGVGPIVAAQLLVAWSHPGRVRSEAAFARLAGVAPVPASSGQTRRQRLSRGGDRQLNRALHTVILHRRQHDPQTRDYIARRIAEGKSRREATRLLKRYLARHLYRLLQNQEPLLA

SEQ ID NO: 515870 - protein, 353 aa, unidentified
MRRPKEKLIAGIDLHSNNVMIGVINQDGKRVAHRKLGCDLSEVVGFLKPLKPQLQSMAVESTFNWYWLVDGLRAQGYSIDLANPAKIAQYSGMKHVDDKDDAFHLADLQRLNILPKAHVYDPELRPVRDLLRRRTNLVHQHTALLLSFSSLYTRTTGQKLDLGEAKKMEPKQAPELYEHPANQLIAQVQAEHIQALAKSIRRVEKAVLACAREIPLYERLLTIPGIGRILGMTITMEVGDVKRFQTDGDFASYCRMVDAKRLSNGKCKGDNNQKCGNKYLAWSFVEAANFARRYDEHCRRWYDRKAAKTSKVIATKALGCKLAKAAWHVMAKQCDYDPKRMFPELATAPMKPH

SEQ ID NO: 515871 - protein, 448 aa, unidentified
MQIVHTHCAGLDVHKKTVVVWCRIVSPDGTSTTHIRTFSTMTAGLLALVDWLLSLGITHVAMESTGEFWKPLYNLLEGNFTVLVVNAQHIKHVPGRKTDVKDAEWIAELLAHGLLRASFVPPAPQRALRDLTRQRTHLVQERAQVVNQMQKVLEWANLKLSSVVTDVSGVSARKMLEALVGGQTDVRLLAELAQGRLRAKRAELEQALRGTLQPHHAFMIAQHLAHLDFLEEQIAAFDAQIESMIQASGLPPSDPGAGECAASQAPAAPDTPPAAPAQSTSTWLAARAICDAVPGIGQKVAETILAELGTDMSRFPSAAHAASWAGLAPGQHESAGKRRAVRIGKGNRYLKGALIQASWAAIKGKDSFLAAFYRRLAARRGKKKAIVAVAHKILVIVYTLLKSGEEYQERGAAALDERQKDRLLEQMQRRIERLGYKVSLEPITAAAA

SEQ ID NO: 515872 - protein, 360 aa, unidentified
MQEITRVGVDLAKRVIQVLAVNAAGLRVTGRALPREKFLPWCAQLPAGCLVAMEASSSAHHWARKLIAMGLDARIIAAHLVAPYRMQGKSGKNDANDAAAICEAASRPRMHFVPVKSVEQQSMLCIHRLREGFKAERVACINRIRGLLAEFGLVFPQKPELLRQALPETIEDASNELGGLARLALQRAQQQWEELDAHMQWCDQRIAMHLKTNEQVRQAQQLMGVGPVTASAVVATVGDFRQFKNGTQFGAWLGLTPRQHSTGGKNNLGRITKHGDMYLRTLLIQGAKSIVLTAHKRDDPISRWVLQLRERSGWQKAVVALANKNARILWAVFVRGKPFDAHHVSIKPPAAMPQIAEIPA

SEQ ID NO: 515873 - protein, 414 aa, unidentified
MRIIHDKVAGLDVHKKMVVAAIIVKQEDGGWLEEKRNFETMTGDLLGLSDWLLLQGVTHVAMESTGEYWKPVFNILENNFDVMVVNAQHISKVPGRKTDQSDAQWIAELLQYGLLKSSFIPPLDQRELRELTRYRSSFVRERATLVNRVQKVLESANIKLASVATDVMGVSGRAMLDALIAGSATPDQMAELAKGRMREKRDQLTKALEGRVKAHHRFVLTEMLCQIDSIEETIARFDQEIEAYCRPFEEAVELLDTIPGVGREAAEIIVSEIGKDMSRFPTADHLASWAGVAPGNNESAGKRRSGRTRKGNQALRTVLNQAAHAAAKTKNTYLSAQYHRLAGRRGTKKAIVAVAHSILVIAYHLIERKEPYQELGGDYFDKRNVEATAKRLTKRLERLGYQVSLQQQPVGVAA

SEQ ID NO: 515874 - protein, 394 aa, unidentified
MKLVGIDVGKNSHHFCVMDKETGELNVTPSSFSNNKEGFDFLINSLKPYSKKSILLGMEDTGHYHVALLKFLLSNGYTVALINPKTTDLTRKMEGGITKNDKLDTITICDVLDTPERKKQYRITKVDRFDLYEQRQLTRHHHNLKEELNVYCNRLQKSIDLVFPEFNTLFSSKYGVVYMNLLKTFGSAEAIASTDIRTIRKCFEIKGRGGRISLTPEKLKECAKNSIGISSEVETIQIKHLVSQIMLIKEQIAEIDKKIEEFSIKNNSPILSIPGISHFSGTSILAELGDIGNYSKPSQIIKFAGVAPYHYESSQFNAQHTGITKKGSKYLRKTLYQIILPVINNNPVFKKYYRLKISQGKGHRCAQGHCIRKLLRIIYHLLETGQSFDPALLR

SEQ ID NO: 515875 - protein, 403 aa, unidentified
MTMYKTCGLDVHKDTIFCGVFDGKHHQAVKEFSTLTSSITSLGEYLKSEAIEDVAMESTGIYWIPIWNILEDMGFNLTLVNPYLIKQMPGRKSDVKDAQWIAALLHKGLVRGSLIPCKEIRELRTYSRKYIRLQQRLTSILQEMERNLEMCGIRITSFVSNISGKSVMKVIHALVEGENDPEVLAGYIHGRIVNRHKRETIVESLRGHTTPQHLFQLELSLEEYELLCGQRDRCEEEMSRLCHLHYPKELALLQTIPGISLLSAMIVIAETGADMKAFENSGKFAGWTGLRPRNDESAGKFKSTATTKGNRYLRAILVQVAWAASRTKGSFFKEKFSKLCLRKNRKKALIAIARKMAVLIWNVLYYKEEYNPQKLIVYEPGKVQAKMDYHQKEFKRLENLLKN

SEQ ID NO: 515876 - protein, 397 aa, unidentified
MIAVGIDISKAKSTVAVIDSDGTVLASPFTMAHTQPEMEAFVTYLKGLGEPTTILMEYTGHYHYPVLKKLQDEGFPVCIVNPYQMKKYGDVEIHKAKTDKKDALRIAAYALEKSYKLVPYSSMEQKYEDLKFLSRQYSQRITYVAKLKVQLIALLDQTMPGITRILPLNSRNPEKCALLLFIKRFKSFDEIHRIGKARFLASYDVLAKKASERSASSKGLSIYELAVDSITTRGEDPYIWLSQNQCVDLLSTTQNAADEIISQMRNIAETIPEYKVLRAMRGVGDRLGPIILAEIGDIRRFHSGKALNSYAGNDAPPYQSGQFESRNRHISKRGSSALRKACYEVMQALKLTKPQDDPVYLFMLKKEQEGKPFNVAKMAGVNKFLRIYYARAMELYK

SEQ ID NO: 515877 - protein, 388 aa, unidentified
MNPKKRILYVGLDVHSIMIYVALAEDIRDSEVRSYGRIANTPKSIAKLMRKLRQKYDLRVCYEAGPCGYVLYWQLTEMGIECQVVAPTLIPTKSGERVKTDRLDAEKLARYYRSGELTFVWVPDRSHEALRDLVRAREAAKKDQGVARHRVSKFLLRNGIRKPAGMTSWTQKHILWIKTLKFEEKCQEVVFQDYLHEVEHQRDRLKELERAIDTAIEEAPEEKRELVAALQLLRGVGKVTAVGLVAEVGNFSRFPNPSELMGYVGTVPSEYSSGGPGKRKQGGITKTGNKHLRKLMTESAWSYRYRPALNLRMQKCHEQVSQELIAEVKAISWKAQCRLNGRYKSLCMKGKIPQVAITAVGRELLGFVWAIAVHVENGRATKEGKKVA

SEQ ID NO: 515878 - protein, 525 aa, unidentified
MYHVRRPGRQQPKIRPRSKKSLQKPNGVISPRVRNVGGEHFGIVCVDPAKHRSEWMMADYFGNLLIEPRTVEHQRAFFQIAIEMIRQAQQQHGIRDTIVVVERTGNYYLPPKRAFASAGFETRVVHPFATKQYRMPANPGNKTDENDLYAQHRAAVAGFGLCEMELTSPYRDLQLRARHRRNLVEKSAALACQIRDHLHLGMPGYAGLFERLFELPVGLAIAARCDSPAKLIELGRNRLSRHLKKQKVRHQLRTIDKVLAWAAQAADDPIRDGAMHHAIWTDLHELYQHFRRNIAALERQLASDVAQTPYVRLMAIPGINVLSAADFGAEMGPISGYANANAITGRAGLFPSRHQSDQTDNDRGAIIRQANRRLRCVLMRIADNLARHCAYYRGQAEVDNARGIDKRASRVKIAKRFSRLALACVAGDQPMRHPCFQKPDSILDKLRCFHQEHGTSMDVLLADLEAAVKQLPYNTCNHEAEIVANVLQQQRERRRGAQPIGDVLPAVLARLNIRINEANKNRDRS

SEQ ID NO: 515879 - protein, 351 aa, unidentified
MNTNAKAIPVTIGLDIAKNFFQVHAVDGAGQVVLRRKLSRGEVLRFFETQPTTLVGIEACGTGHYWAREITALGHEVKLLPPTYVKAYVKRGKTDAADAEAICEAVSRPNMHFVPIKTPEQQAALMMHRSRDLLVGQRTALANALRGHLAELGIVAAKGLHRVADLLAELVGLENTKIPPLARSSLRCLASQIEAVEKQIDELEALIIEWHKGNAASQRLVKIPGVGPITASAVVATIGDASNFASARHLAAALGLTPRQNSSGGKARQGGISKAGNTYLRRLLYIGATSVIRSKRAREAGGWMAGLLERRPAKVVAIAMANKTARVIWAMLRRGEAYRAPKLPITATAMA

SEQ ID NO: 515880 - protein, 337 aa, unidentified
MKRYQGVDLHRTQFTVCTRLENGRTYLRQWPMRELKLFAAQLRKEDEVAVESTGNTRLFHDAVVEHVNHVAVVNPSQFKVISQSVKKTDKNDAELLALYLSKGLLPEVRMKERSQREMSHLAQTRDLLVKQRSALKAKINNLLSAEGINLKREALSSNKALERVLALPLSGLMLAEARVLVGQIRSLNQSIAEMEGLIEEEGPKLAGHENLMSIKGIGPVSAAVLLSVIGDIRDFSDPGKLAAYLGLVPRVQNSNETEHSGRITKQGNKLARTCLVQCALTAKRYSSFLQQFYQRIQRRRGGGKANIALARKFLGVIYHTLKNNWVFEDFPNFVLAS

SEQ ID NO: 515881 - protein, 346 aa, unidentified
MLYAGLDLSRKRLDVHVLREDGSTALVTAVAPDTDALRTLVRHVGHNGEAVRATIESMNGARFVHDTLEFAGWEVLIADAQRVRGLAPLAAKTDKIDARVLAELTRRALVPEIWLPTPEVRAERERARFRLHLVQHRTALKNRIHATLIAFGHPRPMADLFGVAGRKLLDSLALPEPWQSNILASLVVLDDLTARIDALELELKQLGAHHPAMRLLMTVPGIGWVLAYTIGSEIGDIGRFASPKKLAGYTGLCPLVRQSGSKDRRGPLAKNGPTYLRWALIEAATHAARDVRYVERYERTKQRLGRQRGAKVARVDLARQLAEAIWYVLTKNEPFHPAGPTIRLVA

SEQ ID NO: 515882 - protein, 385 aa, unidentified
MGDHSEAFVAFDTSKLRNAVAIADGGRGDEVRFLGEIDNTPAATAKLVRKLASKYERLTFCYEAGPTGYGLQRQVKSLGHECIVAAPSLIPKKAGDRVKTNRRDAVGLAKLLRSGDLTAVWVPDRQHEAMRDLTRARETAMLDLRAKRQQISAFLLRQGLHYPEDKRTWSKSHLNWLASQKFDIAEHRIVFEELMEAMRQAQGRLDRLEAAIRAAVPDWSLGKLVIALMAMRGLDMISASTIVAEVGDLSRFRTPRELMAYVGIVPSENSTGDKVKRGPITKTGNRRVRRMLVECAWSYQFPPRLSKDKQVKVDAVPQAVREIAWKAQSRLNQRYRALLRRGKLKNVAITAVAREFVGFIWAVAQAVGAAPAANNRTAPAPAAAR

SEQ ID NO: 515883 - protein, 349 aa, unidentified
MPKSNTAVVTIGIDPGKNTLHLVGLDARGGIVLREKVARARIVSRLANMPPCLIGIEAGMGTHHVTRELLALDHDVRQVPPVYAKPFRQTHKNDFRDAHAIAEAVQRPTTRCVPPKTDEQLDLQALHRVRYRLVGQRTAIINQIRCFLLEHGITVRQRVHWLRHALPDILAQRTDVLSPRMARILEDLAQDWRRLDDRIEAVTGEIEALSKNTEPCRHLTTIPGIGPIISSAVVAAIGNGTAFTRGRDFAAWLGLVPKQISTGDRTILGRITKRGNRYLRMLFLQAARVVLLRPKNWMKHGFGPWLAAAAQRLHHNVLATALANKLARIAWSVLVQHRIYEARLSAAAV

SEQ ID NO: 515884 - protein, 387 aa, unidentified
MTKVNDLSRSLAALDQDTTLIAVVELSSKSWLVAAAVPGIERHPLKKLDPDASALLKLIERWRGEAERRGRTIKRVVLAYEAGRDGFWLARWLKERDIEAYVIHPASVAVSRERKRAKTDRLDAAMLLRVLLGWLRGERGHCSMVAIPSMDEEDARRPSRERETLVGERARITNRIKGALARFGIRSFNPLLRKAPQSLEKLQTAEGGPLPVNTLEEIKRDLARMAVVREQIAAIEKARVHRLKQAPKTGCNAMVQLLARVIGIGIETADMLVREVLSRTLRDRRAVGRYAGLTGSPDESGSRRREKGLTRAGNARVRRGLIQLAWRFLMFQKQSALTQWYRARTAGATPTQRKSLIVALARKLLIALWRLVTTGEVPHGVVLRPAI

SEQ ID NO: 515885 - protein, 331 aa, unidentified
MEKNVFIGIDVSKSKLDVSFLIAGDINKVQHFIVKNDLKGFQQMQNRISKLGEDKGSWLFCFENTGVYSISLACFLSENNVDFCHESALRIKRSLGIKRGKNDKLDSKEIAEYTYVQREKLRLTTILRQELQELKILLSYRERLMRQKNALLVSAKEAYECFENETTRFILDDSNELIPQYEKKIKNVEHEMKKLIEKDERLKQNFTLATSVVGISLIVGSYMLVQTNNFTRYNQREFACHAGIAPYENSSGTDIPQKRKTSKIADKKIKALLTNAALNARQHDPQIKFYYNRKIKEGKNKFCVLNAVRFKLVSRVFATINRGTPYVKMAH

SEQ ID NO: 515886 - protein, 343 aa, unidentified
MTEVTTIGVDLAKTVFQIHGVDASSVIVIRKQLRRRQVLPFFRKQPPCLVGLEACATAHHWAREIAALGHEVKLMPPHYVRPYVKRNKNDAADAEAICEAVTRPTMRFVAVKSAEQQSVLMLHRTRELLVRQRTMLVNAIRAHMAEFGVVARTGLPQVKELLAVIADKEDERIPPLARTCLEGLARQLLSLEREIIGAERHIHAWHRTNDGSRRLETTPGIGPITASALASSITDPHVFRSGREMAAWIGLVPRQNSTGGKERMGRVSKQGDQYLRWLLVAGAMTVIRHAKRRGTTDPWLADIIADKPTKVAAVALANKNARIAWALLRQGGTYQKPVTGSVA

SEQ ID NO: 515887 - protein, 400 aa, unidentified
MRTVFGIDVSKASSEVAILVNGERVHGYTMSNDIIGFSRLQKDLKTVRNPEIIFEATGVYSRRLQAFLEENSYDYTRLNPLEAKKQLDGLRVRKTDKIDAEKLASSQFVLNRKPTYVQEEVYQNLHDLSRFYQNLTEDIVRTKNRLHKVLQVAFPEIENLLSTPTGEQYWNLVSIFPTKHWVLELSEVELKETIRQSTSKRISENRVGNLAEKLVGLAKQSYSAISKTSPIIEEVKYNAQELIRLTNRRKQVLEQLIELAEPLPEYEILLSIPGIAETTATSIIGELGDIRRFKSANQINAFIGIDLKHYESGDFLSQEHITKRGNPYARKILYKCIHNIASASHTNPCHIADFYEKRKRQSQTTSTKPHTIASIHRLIRTMYYLIMHNKLYDYTLAQSH

SEQ ID NO: 515888 - protein, 373 aa, unidentified
MNYSTVYVGMDVHKETFSLCCYTNEKEEAEYPQKVDGHYSKVINYLEAMRFHYGDDATFICGYEAGCLGFTLYHQLTDHGIKCVILAPTTMPKPKGKKKIKTDKRDAALIARCLAHHDYSAVHIPTDKDEQVKEYIRMRIDHKNALKKIKQQILAFCIRHDFRYEDGANYWTQKHLTWLRSLKPDGLYKEILDEYLLTFDNLTDKIERLDKRIEELASEEEYQEKVHNLTCFLGIKTQTALSVVAETGDFKRFASAQHYASYLGLVPGEDSSGEGQTRLGITKAGNSHLRTLLIEAAQSFSRGQIGYKSKALKARQQGCSPAVIAYADKTNERLRRRYYKLTLSKGKKMNVAKTAIARELACYIWGMMTENIA

SEQ ID NO: 515889 - protein, 319 aa, unidentified
MAQNEVVVVGIDVAKDKVDACIRAFKLRQTWLSTAQGHRKLVAWLRKHQVNKAVMEASGGYERDWARVLREAGIEVRIVDPKRVRSFALSAGRLAKNDAIDAEMIAWFAETFSEAPSQPHDAAREELQTLVKARLDLIDFRMRLVSRSEHAAPGLVQKAHAHILKSLASEIAKLEAAISAKIKSMPDFAERAEIIESVPGFAQTSSANLVAGMPELGQVSDEIAAALIGVAPYDDDSGKRRGERHIKGGRRWVRNAIYMPCVGAATQNNPVLKAYYQRLLAKGKEPKVAIIACMRKLIVILNTMIARRQKWDPSRYGLS

SEQ ID NO: 515890 - protein, 350 aa, unidentified
MENNYILYVGMDASKGKADAAILKVSDRRSVKPKFLRKKLSFKFVKSEVSSFLETVRSYSDDNCTSICFALEVTGIYSTNVYNFIKANLNDNESIRFLNTDFVNQWRKAHNIAKSDPLDAQTISTIIGTDADVQYVNDNVFENKNGYQDLKALVHRHYQIKKIYSQEINRLIAQCDCLFPELQYVFEPKSAAFIAVLSSYPTTHDIINASKFEVFSVVYEATKHRCSMDKIDKLFDLCWDTLVPDDISSYGRNIILDLVENIKNIKGQLKTIQRYIEDVVSLNPAYKLLLTMTGCGPITAATVIAETGDISRFKNADCFVSYSGASPRNKRSGTSVETMGKISKKGIQVS

SEQ ID NO: 515891 - protein, 448 aa, unidentified
MSDRSGVSRGDRNRNARLARLREAVPLSNAIAGIDLADSKQMVVVTDHESRVLARRTFRRRAWELGVALDWAAARAASAGFAGVTVAVEPTGHRWRVAGPLAGERGMPFVCVQPLMSAWARRAEDLTFDKTDDKDAVLIARLAGQLRCYLPEPADAIWGRLRHLGIRRARLVADQVAQVQQMRDLLECVWPSVLDAARQPFKSTTWHAALTVALGRADGDLGRVTRLGHRRFDAAVRRQAARWEAVHPWQKIIDAVLTACADPAGVTELRHGALERVALLLADWRDTRTRLADTEQRMVTVLGELGLTELVTSITGLSAVGAAAILAESGDPARFTSGRALLKHAGLAPRQNSSGSYTGRTRTTGQGRPALRLAAWRAVWGALKSNPVYAARFACLTSREHNKLSTGQAHAAIAAALLRHLHAVITTGQRWDPAVAAGGRPSQALIAA

SEQ ID NO: 515892 - protein, 353 aa, unidentified
MNQYYVGLDVHKASICIAVLNADGKLVMESVVETSAATILDFLKALRGNVKVTFEEGTHAAWLYDTLKKTNATVIVCDPRKNRLLQDGTKSDRVDARKLAQLLRAGLLSPVYHGEHGTRDLKELVRSYEYLVEDSTRAMNRIKALYRSRAIACAGVDVYKLRQREVWLAKLPETGVQARAQRLFSELDHLTGLRREARQALVVECHRHPASKLLLAVPTLGIVRIAQLISGVVTPHRFRSKRQFWSYCGLAVVTKSSADHHIVGAQVHRKKRTATTRGLTQSHNRTLKYVFKSAALTASRCGPFKAWYAELVERGLRPELARVTIARRIAAVTLAVWKSGEAFDANKLIKHGA

SEQ ID NO: 515893 - protein, 353 aa, unidentified
MIVVGVDAHKGVHVAVALDEAGRELSEWRGPNNAAGWRSLIEWATALPTPRIWGIEGAWSYGRGLAQQAVSEGETVYEVNPRWTALGRRRARKPDKSDRLDARAVAHFVRQEASSLPQVAAEDVTAVLDLLTTEREGALAEATRLRNQIHALLLQVEPEYRARLKKFRSKAALDALETYAPAGDGLLHAHRLTAVRMLAKRLRLALSQVDELARRIETLAAEDFAPLTRLCGVNLLTAGALAGILGPGNRFSSEAQLAAYAGAAPLEASSAGRIRHRLNRGGNRRLNCVLYRIVLTQASHLPEAKAYIERRVSEGKTRREARRALTRYIARAVWRLWQECQSTSVSVSMDEAA

SEQ ID NO: 515894 - protein, 432 aa, unidentified
MNPFSVSPEPSPVAAWVGLDWADQQHVICLYEVATGQSTVSRLEQKPEVLQDWLSQLRQRFGGAPVAIVLEQARGAVIYALLSADFVRLYPVNPQSLASYRKAYAPSGAKSDPADAVLLMEMVRNSPERFRPWKPDDADTRSLQLLTENRRQLVNQKTALTNQLTSLLKTYYPQALELAGVLDSLQACDFLTQWPTLEALQQARPGQIRQLYREHGHPSPEQLDRRLEQIREARPLTTDPAALLSGSMMVQALVQQLRPLLGAIERFDRQIAVLFRKHPDRPLFDSLPGAGAVLAPRLVAAFGTDRDRFQSAQQAQQLFGIAPVTEQSGKQRWVHWRWACPKFLRQTFHEFAGHSRHWCGWAKALYQRLRRTGKGHHAALRVLAFKWIRILFHCWQTRTGYDEQIYLKSLQKRNPTLWAEIQLLPPRNKKVA

SEQ ID NO: 515895 - protein, 358 aa, unidentified
MSDGSKGQPRFTAGLDLGDKYSYLCLIDQHSGQVIEEGRLRTTPESFRRRFASEQPMRIAIEAGTHSPWASRMLEECGHEVLVANARKLRLIYSNKRKTDEVDAENLARLARVDPKLLYPLKHRGEESQAHMAIIRSREALVGSRTQLVNHVRGAVKSFGARLPKCPARSFHNKAPEHIPEALLPALGPILETIGSLTKRIREYDRRLETISKEHYPETELLRQVEGVGPLTALTFVLTVEDPYRFERSRSVGAYLGLVPASDRSGDRDPQKRISKEGDEMLRKLLVSGAHYVLGPFGSDSDLRRHGEKIASRGGKNSKKRAVVAVARKLAVLLHSLWISGEVYEPLRNAHRSGVRAA

SEQ ID NO: 515896 - protein, 312 aa, unidentified
MTEHCYCGIDVAKNRLDVQVLPHRQRFSVDNNATGWAQLVERLHALPIAAVGIEPSGGYERGIIRILLAAGLSVRRINPSKLRQFARARGILAKNDRLDAQLIAEYVSIIPTRVVQRVATAERLAEVVTMRRQLCDEHVTIENQAAHVEDAILRRLNKRRLARLKADIHLLDKRMAEIVAADAILAQRYELLTSMRGVGPTLAFTLIALLPELGQMSRKQIAALVGVAPYDFDSGKLKGHRCIYGGRMPVRNILYMAALSAARYNPALKVFHNRLAAINKKPKVIIVAVMRKMITTLNAMVRDNAAWQPRAA

SEQ ID NO: 515897 - protein, 416 aa, unidentified
MQSAPTTVSSAPPNGLTCGIDWAKDDHAVAVVDSAGREVHRWTVEHTNAGLHGLLRRLARTGVAEVAIERSDGPVVDALLGGGLTVVVIAPSQLKNLRSRYGSAGNKDDRFDAFVLADTLRTDRARLRPLTPDSPATVTLRASCRARRDLVTHRVALANQLRAHLQTVFPAAVGLFRDLDSPISLRFLTRFDCQDRADWLSVNRLAAWLASVGYCGRVDPAVLHARLTAAPRGATGEHGTAAAHVTHALLAALTTLVEQIKTLTEQIDEQLDLHADAHIFTSLPRSGRVRAARLLAEIGDCRARFPTPEGLYCSAGAAPSTRQSGKHRAVTFRWACDKQLRDAVCDFAADSRHANPWAANLYQRAIDRGHDHPHAVRILARAWLYIIWHCWQHGVAYDPAQHKALQRLTQDHQAAA

SEQ ID NO: 515898 - protein, 395 aa, unidentified
MFIVGIDVAKRSHEVCMITSDGQTVQRPFSIRNNCTGYNLMLEKIRKHTNIKSQIVFAMESTAHYWLALFTRLRKDGYHVILLNPIQTSAMRDMFIRKIKTDAKDSFIIAELIRFGRYAESNVAQDRLLALKELCRNRFYLVDMAGDLKRKLIALIDRVFPEYEAQFDTIFCKSSVALLKKYPTPQKLSNAHLDKLTELLWNSSNGHFGEWKARELKELARNSFGVEDCDGAYSTLILLMLDQIQSLSGKADALEKEISRLFQSFDTTVTTIPGVGPIIGAVILSEVGDISRFSSADKLAAYIGVDPSVNQSGEFQAVHAHMSKRGSPYLRRCIWMASQVAVQRDPMFRAYYEKKAAEGLKYMTIIGHVTRKMTAVVFAILRDHKVYEPVLPTAA

SEQ ID NO: 515899 - protein, 316 aa, unidentified
MTSEERYVGIDVSKKLLDIAVRPGNEYWSVANDEQGIDELVSRLKSVGPRLVVLEATGGLELSVTASLGAAGLPAAVVNPRQVRDFARAIGQLAKTDRLDAHVLARFGEMVQPTPRPLRDAEAEALSALLSRRRQVVGMLTAEKNRFHAARPSVQRGIRQHIVWLEKSLARLDDDLGGALRESPLWRERDDLLRSVPGVGPVLSVTLLAELPELGTLNRKQIASLVGVAPLNRDSGSLRGRRTVWAGRARVRSTLYMATLVATRCTPVVRSFYQHLCTGGKAKKVALTACMRKLLTILNSMLRNHTTWQPNHALNA

SEQ ID NO: 515900 - protein, 325 aa, unidentified
MKMAKRTTICAGIDTGKRKLDVALDGSSEQLQVDNTAEGHKALLDWLRRRRVKRIGIEASGGYEQAVVAEMRRKGFVVVVFQPAQVRAFAKFHQQRAKNDKIDAALIATCTAAVKKIHAAPDARLLPFAEQLTMIDQIGEDIARLKNRIETCRNPRIQHVWEEDIVRLEERERIEFKALVRAICEHRDLSERLDLIHSVDGVGLPTAVAVLVRLPEIGQLTREQVAALAGLAPYDDDSGEQVGARHIDGGRKRLRRALYAAALPASFRWNPQLIALYKRLMAAGKKHKRALIACARKLLIFVNTVVARGIPWQHARPPIAAMPGG

SEQ ID NO: 515901 - protein, 319 aa, unidentified
MAETVLGIDIGKQKFEVRLLVNGKSKSKSLKNSKEGFETLSQWLNKHNAGLTHACMEATGNYGDELAIYLYDAGHKVSIVNPARIKGFAQSELVRTKNDAVDAGIIARFCAAMNPEPWTPPAPAVRRLQAVARRLDALISMRTQELNRLGVAHSLVEPSIKEHLLYLDSEIEKLKKQMRSEIDDDPDLRNKRDLLITIPGISDATISIILAELDFQKFESVREVVAFMGLAPRDKISGTSVKGKPRLCKTGNARLRKCFYMPAMVAMRFNPVVSSFQRRLKENGKNGKVIVCAAMRKLVHIIYGVIKTGKPFNPQLASF

SEQ ID NO: 515902 - protein, 397 aa, unidentified
MYIVGIDIAKRKHEAAVIDGDGAVIIKPFSFTNNCSGYNRLLAMLAKAKLPLDEVSFAMEATGHYWLALFTRLQKEGFRVQVINPVQTNSIRSFYIRQAKTDPRDALLIAEVIRFGHFSESTLHPENIYELRELCRGRHAIVSMQADVKRKVVALLDQVFPEYETAFTNLFGDTSMAILQTCPTPKELSEMPLEELCHLIEVSSRKRFRMAKAQELQALARNSFGFAMAGDVFSTMIRLYAKHLVFLKQQVQEMDRKIAEIMDTLDTLITTITGIGPTLGAYILSEIGDISRFSSAAKLAAYAGIDPTMRQSGEYNGVRNRMSKRGSPYLRHAIWLAASSAVLHDPALKLYFQKKRDEGKPYMASVGHACRKMVSIIYAVMRDNKAYTPCIPNEISA

SEQ ID NO: 515903 - protein, 438 aa, unidentified
MSNKVIFNLDELFISVGIDVGADFSWMSIALPNQQFVGKPFKILHNSIDSLTTAVSKIKEAEELYSLESRIFLESTGIYHYPLFCYLRDKGFNCSVINPIITKNSTNINIRKVHNDRFDSKKAALVGLKPDLKVSLMPSDLALNCRNLCREYYDLMDNRSAYVNKLQGELRMAFPQYLGIFSKVTINTSLTLLETYTSPSAFLKADKQEIIDIIKSTARFGLTYAQNKYNAIIQAATDANQFGYIIDSNIKRIRLYISFIRKYDEEINSILESLHELVDANEDTDFVKQIHLIKTFKGAGFLSAVSIMGEIGDFSAFSKPKQLFAYFGLDPAVKQSGKFEGTKVQMSKRGSAIARRVIHTLTLQSISISRNGEAKNPVLREYYLKKCDSKPKLVAMGAVSHKVCNMIFAILRDNKPFKIIAPQEHIKQYNSAKCDIAA

SEQ ID NO: 515904 - protein, 388 aa, unidentified
MSIVMGIDQHRAQITAEWIELETAEIGRARVRPADRGGVRRFLARFSGQALEVATEATTGWRFLVEELRAAGAEVHLAEPAETSALRGNKKHAKSDRADARHLRELLLAGRLPESWIPSDQILDLRARVRLRHTLIEQHCEWQQRIQAVLYHHGCPRRRGLMVSDGRDWLAGQPLPETAREQITVALAMIDALELQIAPIDGELRAYARAQTGCKALIDAYYGIGELTAVTIVSELGDCRRFSNSRDAVRYSGLDITVYQSDRHRAPGHLSRQGPPALRWALYEAAQVARHPRSPDRAYYEQAAEHLGGNRACLALARKLLKRCYHTLRELGDDALAPPPVEQTKARARNGSTATRRPAAVSAGERPVKPRASCAGRLTRPSAALRGS

SEQ ID NO: 515905 - protein, 332 aa, unidentified
MDNFYFIGVDVSKKKLDICVLFEGKVLREEQVSNHQQAVARLIGELKNDLEMDNEQFLICAEHTGQYTFPLVCACKSVECKLWLENPSQIKYSSGMQRGKNDKVDAKRIAIYASRFGDKVKYYDRPSEEIERLKQLERERALYVTDLAKYKGQMYDQKDFMPAALYRKKTKRMKGLIQELQAAIDAITAEMEKIIGSTEVLARQMELLMSIDGVGKVVALNVIIETEAFTRFDDPRKFCCHAGVAPFSYTSGSSQHSKNKVSHRANKNIKKLLHMAAVSVTHRKEGELKAYYMRKVEEGKNKMSVINALRAKIVARMFAVIKRNEVYTPIYS

SEQ ID NO: 515906 - protein, 331 aa, unidentified
MEKYKIFVGIDISKGWIDVAVINDNLTAHRNYGNNKKEFKLLLSWLKTFARPEEMILCMENTGVYTMPLWEYLVAHKIPVVVENALQISRSMGIRRGKSDKADAQIIARYIRLHHTECRLCKAPARIITRLKVLFSYRERLLKVKHQLGVASKEIKGFISAELCKEMVQESELLVKTIGNKINKAEELILSIIKSDNETKRIYQLITGVPGVGLITATYLIIITQNFTIIEKSRQLSRYGGMSPEKNESGIIKRKAHVSPVGNKKLKSLLSNCVGTNLVYDTETKEYYNRKLLEGKHEGIIINNLKNKILHRVCAVVNRGTPYVNIKRYAA

SEQ ID NO: 515907 - protein, 327 aa, unidentified
MRQAKSLTEKAKTTVAFDVCKAVLDVHIRVNGKAFQVPNTYEGFDQIAVMLADYDVSLVLMESTGGYEDAAACYFQSVGYDVAVVNPRHARNFAIAMGQLAKTDRLDAAILADFAAVIDTRPDRARFIKPPTDEERKFLSQMVARRRQVVDLLSTEKQRLSHADDYAKQSINKMIHFIESQLKEINKDVSFYLKKNYSGLSKLLSEIPGIGELSVGLLVGDVPELGQIGNRQLSAVIGVAPFNHDSGKRRGKRCISGGRQDVRNVLYMGVMSATRFNPVIKEFFDRLIAKGKPKKLAYIACVHKLLRIINAMVRDGTSFNPDLHAVS

SEQ ID NO: 515908 - protein, 470 aa, unidentified
MRKDTQKKQYKSKRKSYRKGVKMPQHLEHINKMAAGIDIGSKSHWVAVPEGCDEICVREFKSFTADLHELANWLEKCGIETVAMESTGVYWIPLFELLESRGFEVILVDARHVKNVSGRKTDILDCQWIQRLHTYGLLNGAFRPNEQVCALRSYLRQRSMLIERAASHIQHMQKALSQMNLQLHHVLSDITGETGMKIIRAIVAGERDPKILANFRDYRCKNPLEIIEKSLMGHYREEHVFALAQALELYDVYKNKIMACDARIEKQLSTFEDHAVDSKSELKNSTTRKSKSHCKNKLSFDAKSHLIRITGVDLTAVPGIEASSALKIVSEIGLDLSRWKSSKQFASWLGLCPGNKVSGGKRLGGKSKRTANYAASTLRIAACTLHQSESALGAFFRRLKSRLGAPKATTAAAHKLGIILFDMIKNGIEYNDLGQDYYENKYRERVIKNLSSRAKMLGFSLIENPTKSMH

SEQ ID NO: 515909 - protein, 344 aa, unidentified
MTYYAALDVSLRSVNICVIDDQGEIKAETKLNSEVTDIIAYLDSLELEVASVGLEAGTLCQYLTYGLQSAGFEVVCMEARQVKAALSAMRNKTDKNDARGIAQLLRTGWYSKVHIKSMASHRVRVLLSSRKAVLCKCIDLEQEIRGLFKVFGIKLPPKLGHGAFDAAVRGIIETDATLSFALLPLLEARLVLYHCFRELDNRTRKLANDDPVCRRLMSAPGVGFITALTFKAGVDDPTRFKRSRTVAAHFGLTPRRFQSGEIDIDGHISRCGDRNVRCTLYTAANALMTRSSRWSSLKAWGMHKAKTRGHRRAVIAVARKLAVILHRMWLDDTQFNWGTEDARS

SEQ ID NO: 515910 - protein, 362 aa, unidentified
MRMKSHPQHFISKPRRSSRVRITIGIDLGDIWSHYCTLNEDGEVVDRGRFRTNPSGVDKRFRNLERVRVAMETGTHSIWVSEQIQELGHEVIVANVRELRAISHSDRKSDKVDAEKLARYARLDPEILRPIAHRTVAQQETLTLIRARDVLVRLRTGAVNSVRGLAKPCGYRLPASSTLTFAKRCLAVLPHGLAQALGPLLHQIADMTVKIKQYDREIQRLTETAYPETQALIKVYGVGHLTALTFVLTLGKKERFQRSRDVGCYLGLRPRRSQSGDSDPQLGITKAGNGYLRQLLVECANHVIGPHGKDSTLRRWGLSLGARGGSHARRRAVVAVARKLAVLLHRIWITQEVYVPFYEVAA

SEQ ID NO: 515911 - protein, 387 aa, unidentified
MQKPHDDSKACLTAFVQDSTLTVVVEMSLASWLVAGMIPGVKREPRKKVGPNPEVLLQLLYRWKDEATKAGKEITRIAVAYETGRDGFWLARWLRARGIDAHVIHATSVAVSREHRRAKTDRIDTAMLQRGFLGWLRGERGHCTMATVPTVAEEDGKCPYRERESLVKHRTSTVNRMKSILIQFGVRNFKPTLRKAPEKLADVRTPEGIALPSNAVAALRRHMERFRILKEQIKAIEQTRLERLQRDPAEKFNAMVFLLARIIGLGVETAEQLVHEILSRNLRDRKAVARYAGLTGSPDESGAKRREKGLSRSGNGRVRKILIQLSWRLLQFQPESDLVLWFKTRTANAHGSRKPMIVALARKLIIALWRYVNTGLVPEGFRLRSAA

SEQ ID NO: 515912 - protein, 420 aa, unidentified
MVYLERGYNLKELPWSKTVSNSFLFKEACMILVGVDVAKDKHDCYIMTSEGEVLFKSFTIANNMEGFNQLYEKILSVIDNFDNVKIGLEATGHYSYNILGYLLDKGLTPYVINPLHSNLYRKSLSLRKTKTDKVDSRIIASMLMSDVSLKPYSNTLYHNEELKSLTRYRFTKVQERAKLKISISRLVTILFPELEKLVPTLQMNSIYALLYEFPSAHAISKAHLTRLTNLLNTTSKGHYTKDKAVLIREAAKNSIGSNMPAKSLELKHTIKLIKELTSEINKIEEEIKIIMNKINSPILTIPGIGLSTGAQILAEIGDFKNFSSPDKLLAFAGLSPSTYQSGNMYSSNAKMEKRGSKYLRFALFNAAIYVSYWEPTFSQYLKKKRVEGKHYYVAISHVVKKLVRVIFHLEKTNERYSTVV

SEQ ID NO: 515913 - protein, 369 aa, unidentified
MRPTFGGHRRPFCHSSMRDRFIKTGNKYERDKNSLGITRIVMWASSPNSKAEIAYPMNNPEINVGIDTSSQQLDIYVRPTGQFFSVRNDAAGIKDAIKQLQPLKPTRVLIESTGRLELDFVCTAHKAGLPLVVCNPSHVRHFAKSAGRLAKTDKLDAHDIAHFGEAMQPRLSSIKPEKLRAISDLLVVRSQCLEMSTMQKNRLKRMPKTVHKPIQSILKTIKTELTKIDRQLDNLVSSVSEWRQKRDLLLSAKGVGNVLAYTLMSELPELGKLNRKEIAALVGVAPMNRDSGSFQGKRFIRGGRHRVRTVLFVSMMSAIQCHPKLKPMYERMVAAGKPKKVAIVACMRKQLTILNTMVKNGTYWDENLV

SEQ ID NO: 515914 - protein, 341 aa, unidentified
MDITVLGIDLGKNSCSIVGLDSSGKVILRRRMQRNTLVTMAAKLSPCIIAMEACCGAHHLGRILAAQGHTVRLMSPEYVRPYVKAQKNDDRDAEAIAEAATRPTMRFVTLKSEEQLDMQSLHRARDRVVVERTSLMNQLRALLLERGIIVPQGRAKLRYRVNELLVQTCNELSPRIRVLIEDMMARWQAVDNRIAAFDTEFAAEVKQNEAARRLISIPGIGALNATALVAAVGDARTFARGRDLAAWLGLVPRQATTGGKPRLLGITKRGSKYLRKMLIQGARAALPTLSRGNTRLGQWLRSLLARAHSNTVVVALAAKMARMVWALLRHGRTFEHRAITV

SEQ ID NO: 515915 - protein, 354 aa, unidentified
MSQTPNTAIAVIGIDIGKNSFHVVGHDARGAIVLRQKWSRGQVEARLANIPPCLIGMEACVGAHHLSRKLASLGHDARLMPAKYVRPYSKGQKNDFNDAEAIAEAVQRPTMKFVATKTAEQLDLQALHRVRERLVSQRTGIINQIRAFMLERGIAVRQGIGFLRTELPTILATRTDALSPRMLRVIEELAGDWRWLDQRIDGLSGEIEALARQDQACSRLMTVPGIGPIISSAMVAAIGTGDVFSKGRDFGAWLGLVPKQISTGDRTILGKISRRGNRYLRVLFVQAAWVVLVRIKNWERYGLKSWIEAAKRRLHHNVLAIALANKLARIAWAVLAKGRAFELTRTDDAGVRPA

SEQ ID NO: 515916 - protein, 367 aa, unidentified
MKDSITVVGLDVHKNSIEIVMADTDGAMEVRRFGRIGGTMDALDRAVRKLVSGGSTLRFVYEAGPCGYEIYRHLTGKGFSCKVVAPSKTPKKSGDRIKNDRRDAETLARLERAGELTGIYVPREEDEAMRDLTRAREDAVKSLKTARHQLNAFLLRYGKRYPGKGSWTPFHMRWLSDIALPHPSQQIVLQEYITTVRVCTERTTRLADQIAKLLPEWRLNPGVKALQALRGVAPIVAATTIAEIGDMSRFENPRQLMAYLGLVPSEDSSGESTHRGSITKTGNGHVRRALVEAAHAYGFPARVSRHLLKRQEGLPQPVLDIAWKAQVRLCGKFRRLMARGKLKNKIVTAIARELSGFMWAIAREVEV

SEQ ID NO: 515917 - protein, 312 aa, unidentified
MNQSQKAFVGVDISKETFDVFINVGNFYQKFTNNQTGHVDFINLLKNYDVAQIVMEATGRYHCVLAANLSVENYPVSVVNPRQVKHFSLSLGNLAKTDKLDAMVLSRFAQVVLPPLTVASDEQTQRLAQMVTRRRQLIDMRTMEKNRLDGVHLDVAELIHHHIEWLNSQIKDLDDDIGRQLRVMPLWQEKAKILSSVKGVGPTTTATLLALLPELGTLSRRKISALVGVCPYSHDSGKLKGKRAIWGGRSAVRAALYMAALVAKKNNKEIKTFYDGLIARGKLKKVALTACIRKLVTILNAMVRDGREWAEN

SEQ ID NO: 515918 - protein, 375 aa, unidentified
MSNLSEAFVGLDTSKLRNSVAIAEGGRTGEVRFLGEIDTTPAAIRKLVKKLATKYERLSFCYEAGPTGYGAYRQITGLGHDCIVAAPSLIPKKPGDRVKTNRRDAVTLAKLHRAGELTAVWVPDCGHEAMRELTRARETAMTDLRRKRQQVSAFLLRQGLHYAAEKKTWTKAHMDWLAGQKLEHVEQRIVFEEMMLAVREAQARLERLADAIRVAVPEWSLAEGVTALMAMRGMDLVAAATFLAEIGDLSRFQGPRELMAYLGLVPSEASTGDTIKRGPITKTGNRRARRMLVECSWSYRHPPRVGRTKQEKDTAAPQAVREIAWKAQCRLHSRYRSLIRRGKLKTVANTAVARELAGFLWAVNRAITKTGAAAG

SEQ ID NO: 515919 - protein, 345 aa, unidentified
MKIIGCDFHPSFQQIAICDLETGELQELKLSHADGQAERFYRELGAAALIGIEATGNCQWFLDLVQGLGHEIRVGDAVKIRASYVRKQKTDKRDAGHILKLLLEKRFPQLWTPSAAMRDQRQLLRHRDKLVEIRTKVKNSLQHLAMNRGMQKKSRLWTGHGMEQFQQLAMPGWAGRRREDLLQLLKELNGQIEPLDQAVKQAAEQHPQARLLMTQPGVGPVTALAFVLTIGDVARFAGSKQLTSYLGLVPSEYSSANKRCLGAITKQGNRFLRKLLVEAAQTTVRKDEGFRKEYQHRCHHRPKAVAKVAAARKLAVRLYWMLRSQVGYPEIVHIESNPRVPLGEV

SEQ ID NO: 515920 - protein, 343 aa, unidentified
MQTVTTIGLDIAKSVFQVHGVDAAGQVVVRRQLKRRYVLAFFEKLPPCLIGIEACASSHHWSRELQALGHKVRLMPPAYVRPYVKRQKNDAADAEAICEAVTRANMRFVATKTPEQQGCLMLHRTRHLFIRQQTAVINAIRAHLAEFGIVAPVGRNGVEELLGVVADASDKRLPEIARACLVALGAQLRMLKAQILEFDRMINAWHRSNETSKRLDEIPGVGPALATALVASVADPRAFRSGRDFSAWIGLVPKQHSSGGKDKLGGISKQGDRYLRSLFTAGALAVIRYAKIHGAKHRPWLTALLARRPTKVAAVALANKIARMAWAMMARGERYKEPVALAA

SEQ ID NO: 515921 - protein, 381 aa, unidentified
MTTAATHNEQRNTTAATLFVAFELREKTWKLGFTTGHGQKPRERTVTARQQERVLDEIAQAQHRLGLPAAAPVVSCYEAGREGFWLHRFLQGHGITTHVVDSSSIEVNRRRRRAKSDGLDVRKLLSMLMRYEQGERHVWQVVKVPSVEAEDQRHLHRDLETLKQERASTMTRIEGLLSSQGLRVPSLTKLPEQLEALRLWDGSPMPPGLRRRVLRVYAHYTFLSEQIAEVEAERRAHLQASTDTHIDKMRQLMQLKGIGINGAWLLVMEFFGWRAFKNRREVGGLAGFTPTPYQSGDSAREQGITKSGNRHVRWMTTELAWSGLRFQPDSALRCWFRPRFGGGGKRLRRIGIVAVARKLLMALWRFLETGVLPAGAVLKEG

SEQ ID NO: 515922 - protein, 324 aa, unidentified
MNKFKHFIGIDISKDVFDVSLSEKEHYQFTNDTKGFKEFKTIIPNSTLCVMESTGVYHESLAMFLYEHAVAVCVENPLKVKRFIQMNLRKEKTDKADSHQIRLYAQKIAVKLWQPKELYLEESEQINSLLSFYKRDQTATKNRIHAISSLPRASKTVLRSLKRHLKNIQKEIEKLEAELLDLIKSHEQQLLTNLESIPGIGRKTAIYLIVMTDGFRKFEKAKQLCSYAGITPIIRQSGSSIRGRSRISKIGDKEVRNLLFMCSFTASHCNKSCKQIYDRITAKGKSKKLALIAVSNKLLKQAFAIAKSGLKYDENYISIKPEII

SEQ ID NO: 515923 - protein, 299 aa, unidentified
MASAGPGRSFANSAEGIAALADFCKQHGVELVALEATGGYEKQPFALLWAQGIAVSILNPRAVRDFAKGMGLLEKTDRIDARIIARFAEVKGSAPCVPLSKQQEHLKALVNRLRQVTQLHVSQKNQGLLVTDKTVQRSITTVLKVLASQKRALAAKIAAVVASDPMWQQLDQTFRSIKGVADRTVAAVMADMPEIGTLSNKAVAKLAGLAPLAQDSGKKHGKRAVRGGRRQLRAVLFVVAGGVARHHADFAAFQQRLSAAGKPKRVIRVALAHKLLVRLNAKAREVRLQFAAANAAQIA

SEQ ID NO: 515924 - protein, 322 aa, unidentified
MIVGIDTSKDFFDATAIEGGRVIFQKQFDNNLKGFNLFLKAIKNNPIELVCIEATGPYHLRFALFLNENNFNISVVNPLVIKRYAQMKMSRAKTDKKDSYLIAFYAKEQKPELWKAPSEASLEIRQLDTHLELLMKHKRAFANQLHAFKSRGAVVRGLEKQMEEQINQLNENIKKIERKIEVLVQSSYKEIAGQLKSIPGIGKKSAYMMIVSTNGFSTFDNYKQVISYFGLAPRHYQSGTSVKGKTRICKMGMSRVRKTLYMAAVTAIKYNKTCKDLYERLRTKGKSHDLAIIAVVNKLIKQSFAIAKNNTYYQADHILQSA

SEQ ID NO: 515925 - protein, 343 aa, unidentified
MEYYVGLDVSLKQTSICVVNQTGLVVREGVVDSDPEAIAAFLRAKAPGAVRIGLETGPTATWLWTQFKRLGLPVICIDARHAKAVLKMQINKSDRNDAVGIARIMQTGWFKEVRVKDLDSHAVRALLASRALLVKIKRDLENQVRGLLKNLGLVIGRAKFNVFAVRAEELIEGRPELVAAVRPLLDARQAIEQQVDDLDRKVQKLARHNAQVRRFMSVPGVGPVTALCFKATIDDPARFKRSRSVGAYVGLTTRRHASGELDWSGRISKCGDAMLRMYLFEAAGVLLTRVPKWSALKAWGTRLIKRNGLRKAKVAVARKLAVILHRMWIDGTEFSWSKKELAA

SEQ ID NO: 515926 - protein, 346 aa, unidentified
MTIVETPAITGGVDTHAGVHVAAALDPIGGLLGVQEFPATPDGYGQLLRWLSGFGTVCLVGIEGTGSYGAGLARHITWAGVRVVEVDRSDRQDRRRQGKSDPLDAISAARAAQSGRAAGASKGRDGAVEAIRVLMVVKRTARSERTQTINQARSLVLTGPDDIRVRFIHHTTSGLVADLAGLRPRPGATVGYATRIALRELGRRAQFLGGQLASLDELILPLVTAHAPGLLALYGVGPDTAALLLIAAGDHPERLRSEAAWAHLCAAAPIPASSGKTVRRRLNPGGDRQANHALWRIVITRMSSHPPTRAYVERRSKEGLSKTEIIRCLKRYVAREVYPHLRPPAR

SEQ ID NO: 515927 - protein, 340 aa, unidentified
MKKDVNCYLGMDVSKLWVDITLMKVVDHQKQPALTERFENSEAGMKALDKWLRKHQVPFDDNSLLVVENTGVYHRLIWGYCSSHGLPLHIGNATHIKYSFGIARGKNDKLDSRRLCSYACKNAEELKATPVLNPALLQLKDLMTARSRLLSQYNSIKQYLSELKLSNTKEMQQLLEQAHATALEGIKASLKTVEGQIHQLVQQHQGIKNNYDLLVSVPGIGHLTAVYILCCTNNFISKITGKQLASYAGVAPFGNSSGTSVKGRDKVHKMANKELKKLLHMGALSAIQHYEEFRAYYERKVKEGKHELAVLNAIRSKIALRAVAVINNQHPYVDNYKKAA

SEQ ID NO: 515928 - protein, 348 aa, unidentified
MRIIGCDLHARQQTLAMLDVETGEIDERRLEHEGDQVRAFYAGLPHPVLVGIEATGSMQWFLELMEELGIECVVGHPAQIRAGEPRRQKNDRRDARLLLRRLKQDDFPKIWMPSVEQRDVRALLRHREQWVRIRVRLQNALQSIALTHGIRRGAGLWSKAGQRTMAELALPPHTGMRRDELIRLRVQLEQEIDRLDEEVAEVAEERPLARLLMTHPGVGPITALATEVFLGDPSRFREGKAVASYVGMIPCENSSAGKQRLGKLTKQGNSLLRMLWCEAARHAVRKDEELKRFYRRKLNQKGLGIALVATARKLGVRLWIMLRDEIDYHEFCRRGWQKGEAQAERPAR

SEQ ID NO: 515929 - protein, 491 aa, unidentified
MEKTALEAINIPSCGLDVHKDMIEACVIDETGNKQRKTFDTMRKSLNELKDWILSLNCLHVLMESTSVYWIPVYEILEEVPGMDVGVGNAQRMKQVPGRPKTDKADADWISRLCMMGLVLKSFVASRRTRELREYTRYHKKLVQERSRQVNRIEKLLQLNGFKLSSVLSDITGTSGTKLLRILCEKGSVTAAEVQAGLHKRVKRTPTDIENAINGQMKPTSRLLLGRMLSRLETCDAEIADIYHMMSEAAKDNRREIEQLESIPGIGEQSAIYILAEISTDMSSFKTSGHMAAWAGLAPKDNQSAGKLRYSKTQRANIYIRSVLIECAWAAVRARNTRLSNWYWSNVGRIGTKKAITAVARKLLVYIYSMLKSGKMYDDSLDMADTEKRKAHKLESACKLVERRSNIINPQNHRIEAKQETFIPKLLRTCANTEAPPNTAGQPSAMPLPKRGRGRPRKTPINDIPEPAPHKKRGRPRKTVETFILASSQAI

SEQ ID NO: 515930 - protein, 317 aa, unidentified
MEQRQSSTRVAGVDVGKRHLDGAVHGLEGAVRVDNTEAGISELIAWLRAREVGRVGLEASGGYERRLHSALDLAGFEVVMHQPIEVRRFAQLKRWRAKNDRQDAQLIAAATAQVEAVKAAQDPRLAELAERLTAYEHVTDQIATMKTFLESVTLKDVLKLLRAQIRSLERMKARLAADILGRIKAEADLLARFRLLLSLPGVGPIVAACLVVRMPELGAMRRGQAASLVGVAPFDRDSGQWKGQRFIGGGRARPRRMIYLAALAASRYSPTFNGFAKRLLERGKPKKLVLVAVMRKLIEAANLVLSRGQPWLAQPSC

SEQ ID NO: 515931 - protein, 345 aa, unidentified
MPIVGGLDIHRKQITFDYLDTATGEVRRGQIAPADRAHLRAWLARFAGRDDAAFALEGCTGWRYVAEELAAAGVAAHVAEPADTAFARGRKRHAKTDRTDSRHLRVLLEQGRLPECWIPPAQILECRALLEAYHDLRREHTAWIERIHAVFFHQGAPRLGEGALRTEHGLAALRQAAAIHLSPAGQLQVATALDMLAATEARMDTLRQQLLHAARHLAGARALQARLYGVGPLAGLAMTCWLGGAGRFSSARKAVRFAGLDVTVYSSDGKRSPGHLSRQGPEILRWVAYESGKTHGRASAPGHDYYAAVKDRTDGKIAALAQARKLIRQACHILAELGDDALTAA

SEQ ID NO: 515932 - protein, 441 aa, unidentified
MQILFSRCCGIDVHKDSVTACVLVYTQGKEPEVRKKEFPAHFKSLGNLRFWLRAQKVTHVAMESTGVYWKPVWQALEGHFELILANPFQIKTVPGRKTDARDSQWIAELLAHGLIRPSFVPPRATRDLRDLTRYRVKLVQERNRVHNRIHKVLEDACIKLDTVASNILGATGRAIIQAIIAGQEHPDWLADKAKGTLRGKRPELRLALRGQITDHHRLMLRELLEDLEFVERKIGRLEKEIATKVDHGKLDRLCSIPGIDLITGFTLLAELGSDMSVFNSPHHAASWAGLCPGNHESGGKRLSNRTRKGNHWLRRALCQAAWAATRKKNSYIAAFFYRKAGKHGIRKAIVATAHKLLTISFCILRDGTEYQELGDNFFDRLHPERTRNRLVRRLQRLGLEVILQPRSDTPPPLQPPDRSTAPKRGRPCKCTERGIPCKHVP

SEQ ID NO: 515933 - protein, 411 aa, unidentified
MDVVYARCCGLDVHKRGVVACFVTPGADGAPTKEVRAFTTMTDDLLALADWLTAAGCTHVAMESTGISWKPVYNLLEDGFALLLVNARHVKAAPGRKTDAKDCEWLADLLRHGLLQASFVPDRPQRELRELTRLRTSLVRERTAAANRLQQTLEGANIKLAAVATDILGTSGREILAALIDGQTEAADLAQLARGRLREKLPELERALAGRVEVHQRFLLAEQVAHIDFLDAAIERVGVEVAERLRPDEAAIANLDTIPGIGRQVAACLVAEIGTDMGRFPTAHHLASWAGMCPGNHESARKRQSGKTRKGSPWLRALLVQAAHASARTKGTYLAAQYRRLATRRGTSRAAVAVGHTILVIAFHLLRDGTTDRDLGPTSFDHLDRQHVERRLVPRWHDLGDRVTLAPLAAD

SEQ ID NO: 515934 - protein, 358 aa, unidentified
MLYSTIVGIDTHARKNTVTAIITETGEIRQTELPAEPGLLVEWISTQELPDPIMAVYESGPTGFPLARTLMTAGITCSIAATSKLPLRKDRKKNDLIDSEWLARQCISGSIRTVRIPTPEEESLRGLNRLRAQAVKDLTRAKKRVSSFLLLRDIRRPGKTRRWSMRFKDWIERLEFDQPIDRYVLDEMVAEVYHLEGRVAGINAKIDEVISSHPWLKEQLDRLQCIHGIGRVISLTLVSEIMDFNRFKNGAAFASFVGLVPSEHSSGDKNAKGSITKTGNAYVRTALVEAANCYLRPFKSYSQSVPTVDPLVRAHATKCTTRLKKRALALKARKKQTNKIKIAIAREMAEWVYHIAVM

SEQ ID NO: 515935 - protein, 402 aa, unidentified
MYVGWDWATESHAITVLDEHGRTVDRWTCAHDEAGLSTALERLARHGAPSDLAVAIERADGLVVDRLLAAGHPVVPIHPNAFHAARPRWGAAKAKSDPGDSAKLADYLRTDGHRLRRLQPLAAAARQLQLLVRTRDDHVAARVAATNQLAALLDTYWPGARAIFADLASAITLDFLERYPTPAAAARLGEARLSAFLRRHSYCGRRPVAELLARLRTAPVASALLDSEVLAECVQAQVTLLRTLLASIADLDRAIAAALPEHPQAALLAPLPRIGEINLAQVLAEVGPILQRADTVGQACAEVGAAPVTKASGKSAAVCFRWAVDTRARQALSIFADNSRHASLWAAQLYRQARQRGKRHPHAIRILMRAWLRVLWACSRTNSPYDVSRHHSELRLRSLPAT

SEQ ID NO: 515936 - protein, 409 aa, unidentified
MLFAGIDWASEEHAVAVHDDAGKSVAAFMVEHSAEGLDKLVARLRGMAEPAELTVAIERPDGRLVDRLLEAGHPVVAVSPNAIKVWREGEVASGAKSDPGDAAVIAEYLRLRFRKLQALRPFSDETRALRAAVRARGELVDQRTVVHNQLAAILDAFWPGAKEVFADIASPIALAFLRRYPTPASAGTLGEKQMAAFCKKQGYPGRRSPAELIERLRKPPAGIVAGAEMGARKAAVLAYVGVIRSLNAAIKDLDKEVATRLGEHPDGEIFTSLPRSGLINAAQMLAEWGDCRQAYDGPDAVGALAGMSPVTKKSGKHKSVHFRWACNKRFRNALHTFAGQSRHGSDWAAGIYDRARKRGADHPHAIRILARAWIRVIFACWRDGVAYDPAKHKAAVALTTNSDVTSQAA

SEQ ID NO: 515937 - protein, 386 aa, unidentified
MKTTTLVHESTASAAITTTTTITLLLAFELGERTWKLGFTTGFGQRPRLRAVPAGAVDRVLEEITRAKRRLKLADATPVVSCYEAGRDGFWLHRYLVAHGVTNSVIDSSSIEVNRRARRAKTDKLDLAGLLNLLARYLAGDRRAWRVVRGPTVAEEDARQLHRTWETLQKDRTRLICRLQGLLVIHGVRLPITDDFLAQLEAARLWDGTPVPAGLRARLTRAWQQLALLNTQLDELDAARAALRVDPATVTGRYVTRLPTLRGIGPVGAWVLATEIFGWREIRNARQLGGLVGLVPAPFQSGETDHDQGITRAGNKHVRRLMVQLAWSWRRWQAASALTRWYEEKFGRGSRRLRRIGIVALARKLLIALWRYVETGVIPEGATLKA

SEQ ID NO: 515938 - protein, 431 aa, unidentified
MKTTQNERLATITAKTIIVGVDIAKEEHWARITDSRGMELRKPIKVNNSTSGFENLLENVDKMKQKYEAEKVIIGMEPSGHYWRAFGWYLKLHESTPVLVGVNPYHVKQVRELDDNSQNKSDKKDALTIAHLIKDGRYFEMYMPEGEYAELRIYNEERQRIIKQVNRANNTIVAVLDEYFPELAGIWKDVTCATSLAIIKKAAFPAEIIKISKPELLAVIKKASNGTEGDKLASELVKAAENSVGVREGQQAAKSRLLRLIGELEYYQSRLSDVEKELETVMAKSELGEILQSMKGIGSIISAAFLGEVGDIIRFDDWRQVRRLGGMNLVEDSSGRHKSKTKISKRGRPYLRCMLYMAGVSCCMHNAEMKQYYRYLRERPKNPLKKEQAIVATGLKVMRIMFYMAKNREKYNPDKALGDIRKEQIASLKNA

SEQ ID NO: 515939 - protein, 401 aa, unidentified
MDPQIRVGIDVGCKAHRVGIADADGKILEEFDISHTDAGFQDFFRRIDHHKQELDLSVAVAMEGFNGYARPLDRMIQQHGYTLYNVNNLKLARFKEVFPGAAKTDAIDTRKILELFHLKDHLPLAKDALQKVVAAPLVNEKLKRLSRRRRQLVHEKVRVANRIQSDMQAVCPELLAMTSNVSNLKFLRFLTCRDDLTQLARLQYTTLLKIAGVGEKYARIIQEWQRKASFSIEVEYVGPMIIADARRILELRQQIHALDEAMAELADHSELARRISSLQGFGKTCTAELAGEIGSTKRFAGERSLALYVGMSPLSRDSGQHHGSKRPRSVNHRAKAAMMTAVAHHIRCVPESRVYYDKKRAEGKSHNQAVRALGRHLVRVLWSMLKNGRDYELREVIPSVT

SEQ ID NO: 515940 - protein, 372 aa, unidentified
MNSIVYVGMDVHASNYTLSCYTLTNDECFSTVQMEPEVKNILKYLKKVHRNLGVPYEFLCGYEAGALGFSLYRQLQKHGIHCTVLAPSTMPSFHRNEIKTDRRDAMKIARCLAFGAFRPVHVPTKEDAAVKDFIRMRDDHKIALKKIKQQIHAFCMRYDLHFTEGRSYWTQRHLAWLKALALDDLLRELLDEYLVTLHQLADKIEHLDARIEELAQGERYAENVKKLSCLIGVRTHTALALIAETGDFRRFAKAEQYAAFLGLVPGERSSGDKLSRTGITKAGNTHLRKLLVEASQCYGRGKPGYKSRLLKQRQQGNSAEVIAYADKANERLRRKFYRMVLRHNKKHNVVVTAVARDLSCFVWGMMTGHTAI

SEQ ID NO: 515941 - protein, 318 aa, unidentified
MAHLKSVVGIDVSKLRLDCHGLPGEQARQVANDAAGHRVLIEWLRSLSVELAVLEASGGYEQAVVKALRRSGLAVRVVDPKRVRHYAKAVGCLAKNDRIDARMIAQFATVAGAAMRRCEVVADPTRERLGMVLGARQDLIAHQTALLQQAAAAGPARRALAAAAGTMARQIARLDRLIADDIHRHPAMAALARRLASVPGLGPVATAAIIAWLPELGRLSRGEIAALVGVAPFDDDSGKRRGQRYIQGGRAKLRNVLYMATLGAATQHNPVLKPFYLRLLANGKEPKVALIACLRKLLVMLNAMLAREQDWQPRITAA

SEQ ID NO: 515942 - protein, 332 aa, unidentified
MENNCFIGIDVSKNKLDICVLQGKEVLQEDVIDNNPSAIHRFLVDMAEKRGLDLCSCLVCAEHTGNYTYPLTLACRDLGCRLWLENPAQLKYSSGVHRGKNDRVDARRIALYASRFNDKAMLYHELTPELERVKQLRQERSLYRSDLSKYKGQLSDQKNFMESTVYKAKANRLKHVIKELEKMIDVVEREITGIIDSCDVLKRQMKIITSVEGIGRETALCFIVETAAFTRFTDSRKFACHAGIAPFQYTSGSSVRSRNRVSRRANKQVKTLLHMAALSITRKKKSELKVYYKRKVEEGKNKMTVINAIRAKLVARVFAVIRKNDIYSINFT

SEQ ID NO: 515943 - protein, 321 aa, unidentified
MMDAVLGIDIGKAKFHVTLRFGDGTRRRKAGANSPAGCAELLTWMARHGAGRVHACLEATGAYGELLATTLVDAGHQVSILNPAIIHHYAKSRLSRAKTDPVDADLIADYAATEHPPLWTPLARELRELQALVRRLDALIGMQTDERNRAQAGALTPAVQQSIAAVLGHLEAQIDTVRQQIRQHMDTHPGLRAQRDLLTTIPGIGEATAALLLAELFNKTFASARQAAAFAGVVPRPHDSGLHEGRRVMCKLGPGRLRKGLYFPAIAAIRFNPSLQPLARRLRGAGKPPMLIIGAAMRKLIHLAFGVLKSRRAYDPDLAKA

SEQ ID NO: 515944 - protein, 531 aa, unidentified
MADKKRNTQRKHIRSEGAYSLDEIRSLTMDDGTRVITSADGDIKRPVCAGIDVHKEILMAAVCKTDPKTLNAVFYVRQFKSTNSDIRTMGAWFQSHGVQDVCMESTGKYWIPVFNILEQCGLRPVLTHPKYVKQAKGQKTDFRDAVHIASMFRMDLVVASFIPPADIRDLRELCRYRLKLTYMRTSEKNRFQNSMTVSKVRLDCVFSDPFGKSASSIMEYLIMTEPEDVSDKQILSMVDRRVKASGEDILDSIHGYEFIGIQRDKLKVINLHLGQINECIRLIDGKLDYFRQKYSRIIRHLTTMIGVTEESALYILGEIGTDMSVWRDDASLASWAGLCPANNASAGKKKSTRTGDGGHYLKPLLVQCALAAAKSTKKDPYFHYKYETLKKRRGHKKAIIATARKMLVAIYHMIRDDADFLPVDHEEVLHSTKKQKGLNLDNVIAFLKEQGADDDTLRLVERQCGAQEMDAAEEMESVSSAEKKQSVSGSAATSRPIQESVNGSPVLISGSKQGRALNHHPKEPAVATTTA

SEQ ID NO: 515945 - protein, 387 aa, unidentified
MYYVGIDIAKLNHFASVISSDGEVLIKPFKFTNDNDGFCKLLSALAPYECGSLIIGLESTAHYGDNLVEFLVSRRYQVCVINPIQTSTMRKNNIRKTKTDKVDTFIIAKTLMTQPHRFYTLEDIDMMHLKNLGRFRQKLVKDRTRIKIQLTAYVDRVFPELQYFFKAGLHQKGVYALLAEAPTPELISSMHLTHLTHLLEVASHGHFTKEQAKELRVLAQKSVGSSDKALSIQITQSVEQIVLLDSHVKQVESEMTEIMLGLDSVIMTIPGIGYINGGMILGEIGDIHRFAAPKQLLAFAGLDPTVYQSGNFNASHTRMSKRGSTALRYALINAAHNVVKNNATFKSYYDTKTAEGRTHYNALGHCAGKLVMVIHKMLSDDVAFNLG

SEQ ID NO: 515946 - protein, 351 aa, unidentified
MITIGIDPHKDTHTAAAVNDASGQLLGELTVPGTADGHERLRLWAHEMAGEGVELRFALEDCRHVNGRLERSLLSAGEPVLRVGTRMTAGARKTARTVGKSDSIDALAVARAALREPSLPVATHDPELRELKLLVDHREDLVAERTAIVSRLRWHLHDLDSGLEPYARTLNREPTRRGLSQRLGRYGAGVRVRICREQLVRIGELTRAEQALRAEIAVLVRPLAPGLLAVSGIGDLIAARLLVEIGGAERFASDSALARHAGCAPIEVSSGRVRRHRLSRMGNRKLNAALHQVVLTQARVHPPARAYLAKKRAEGKSNKEAFRCLKRHLVRVVFRALREPVVIGAVSPVPS

SEQ ID NO: 515947 - protein, 505 aa, unidentified
MKNLGFFAEFTLSEILRSLCSLRIIMSLYRDTTMYENIVSRLALSSFVIGATSPTQNLILATFGHHELSPHFVGARIAMSFERRSLAKRQLAEEVKGMEVIYERCCGVDVHKKKVVACAIAPEGKEVRTFGTMTEDLLELAGWLKNWRVTHVAMESTGVYWKPIYNLLESEFTLVLGNAQHIKTVPGRKTDVKDAEWIADLLRHGLIRGSFVPERSQRELRELLRYRTSLVQEEAREVNRIQKVLEGANIKLGDVASDVLGASGKAMLEAIVQGVDDPKALADLAKGRLRDKLPALERALHGLIGPHQRMVMQCQLRHLNFLDDEIAGLDKEVARRMDPFEESIQQIDDIPGIATRTAQVILGEIGLDMTRFPTASHLASWAGVSPGNNMSAGKRKSGRTTRGNHWLRSALVQAARGAVRTSGTYLNAQYHRLAARRGDKRAIIAVAHSILVIIYNMLRNKTRYEDMGIEYFDKRDSQAIVRRTIRRFERMGYTVTIAQRQPVFS

SEQ ID NO: 515948 - protein, 341 aa, unidentified
MKESVIGMDIAKQVFQLHTVNRSSGTIERIKLRREEVLPFFANYPTSLVAIEACGSAHWWARQLQQLGHEVRLLAPRSVRPFVLRNKTDAADAQAIWTAVQQPGACTVAIKQVDQQAILSLHRLRAQLLKFRIMQSNALRGLFYEFGVVLPEGYTQLAKAVPEAFAEAENNVPPMLLESLREQWIRVLRLEEDIRVIELRLKRCLRENLDCQKVAAIPGVGLLTATAAVAALGDAKSFRSGRQFAAWLGLVPRQTGTGGRIRQLGLSKRGDTYLRTLLMHGARSIIARGQKSEWVERLLARRPYNVVVAALANKLARTLWAVLAKGSSYRAELFTACPVGH

SEQ ID NO: 515949 - protein, 402 aa, unidentified
MNAVGIDVSKGKSMVAIMRPFGEIVSAPFEIKHTASDIHSLVELINSVEGESRIVMEHTGRYYEVLAHQLLEANLFVSAINPKLIKDFDNDSLRKVKSDKADAVKIARYALDKWQNLKQYNVMDELRNQLKTMNRQFGFYMKHKTAMKNNLIGILDQTYPGVNTYFDSPARSDGSQKWVDFASTYWHVDCVRKMSLNAFIDHYQNWCKRKKYNFSQSKAEEIYGKAKELVPVLPKDAITKLIIKQAVDQLNSASTTVESLRTLMNETASKLPEYPVVMAMKGVGTSLGPQLMAEIGNVSRFTHKSAITAFAGVDPGVNESGTYEQKSVPTSKRGSADLRKTLFQVMDVLIKTHPQDDPVYQFLDKKRAQGKPYYVYMTAGANKFLRIYYGRVKEYLSSLPES

SEQ ID NO: 515950 - protein, 404 aa, unidentified
MEVVYPNCCGLDVHKQSVTACLRRGRQIEVRTFRTVTRELLELSDWLAEAGCTHVAMESTGVYWKPIYNLLDGRFQLILVNAQHLRAVPGRKTDVKDSEWIASLLAHGLLQPSFVPNRKIRELRDLTRHRTKLVQQRAAAINRIHKVLEDANIKLASVATDVLGKSGRAMLEQLVAGNGDAQQLAELSRGALRKKRPQLRDALEGRVMEHHRFLLRELLDQTDYLNAAIDRVSERIAFQVEPWLPEIERLDTVPGLSQRLCETLIAEIGPEMGWFPDAKHLVSWACVCPGSNESAGKRKSGHTRTGNNWLRGALIEAAWSAARTKDTYFAAFYRRIMRRRGKKRAVMALARVILVTVYHILKDQSTYRELGADFYDRQNLPHVQRRLVQRLEALGFNVQLEAAG

SEQ ID NO: 515951 - protein, 342 aa, unidentified
MDHFAGLDVSVKETSVCIVDDTGKIVREVKIASEPEALLAVLSNPDYHFKRIGLEAGPLSQWLYSALTEADLPVICVETRHMQAVLKAQINKTDRNDARGIAQMMRVGLYRPVHVKTLRSQKLRMLLTHRKLLQSKAIAIENDLRGTLRNFGLKVGIAGKVKFEARIKELVERFPDLAVLVEPLLVVRRVLREQLGILHRRLLVIVRDDDVCRRLMTVPGVGPVVALTYRATVDVPVRFRKSKAVGAVFGLTPSKYQSGEIDRTGAISRCGDDMMRMMLYEAAQSMFHSTKWSWLKAWAMKVARHRGMKKAIVALARRLAVIMHRIWVDGTEFRWTREVAAT

SEQ ID NO: 515952 - protein, 347 aa, unidentified
MRIVPHSCAAYGVDLGKTTFHIAGADQHGRPTLRIKLRRDALLQFFATASPARVGMEACPGAHWLARKLIAFGHDVKLIPAQFVKPYLKSNKNDTLDAEAIAEAVTRPTMRFVPVKRHEQLDMQALHRVRAQFVHQRTALVSQFRCFLLEYGIAIHTGIGMFRRDATRILADDSNDLTPTMRQLLTDLWSDFLRIDERVTALSGQIEASAKHDDVVQRLTTIPGIGPLGASALCAAIGNGKQFRSGRDLAAWIGLVPRQHTTGGKPTLLGISKRGNTYLRHLLVLGAQSCLMHLDRSRDRLGRWLDTLESRMHHNKVVIALANKLARVAWVVLTRPGALYEKMDPRF

SEQ ID NO: 515953 - protein, 484 aa, unidentified
MESGYRRCCGIDVHKKTVMVHVRPAQGQTQSRALERQFRTFSRDLRSLRGWLKNCGVTEAVMESTGQYWRAVWNILEAEIPRLVLVNPSHVKALAGRKTDRIDSQRLAQYLENGEIDGSFIPPREIRELRDLTRGRVHLLEEVNRVKNRIGQMCEAGNIKISSVASDLFGISGRRMLGALVEAKRDPGWMADYACGRLRNKRKELAEALEGTLIAHQRWMLREELRHLDWLQGQVTRMEGEIQSRMQAYAEPIARLRTIPGVDRIVAWTMVAELGVDMSVFPDADHAVSWSGLCPGNRESGGKRKSGRMRKANPYLRRALCQAAWAASHSKNTYLAALYRRFRARIGHQQAVCAVSHQILRVAYTMLRQGEDYRELGGDYQDRQNKPKAVRRMLERLSRLGYRVELHALEEGPAPPAEPGYSGSRSRSQNSTPPPAPDPTGVGCLPSLPTGKRKRGRPCKCAQRGIPCSHQCRIIDSGENLNTT

SEQ ID NO: 515954 - protein, 391 aa, unidentified
MTAYMGIDVAKRKHQAMVMNATGDTLIKAFPVTNDRQGVDSLLERLDQVKDPVEIGLEATGHYWLSLFEQLTNAGHIVHVLNPLQVHAYQRSGIRRRKTDSIDAEWIADFVRIGGARHTVDPQSMPIYMELRQLSRFRFSLTDQIGDAKKRIITVLDRVFPEYERIFSSIFIKTSRNLLKEATTAQDFAEFDLQELTALLNKSSRGRFGEDEAQAIQQAARQSIGISFLADATRIQLGCLLAQLDFLEQQVAEIDQALADLMEQLPDQYITTITGIGPVTGAAILGEIGDIRRFPSLKKLVAYAGIDPTVHESGQFQARNTRMSKRGSPYLRHALWMAAGIARMHDPELKAYYQKKRAEGKAYGTAMGAVCHKLLARIYAVLRDQRPYITH

SEQ ID NO: 515955 - protein, 341 aa, unidentified
MDTISLIGIDLGKHCFHLHAQSASGRMVLRKKLTRNQMFQLLGKMPSCTVVMEACAGAHWIARRLQSLGHQARLISPQYVKPFLQGNKNDFADAQAICEAASRPSMRFVSPRNETQQTISALHRVRETLVRERTGTVNQIHAFLLEFGVSLPTGMAVIRRLPAVLAAHELPPRLVALLERLQTHFKYLDEQVRQIESELTRQLQEDERSQRLLEIPGIGPVTASVLATELGDARQFACARQFAASIGLVPRQYSTGGKPTLLGISKRGDKSLRRLLVQCARSVMQKIERRTDRLGAWVRSLLTRRHSNVVACALANKLARIAWAILARGTHYQGEQAVAAA

SEQ ID NO: 515956 - protein, 363 aa, unidentified
MDVHKESFTLCSCKYEDEKASHYQRTPASYKNVLRYLAFLRTIYGEDTRFVCGYEAGCLGYSLYHQLENFNVECVILAPTTMLEQRSKRRIKTDKRDAEIIARSLAQHNYSPVHIPTETDNQTKEFIRMRDDHKAELKKIKQQILSFCLRQGYQYDGSGNWTAKHVKWLRSLKPAGLYKEILDEYLLTYTILTDKLNRLDQRIEELASKEEYTESVSKLTCFLGIKTHTALSVIVEVGDFQRFVSARKFAGYLGLVPGQHSSGDDRNGLGITKAGNTHVRRLLVESAQSYTRGKIGYKSRVLRSRQAGNSPQVINYADRANERLRRRYYKMVLKDGKKYNIAKTAIARELACFIWGMMTDNIY

SEQ ID NO: 515957 - protein, 348 aa, unidentified
MPVLIGVDPHKASHTAAALDDHGRLLDQRRIPATLDGYRQLRQWAGRWPHRCWAVEGAHGIGRALAQRLVSDGEQVVDVPAKLAARVRVLSVGHGRKSDPNDAVSVAITARSVPCLRQVGVEDQATVLHLLTKRREDLVAARTQTVNRLHRLLMDLVPGGARRNLTAKRAAALLAAVTPAGAPALTRWQLATELVADVRQLDQRIAAVEARIKTVVAQSNTSLVQLFGVGPVLAATFMGEVGDIRRFPSKHHFAAHTGTAPLEASSGQVVRHRLSRAGDRKLNHALYMVAMVQVRRPSAGQAYYQRKLAEGKSAKEALRCLKRRLSDAVYRCLVTDQAEPPAAVATSS

SEQ ID NO: 515958 - protein, 408 aa, unidentified
MKVVFGIDVSKSASTVCELIGESKNEFEITNDRPGFLQLLKELHVFAIHPQIIFEATGVYSRRLQTFLEDYGYDYIILNPLKAKKEMDQGLRHNKTDRNDAYHLALIQKLYHHPVNQLQAEEYHQLNALSRFYDQLTSDLIMAKNRLHQALQSTFPEIETLFSNSKGNNYWQIIKQYPHCESILESDKEQIVRWLLTLKGFGNKHAQKTAKKLLELAHKSYPVVENGSVETKQARYYADRLLVLSSQRERIINQMTALAKKLPNRDLEILESIPGFAQTTAVRVLAELGDMRRFSNPNKINAFIGIDPGRYQSGEMDSSLSITKHGNAVARKILYRAIGQIDNAAKTNPCHIADYYESKKRSSQTKGFKKIAIASIHKLIRTIYALIQNDQLYDYSVATHNQKDFCRN

SEQ ID NO: 515959 - protein, 321 aa, unidentified
MSTVQFEQLISRGCGLDVHQKTVVATIDGEGLKRSTREFGTFTSSLTELKDWLLENGITHVAMESTGVYWKPVYHILEPSGIKVWIVNARHVKNVPGHKTDKKDSAWLCKLLLAGLLKPSYIPPKEQRELRDLTRYRKKLIQDIASNKNRIIRILEDCNVKLSSVLSSTSGVTATKLIDKLCEGKPVTMQDIDCVYHKKIEASKEELWEACNGIVSPHHVYLLETIRTNTRHIEILIQELNQKIREMLSPYEKTLEHLREIPGLSHKTVEDLIAEIGLDMNVFPNEQHLCSWVGVSPGNNESAGKKKAVELRTEISKPNPL

SEQ ID NO: 515960 - protein, 349 aa, unidentified
MKFYTKQHQFYCGVDLHADAMYVCILDATGEVVVHQNIPTKPKNFLRLIKPYRSGIVVGCECMFTWYWLADLCTEQEIDFVLGHALYMKAIHGGKAKNDRIDSHKIAVLLRGGSFPLAYTYPKPMRATRDLLRRRNHLARKRGELFAHIQNTATQYNLPEPLGRIAKPSERGDLLKKFPDSVVRRMVEVDLLTIEHYEQLLDRLERELERIATGHDPINLALLKSIPGVGKILGMVMLYEIEDIARFPREQDFASYCRLVKPGKESNGKHYGHSGKKIGNAHLRWAFGEAVVLMLKGNKPAQTMLQRLASKHGKGKALAILAHRLGRAVYYMLKNQVPFDQDRFLRKAA

SEQ ID NO: 515961 - protein, 429 aa, unidentified
MKIIYPRVCGIDVHKKFIVAVICISESVEPVYLKKRFSTFHNDLIRFRDWLIQNDCQNVCMESTGKYYIPVYNILESHISNIVVANPKWVRAVKGEKDDDKDAKWIADLFKLGIVKSSFIPQKDFRILRELTRYKYKLVNMRSSEKNRYQNALTSGNCKLDMVFTDVFGKSASNIIDLILSDNPYTDEDILSKVHKKCKASLDMILDSVNGTDLTPVQKSRIELVNNHIKQLSSNIQRLDKLIDLMIEPYEDYISFLCQIPGVSRNSAITILSEIGVDMNQFTSTRRLTSWAGLTPSSNQSAGKKKSVRISRAGVYLKPCLVEVAHAAVKDTNHPYYANKFNKISKRRGKKRAYIAIARKILVAAYHMLLTGEIWNPADLAEVETPVEQRIKYVKNNLKSDIKQLLDIGLTVEELTLMIQQNANNIATQ

SEQ ID NO: 515962 - protein, 346 aa, unidentified
MTVYIGVDLHARQQTLAFVDTHDGEIKCRELHHQKEDVAAFYRQFTGEVIVGVEASGYTNWFEELIEQLGYTLLEGSAAEIRRLARRRQKNDRRDAELILDLLAHDEFPRLYRYPRQSREVLRQLRFRHKLVKLRTSVLNSLHALSISAGLSLQARLATAQGRTRLEQLRLSPVLATQRDEWLALGDELSHRILAVERWLQRQAKDDEQAPSVQTQRVQTHAGVGLLTSLCLVHTLGDVTRFASTRKVTAYVGLDVTEHSSAERKVYGGISKAGSRLLRYLLVEAGQTAARSDEQLRDFYQQVMKRRGKAKAKVAVARKLLIRTFIMLRDEIDYAEFLRRGKRTGE

SEQ ID NO: 515963 - protein, 401 aa, unidentified
MNAVGIDVSKGKSMVCVMRPFGEVVLEPFEVLHTAQNLHDLAEKLKALDGETRVVLEATGNYHKPVAFVLHDAGLFVSVVNPVLIHDYDNNSLRRVKTDKKDAVKIANYTLDKWTRLRQYLPEDDTRLALKNCYRQYQQAVAIRTMLKNNLISSLDLTFPDANKLFTSPAKSNGCEKWVDFIGDFWHSECISSLSANAFAKKYLKWCQKHGYVFTRSKSDEIYACAVNSASLPKSPTSKLLIQQQVAQLKAVSQSVAAFRQEMLRLSQQLPEFDTVMEMYGVGPSLGPQLMAEIGDVRRFSSKKSLIAFAGIEPQPNDSGKVVGNDKGISKVGSAVLRRTLFLIMTVILQTQPQDEPVFQFMNKKRSEGKPYKVYMMASANKFLRIYYARVKAVMDSERSQ

SEQ ID NO: 515964 - protein, 377 aa, unidentified
MTKIIRIGMDTSKSVFQLHGVDTTEKPVLRKKLRRQQVLTLFAQLEPTKVGLEACGATHYWARELRTLGHEVVLLPPQYVKPYVKRGKNDAADAEAICEAMSRPSMRFVPVKTAEQQAALMLAGMRGQSVRRRTQLTNAIRGYAAEFGLTAAKGIDKIEPLLARIATDAALPGLAKDLFAAYGKEYTQLKARIAWIEAKLMAWHKHNELSRRLAEVPTIGPIGASLLAMKVSDPHVFRSGRDFSAWIGLTPKDHSTAGKTRLGVITRAGDETLRSVLVVGATAVIQQARRGRGHPSPWLVELLKRKPPKLAAVALANKTARVVWKLMVSGERYNPARDGATAAAREGRCAALRGGFAPRPSLRSRTTPREADAMTQA

SEQ ID NO: 515965 - protein, 326 aa, unidentified
MQSILGIDVSKDSLDVDLVNNGRQIQKVMSNNPAGHQHLQNWLVAQVACPAHVCLEATGQYGEAVAEYLYERGHQVSVVNPARIKRYGESKLHRNKTDKADAALIAEFCQKENPPLWSPLPLQVKQLRALVRRLDDLQTAYQQERNRMLSGERDAWVLADLQAHLEYLEERMRAAHQAIQQHIEQHPDLKTQQELLISIPGIGKLTAAKLLGEIGDFSTFEDAPQLAAFAGLNPKISRSGSSVYKKTRISKEGRAVLRHMLYMPAIVARKHNPIIREFCARLSERKLPEMAIIAAAMRKLLHLIYGVLKNQLPFDPDYGKQFAFNP

SEQ ID NO: 515966 - protein, 353 aa, unidentified
MLGRVARILNLGLDLHYRQVTVAMQEDGGRIKAAGKMSYELFLNWIEKKLAEGWQIQSCYEAGASGYWLHRLLVAMGVRNLVVVPKVMDPGGKKQKTDQRDSGQLCDALDRYLRGQDKALSPVAVPSLEQEEKRALIRYHRQIMADRGRCESRGKGLLCAQGIQVQGPWWGLKGWLALQHDPQLKDWMKEQLRAWRSKILSADKEQSLLRERIEALAPARLPKGLGAYSAVVLEYELRGLGRFKNRRQVASMTGLCPGIHLSDERGKEGAINRCGIGLVRWTLVEAVWRLVIWQPHYPPVRRLAAGLVKSKRARKRLVVQAARRLAIDLWRLASGRTTPEKLGLVMQSIPQKK

SEQ ID NO: 515967 - protein, 354 aa, unidentified
MKYYTSTTQFNCGIDLHARQMYVCVMDRDGHKLVHTNIRNNDFAFFLKLVAPYRHDLTVCAECMFGWYWLADACQEAGLNFVLAHALYLKAIHGGKNKNDRIDSEKIAHLLRTNLIPPAYVYPAAKRPLRALLRQRILYVWRRSELLARIQSHQLAYNRPTLPQTRSNRDRWEEQLLTQEDNPIRQLALQNDLALIRHYDTQITALEAQLQKLTKATAWRDYTLLQTVPGIGEHLGLTLLYEIGDIHRFPTVKDFLSYCRLVKGTVASAGKIKGLRGAKLGNAYLRWVFGEAAVIAKRDHEVIGPLAQRLEARLGNKFKANTVLAIKLARAVYFMLRDGTVFDPERLVAALTHQ

SEQ ID NO: 515968 - protein, 324 aa, unidentified
MEVRSKVESRKVYVGVDVSKDNLDVAIHSRSGTRRFANTDAGIKDVVGYVRGIGPVLVVMEATGGYEISLAAALSEAGVPTAVVNPKHARDYAKSTGKLAKTDAIDSRMLADFAAAVHPEPRMLADTEAQALKDILARRSQLSEMLTAEKNRLHHARGLLCDHIKAHIAWLQAELHEMDSQLRRLIKASPIWREKEDLLKSVPGIGPVLSSMLVANLPELGTLDRRQIAALVGVAPFNRDSGRMRGKRACWGGRANVRAVLYMGTLVASRHNPIIGAHYQRLVAAGKEKKVALTACMRKLLTIVNAMIRHNTPWQYAADQAVIS

SEQ ID NO: 515969 - protein, 339 aa, unidentified
MSKLFKNFVGIDISKTWFDAALIKADNSSVVLHQQFTQKPEGFKKLQTWLQTHNVLLDDETLFCMEYTGIYNTGLVHYLVNAKAALWVEMPLKIKKAGGFERGTDDKAAAVKIALYALRFKDQVKLWQPIDSNIECIKNLIAQRDRIVNAINLLTVPVNELKECGCAEDAKTLEKLQKVPVAALQKSKLSIEALIAKTIQQDEQLNTKVKRVASIKGIGQVTSVALMVYTKGFTAFDNGKQLACYCGVVPFTKSSGTSVRYKSTVSPFANMKLKKLLHLCAMSAIQNDPEIKAYFERKVAEGKNKMSVINAVRNKLIHRVFAVIRDERNYEDNYVRKCA

SEQ ID NO: 515970 - protein, 339 aa, unidentified
MKKRYIGVDLHRNCFTVYTLEEDGSGQSRVWSIHHLKAFAKTVTASDEVAVEATGNVRMFCAALKERGCRIVVVNPHQFQVISRSVKKTDEHDAKVLAEFLSKGLLPEVRMKDELQARVASLVQTRDKLVKLRTSLKNKVNNLLAARGILLRKESLASEKGLKEVLASPVSELERMELEILVGEIRHLNESIGKLEALLREQGPKLPGWENITSIKGIGDTGASILLSTIGNIHDFADEGKLAAYFGIVPRVSNSNETERSGRITKQGCKLGRTALVQCALIAARYSPYLQRYYQRIAATRGTGKAIIALARKFLGIIYKTLKNNWIFEDFPQFVLANG

SEQ ID NO: 515971 - protein, 323 aa, unidentified
MNDKDGINDEPQSFVGFDVSKATVDALSLPDGEYRRFENTDPGLQQCLAWVQAKPACLCVVEASGGFETALASLLASAGVRIAVVNPKHVRDFAKGLGILAKTDRVDARVLALFADKRRPPLRALPDETQRKFVDLVDRRRQLVAMRAQEQTRLGQAKGPARQSIKAHIEWLSTAIADVDRALSATVRGSELWLVKSQLLASVPGVGKVTLCTLLARLPELGHLDRAAIAALVGVAPFACDSGQFRGRRFIRGGRAEVRAVLYMAVISAIRCNPLIKAFYQRLLAAGKAPKLAITACMRKLLTILNCMMRTQTPWNPTLAQNT

SEQ ID NO: 515972 - protein, 400 aa, unidentified
MRTVFGIDVSKASSEVAILVNSEKVHSYSMSNDAIGFSRLLKDLKSVQNPEIIFEATGVYSRRLQAFLEDNNYAYTRLNPLEAKKQLDSLRVRKTDKIDAEKLAESQFFLNRKTTYIQKEVYQNLHDLSRFYQNLTEDIVRAKNRLHKVLQVTFPELEQLLSTPTGEQYWNLVIAFPIKNFVLEVSETELTELIRQSTSKRISEKRASSLADKLTELAKQSYPTVKKTSPILEEVKYYAQELLRLSQGRRVVLDQMISLAQPLPEYDILLSIPGIAETTATSIIGELGDIRRFQSANQINAFIGIDLRHYESGNYLAQEHITKRGNPYARKILFKCIHNIASASHTNPCHIADFYEKRKRQSQVSSTKPHTIASIHRLIRTMYYLITHNKLYDYHLAKNQ

SEQ ID NO: 515973 - protein, 453 aa, unidentified
MAKKAKKIHTKKGIELKIVNPDAAGIDIADSEMQVCVPEDRDGDNNRRFGSFTRDLNEICSWLKACKIKTVAMEATGIYWIPLYFKLKDSGIDVILVNAREVKNIAEKKTDEADAEWLMLLHTYGLLKASYQPENEARKIRNLTRHRNNILKALSKEVLHMQKAMEQMNIKLSNVLSDIVGKSGLAIIVAIINGERNPIRLAQLADSRCKRSKEDIALSLEGTWGEDHLFELKQAYDLYKYLQGQMIECDRMIEQLLKSYTALIDTDMVNFKESKKPICKKNAVAFNLEHYGYAIWGVNAMRIPGMSSGSLLQLIGELGHDFVEKFDTPAKFCKWCNLVPNNKISGGKLISSRVSKRKNPVGQVFRLCANTLKDAKNSLGIYFRRIRSRSGHMQAIIATAHKMARIFYTMVKNKSEYDETNVGIDEQELLLKKIERAKITLARLNAKLCVSAI

SEQ ID NO: 515974 - protein, 313 aa, unidentified
MDAILERCAGLDVHQDNIVACFLSGPLDQRPSKEIESFGTTTKELLRLQDWLQDRECTHVAMESTGVYWKPVWNILEDTCELTLANPTRIKNVPGKKTDYSDAEWIARLHRSGLIEKSFVPNEEIRDLRDLTRYRRKLLQNVTQEKNRVHKILQDANLKLTTYMSDVFGVSGRALLESIVNGEVLDAEQVRDMVKSTLKRKVPELIEALNGRLRLHHRKMIRRHLEHIAFLEREIQELEAEIERLIAPYQREKELLETIPGIKQDAAASILAESGPDMSHFPSDAHLASWAGVCPANHESNGKKKTKKEPTWK

SEQ ID NO: 515975 - protein, 348 aa, unidentified
MDHYAGIDVSLEYASVCVVEAGGKIVRESKVLSEPAALIAWFGSLGFGLERIGLEAGPQSQWLYAAMKQAGLAIELIETRHVHKALETMPVKTDRNDARGIAQLMRLGWFKSVHCKSLPAQEVRALLTARKLVQSKLHDVEMSLRGILRGFGLKVGPTTPKRFAGRIQELVTGHPSLQVIADALLAVHAVLLREFNGFEQRARIMAGADAKAELLMTTPAVGPIVALTYACAIDDPARFKSSKQAGAHFGLTPRKYQSGETDYTGRISKIGDAAVREALYQAAHVMLTKPVKGCADLKSWAMRIARRAGMRKAKVALARKLAVIMHRMLADGKPFNDAAKAKIMAAAA

SEQ ID NO: 515976 - protein, 415 aa, unidentified
MLFIGDDWAEGHHDVVAQDDAGKTLARRRLPEGADGIARFHELVASCWGEDAEPDPARVVVVIETGRGPWVKALAAAGYRLYPVNPKQAARHKEAVANSGKKDDFFDAGCLADMGRTRRHQIRELAADSDVAEAVKIAARGHQKLVWERTRHLLRMRSALREYFPAALDAYADLTLAGKDALELLVKAPDPESAARLTVTQITAALKRAGRRGDLAQRARDIQASLRAPHLAQPDVIAEAYAASVQAAAAVITALNEQVKIMEAKVSGLFRRHPDAGPYLSQPGIGDITGARILGEFGDAPGRYASAKARKNYAGTSPLTIQSGKKKTVHARYIRNRHLIDALHAQALSALSVSPGARAYYDELRAHDTGHDDALRRVASRLTGILHGCLKTGREYDEATAWSHRAETPEPAEAA

SEQ ID NO: 515977 - protein, 321 aa, unidentified
MAIPLAPFLVGVDVSKATLSICAGPDTSLNDVPNQPQAIARWLNQLPSGPVWIAVEATNTFHVELITQAHRRGHAVYLIDGYRLSRYRDSIGGRAKTDASDARLLHRYLAHEHEDLRPWTPPPDGYLGLQRLLRRRSAIVRTRVALRQSLAGLPELKAAAAPLFRQLARLEDRLEARILQGIEQLHWDGDRRRCQAIEGIGPLTSVALTTTFHRAAFANSDAFIAFIGFDVRARDSGQWHGRRKLSKRGDPELRRLLYLAAMRACHSPTWRPFYQRCLDRGLAKIQALVILARKLARVAFALLKTQTDYHPRLQNEPCVTT

SEQ ID NO: 515978 - protein, 380 aa, unidentified
MKNATRYVGLDVHAATIAVAVAEPGRDGEVRDHGIIPNDATAIRRLFQKLGTKKLKVCYEAGPTGFALYWDLTKLGIDCEVIAPTLIPKKAGERIKTDRRDAAKLARCYRAGELTPIWIPDQAHEALRDLVRAREAAKHDQHRARQRLSKFLLRTDKKPPQASSAWTQKYVEWIRSLTFDHVAQQATLVDYLGEVDHLELRIRRLEASIDEAIQSAPASLKAVIDALQALRGIARLTATTIAIEIGSFTRFESAKQLMAYCGVVPSEHSSGANRRQGAITKTGNAHVRRVLFESAWSYRHRPSSGRDLKQRQQRAHAAVVEVAWKAQHRLHRRYVQLAARGKPLTKVIGAIGRELLGFIWAIARETEARQLVEAEHAKAA

SEQ ID NO: 515979 - protein, 408 aa, unidentified
MQDLNQRAWPVFAGIDWGGDNHQLCVVAPDGKRLLETRVSHDVAGLRQLDQYLIGFGPQVPIAIERSEGLLVEHLQAIGHAVFPVSPRISARARERYKVAAVKDDRFDAFVLADTLRFDHAHWRPLSVPSPLLAEIKALTRDRDRLLETQQATESQLRMILEAYHPAPVRLFSSVDRQITLSFVTDYPTPANASRVKTTRMAGFLSRHHYTGRVPAQTLADRMRQNLLSGSPGTVAGKSFSALAFTQVLQLLNAQLAEFDDAIAAATAEHPDAPIFASFPGIGPVLTAVLLAEIGEDRARFPQAEVLLAEAGLAPVTRSSGRSRSVRFRYAANSRLREATMWWAFNSLKTSPWAAAAFRDAREQKGQRYHRALRGLAARWTRILWRCWSNHETYDPTRHGSAALITAA

SEQ ID NO: 515980 - protein, 470 aa, unidentified
MRFVGIDIGGERHAVAVVNDDGALLVRSTLFGEEAAGYQRLRELLGDPNDCLVAMEATGHYWRNLFAFLVSHGFEVALLNPLRTRRFAEEELERTKTDSVDALGIARFAAQKRPAPTPVADEVTGELRELVRLRTRYVDELSDRMRQLHRAVDLGFPEFTRHVRIKTLLATAILARYPTARSFARVSIGKLACLAYDGRHHVGEALARALIEGAKVSVGNHHSESYQLQVKYTCADIELLRGRVKQLEQDIERKLEDHEVGKLLTTIAGIGARTAACLIAELGDPSRFRDAAALASYVGVVPRLRQSGKRAFSSARGLPLGNACAIGSGCRHWPPSGETLGCARTTSVCWLPASGRRSRWWRACESCSAPFTALLAPGDHSCRFLQPAVLRSNEERLIMSSGRPKWFGIASSLAFGSLALPPEMLGNYSRIDEMTTEVPARHDGSTDAEFAPEYHLGWNERGPAQQYRRS

SEQ ID NO: 515981 - protein, 484 aa, unidentified
MAAKKNAKTGTDRDGAAAAAEHGGDGAEVAEDHVQVVERAAAIDVAKGSGMVCTRVPGSRPDRRRQKVWQAGATYAGVTALMDHLRCEGIQRLVLESTSDYWRIWYYLAEAAGLEVWLVNARDVKHLPGRGKSDRLDCVWHCKLNERGMLRRSFVPPEPVRDLRALTRTRARLAQDQARHQARVEKILEDALLKISVVISDLFGTSGRRFLDALVAGERSPKALAALGDRRLKATRRELEDALTGRFRDIHAFEIATHLRLIDAINAEITRLDEAIGQQLAQVPRTAPCCTACGLAGGGHAPGCAGGGTPLLSLAGRLDEITGVGDCNARVIIAELGTDPSVFPTPGHAAAWARLTPRSRQSGETARPGRTGKGNRYLRGALGQAAMTAARTDTRLGALYRRIARKRGKQNKQKAIVAVSRVICEIAWILICDPAARYHELGPDYYRTRSPARQTREKIREIERLNPGKKVILADAGPAVPGAA

SEQ ID NO: 515982 - protein, 402 aa, unidentified
MNSVGIDVSKGRSMVAVMRPFGEVVISPFEICHTDSEVSELARRLKSLDGETRVVMEATGNYHLPVAQALHDAGLYVSVVNAKLVHAYGNNELRRVKTDRKDAVKLANYGLDRWLSLPRYIPEENTRLLLKNCYRQYQQGCKVQTMQKNNLVSLLDTTFPNANRLFRSPARADGSEKWVDFVAEFWHCECIRECSEKAFMTKYQRWCKKQGYNYREEKARSIYSEACGCVGVMPKSSTTKLLVKQVVSQLKATSSALAALKQEMQALAAQLPEYPVVMGMFGVGPTLGPQLMAEIGDVRRFHSKKALVAYAGIDAPPNDSGDVTGRHKAMSKIGASSLRRTLFLVMSVYLENSPPDEPVYQFMDKKRSEGKPYLVYMMASANKFLRIYYATVKAYLNKLEQA

SEQ ID NO: 515983 - protein, 365 aa, unidentified
MWEAPVKVQRTSVGLDVHARSVVACGLDGDTGEVFERRLTPERGEILDWVRSLPGPVAVTYEAGPTGFGLARFLLAAGVDCVVAAPSKLIRAAGDRVKTDVRDARHLTRLLHLGQIVAVTIPTVEQEAARDLVRAREDVRGDLMTARHRLSKLLLRQGIVYSGGRAWIREHERWLRRQRFDNAALQLAYDTAFDTMLATIDRRERLDTVIAELAAGSQFTAVVTRLGCLRGVSTLTAFGLAVEIGDWSRLTGRSIGAYLGLVPSEYSSGATRTQGAVTKTGNAHARRLLVEAAWHHRAPYRPGAVMRRRWDAASPAARIRGQAGNRRLHERWMHFDERKKRSVVANAAIARELAGWCWSLAVLDD

SEQ ID NO: 515984 - protein, 354 aa, unidentified
MSQKLNTVIAVVGIDIGKNSFHIVGHDERGAIVLHQKWSRGQVEARFANMPPCLIGMEACVGAHHLSGKLKALGHDARMMPAKYVRPYSKGQKNDFRDAEAIAEAVQRPTMKFVATKTADQLDLQALHRVRERLVSQRTGIINQIRAFLLERGIAVRQGLRFLRVELPRILATPSDVLSPRMVRVIEGLAGDWRRLDERIDGLSGEIEAIAHQDAGCERLMSVPGIGPIISSAMVAAIGSGDAFTKGRDFAAWLGLVPRQISTGDRTILGKISKRGNRYLRVLFVQAAWVVLIKPKIWERHGLKPWIEAAKKRLHRNVLAIALANKLARIAWSVLARGRAFEVRKVDGVAAQPV

SEQ ID NO: 515985 - protein, 362 aa, unidentified
MSHVVHIPHHLRGKTVGEAPFIICETMKKQKFVIGIDISMDDFHVCAKVKMSTGTVKIKGTRKFPNSEEGFKEFYAWAIKRVSDEDELSFIMEATGVYYENLACFLYSHEEYVSVVLANKIKNFAKSLNIKTKTDKVDSKIIAELGLERKLEKWEPLSAYYKELRDLCRELLSLKKDISKAKSQLHAMNHSYEKSSRVVKLKKEQIDFYKNVIVEIKKELELLVSNDEELKEKLKKVQTIPGVSFETALVLASETNGFRLFKNIRQIVSYAGLDIAFRESGNFKGKTKITKKGNSRIRHALYMPSLSAIQDNEPIKRLHERICERNPEIRQKGVVAGMRKLLILVFVLWKKDQEYDKNYKWG

SEQ ID NO: 515986 - protein, 502 aa, unidentified
MVPGVFGCPIGDSIPFRRLSNQTDLGQNVPHTIQGVLPMKQDKRKKKALPQKKSGSSSFPMINKDAAGIDIGSGEHWVAVPEDRDEEPIRSFGCFTSDLHAMARWLKKCGITTVAMESTGVYWIPPYQILEENGFEVRLVNATHVKNVPGRKSDVSDCRWLQRLHTFGLLSRSFRPDNQICILRSYWRHRENLVRYASDHIRHMQKALTQMNLHLHKVLSDITGVTGMKIIRAIVRGERDPQKLALMRDRGVKNTPEEIAKALEGDYREEHVFVLSQAVELYDFYHAKIDACDQEIERCLHSFDTKIDPALNPLPPPKHRRNKPLGNQSFVDLRTELYRVSGIDFTQLPGFDALTVQTILSEIGLDSGRFPTEKHFVSWLGLCPNNRITGGEVKSTKTKKTNNRAAAAFRMAAQSVGNSKSGFGGFYRRIRARLGAPKAITATAHKLARIFYRMWTTGQSYLDMGADYYENRYKERVLHNITRRARELGYEVTLQPLAERVA

SEQ ID NO: 515987 - protein, 375 aa, unidentified
MKDDSTVFVGLDVHKDSIMVAYSVGLGEVEVLGKIGTRAADIDRLCKRVQSKASNVVFVYEAGPCGYGLHRQLSAKGYPCMVCAPSLIPRKPGERVKTDRRDAAKLVRALRAGDLSPVHVPTVEDEAFRDLVRAWGAAKQDLKQARQRLKAFLLVHDVRYTGRADWGSAHRRWISSYSFDSHWQQLAFEEYRRTIEDRLAQCERLETALREMAPQWRFYPVVETLQALRGIQFTSAIGLLAELGDLSRFDHPRQLTAWLGLTPSEHSSGQRRRLGSITKAGNGHARHLMVEAAWSYCHPAKVSPAIQRRHDGLPKAIIDRAWDAQLRLCKRYRRLVTRGKHPNVAVIAIARELAAFVWDIARMTSNLPGSQTNAH

SEQ ID NO: 515988 - protein, 355 aa, unidentified
MEQVIRIGMDTSKRVFQLHGVDAAERPVLRRKLRRADVLTFFGKLPPTRIGMEACGGSHHWGRELGALGHEVVLIPPQYVKPYVDRGKNDAADAAAICEAMSRPKVGKRMVPIKTIEQQSAQMLIGVRDGLLKRRTQVSNTIRGYAAEYGLVAPKGLAHVEPLLARLAADDAVPLLARELFAMLAGQLRHVSAQIREIDARLLEHHRASQQSRRLEKVPSIGPVIAAALTAKVPDPTRFRSGRDFAAWLGLTPKDHSTAGKSRQGGITRAGDEMLRSLLICGASSVIQQARRSRSGAPSWLSSLLEHKPPKLAAVALANKTARIAWKMMVTGEPYDPCRDRMHHAVGADAFAEAA

SEQ ID NO: 515989 - protein, 370 aa, unidentified
MQESSTLYVGMDVHKESIAVAYVAQHHDAEVIYLGSFGTRHSDIDQLIRRLQSKAKHLVFVYEAGPCGYWLYRHLTKKGYPCGVVAPSLIPKKSGDRVKTDRRDAVQLARLMRSGDLTPVYVPTVEDEAIRDLTRAREDALRDLKAAKFRLKAFLLRHDIRYTGRATWGPAHLRWLSEVVCPTPAQQIVFQEYVRAVNEHTERLQRLEQELQEQVTSWRLQPVVEALQALRGVQFTVAVTTVAELGDLTRFDTPRQLMKFLGLIPSEYSSGERRRQGAITKAGNTHARRALVEGAWAYRYPAKVSRHLQLRLEQQPKAIQDLSWKAQVRLCKRYRRLMARGKHANQVVVAIARELAGFMWAIAKQVPMTP

SEQ ID NO: 515990 - protein, 349 aa, unidentified
MLHVGLDLSRKRVDVCLVSGEGELVEHFRAPADRDGLYGLTRRVAVYDEAVRGVVESMNGARFVHDELVKCGWEVLVADAQRVKGLAPLACKTDKVDARVLAELSFRDLVPAIWLPTPELRAERERARWRLHLVKHRAILKNRVHASLIAFGHQVPMADLFGVAGRRLLAELDFPEPWLGHVQASLELIDDLDHRIGEIERWLRRSGADHRYIPLLMSAPGIGWITGFTIAAEIGDISRFSSPVKLTGYTGLCPRVSQSGEVDRRGPLSKHGPRYLRWGLMEAAIAASSHPLYRERYQRTKRRLGRQRGAKVAQIELARKLTEAIWYMLTRNQPFKPFAPAGAIIRLTA

SEQ ID NO: 515991 - protein, 395 aa, unidentified
MFIVGIDIAKRSHEAIIIAEDGQVVRKAFSFRNNCTGYNLLLEQVRRLTLVKSQIVFAMESTAHYWLALYARLLKDGYTVMVLNPIQSHSLRELYIRKAKTDARDSLIIADLVRFGRCKASNVPQDKILALRELCRSRAYLVDMAADLKRKLIALLDRIFPEYESLFDSVFSKASIAVLSKYSTPQKVKNANLGKLTDLLMESSNGHFGEWKAHQLKEAACSSFGIDDSDGVYSTLLGMFLEQILPLTAQADSLEKQISVFFQEFNNPLTSIPGVGTVLAATILSEIGDITRFSSADKLLAYAGLDPSVKQSGEFKSNQNRMSKRGSPYLRRAIWLASTVAVHRDPMFQTYYEKKISEGLHYMNVIGHVSRKMTAVIFAVLRDGQPYQPVLQTAD

SEQ ID NO: 515992 - protein, 409 aa, unidentified
MDVIHPKCAGLDVHKDSVVACARIGTGPKIAREVKTFGTTTRDLLALSDWLTAQGCTHVAMEATGVYWKPVWHVLEGSFELILANAMHVRNIPGRKTDVNDATWIADLLAHGLIRSSFVPAAPLHELRDLTRTRTQLVREKARHILRIPKTLETANLKLASVLADILGVTGRRLLDALAAGESDPDRLADLAHDHRLKASRAEFVEALHGRMTPHHCFMLALHLRQIDALDTAVRELEARLEDALGPFRPALARLTTIRGIGDTAAHVLIAEIGIDMSHFPTAGHLISWAGLCPRLHESAGKRRSTRTRHGNRWLKTTLVQAAWGAVRHHHGGYLRAQFVRLRSRRGPKKAIVAVAASILTAAYHVLRDGVEYRDLGADYFDRRDKAKLANRLIARLHDLGLRVEVRAA

SEQ ID NO: 515993 - protein, 395 aa, unidentified
MNKIVHYIGLDVHKETIAVSIAPQNSTEVRRYGIIGGTLDAMDKLIKKLAAENVELRFVYEAGPCGFVLCRHLRYKGFVCDVIAPSLIPRKASDHVKTDRRDADQLARLFRAGELTTIHVPDQEDEAIRDLVRARFAAMTDQRQARNRLKGFLLRLGYRYTGKSSWNDAHKRYLAGLVMPQGPQQIAFQEYIHAINDATDRLERLAQAVEDALPDWKREPVVRALMSLRGVQVLTGMTLVAEVGDFNRFDDPRSLMHFFGLTPSEHSSGGKRVQGSITRCGNSHCRRILTEAAWHYRLQPKVSEAIQKRQQGQSKKVQTIAWDAQQRLHKRFKTLSAKKRSVIAATAVARELAGFVWAVACEVKPADKPAAPEIIRTCKGKVYQLDANKKMAKTK

SEQ ID NO: 515994 - protein, 345 aa, unidentified
MPVAEVDTFAGIDVSAHELSAALRRGQGHDKPAMTKFPNHSSGHKALVAYLLRGGGRVRVCLEASGNYSLDLALTLQAHRQVEISVINPRRARRFAESLGERSKTDPVDARVLCEYAARMPWVQWQPPSPVALHLRALTRAIADLGVIHTQQNNRAYAAAASQALPVLVVKEMQRHKKYLEQRMTRLRREAVRLIACDPELDRRFRLMLTTIGIAETSALQILGELAVLPDMLDARQWVAFSGLDPRLFKSGKSVEKRPRISRSGSRHLRRALYMPALVALRRDPYLRVFYQNLLARGKARLQAVVAVMRKLLHALFAMFRNNQPYDGSKLCAVDLTVHAIAACA

SEQ ID NO: 515995 - protein, 421 aa, unidentified
MENNAARKLKQVPVGYLRVGVDPHKKKHAAVTMTEDFLVQGKFKFTNSRDGFEEALERARADMEKAGCRGIIFAIEAASHLWRNFAYFLDEKGIPFRLINPFSLKRRREGKDLNRRKNDFRDAEVAAQLLCTGEFTETTLPQGVYAELRATYNAYRRVVKERSRLINLLKGLLDGLFPEFAQVFKDLCGQTALRVLSVSPIPGLIGVMTEDEFIKFVREGYQGRLMRSKLLALHHAARHSAGIRAGAWSVSSEVSLLVEKLCLVNRHIRQIEQTLVKLVDETEEGKYLLSITGLGYISVAGLLAELGSFRFYHNARQMIKMAGSNPTESESAGKRKSKTPMSKKGRPGLRYCGWTAVLSLLSHNSDFRTWAKRLRDRPAHANPLTGKEILGAAVNKLLRIGFTLVKKQTFYQLPRVPQLVS

SEQ ID NO: 515996 - protein, 370 aa, unidentified
MNRLFVGMDVHKEKIVVVGLPEEGSHPVVREEFGGGDLPRLTKRIQTLSRSWQVESCYEAGPSGYGLARIFLEAGIPCRVVAPSLIPRRPGNRVKTDSRDAKELALALRAGTLTFVRIPALEEEEARGLIRCREDVARQVRLFKTTVSHWLLNRGHRVPAGRKRWTPAYWKWVRALPLSPMDRTTLDHYLDVVSLLENRRKQVEEQICALAKEDPYQERVRRLTVLRGFSPLAAMRLIAEVIEFKRFRSAPSFMKFTGLTPSEYSSGDRTRRGRITKAGNSHLRHVLVEAVQKAHFSAQPGRALLRRWQEVSGPVRQIAVDCLKRLHHKFWSLTQRGVPAGKTRVAMARELAGFVWALMTYPAGETPAAV

SEQ ID NO: 515997 - protein, 369 aa, unidentified
MVDSDLIINFEKHMNTLNANSIVVGVDVHKYSHTAVAMNAWGEERGTLDFSNNNLETYTQWLEELGLKENIIVGLEDVNSYGIHLVEDLRKKNYHIRYVPAILTERERKASTKRHKSDPVDAKRVGKVILTKYEDTLPAKESIAEKRELDMTKSLDLLLMERRDLVKWKTIIKNQLHCLIHQHYTESYREHCPRSFSKKAIEWFLDDLKDNKSNILATSITRRLNRLLFIEEQIYTISKEVAVIGETSKEAMTLTTIHGCGMVTACSIMAEVITVKRFKNKHHFSMYAGIAPTPHSSGRKNKMRTNPFGNRQLNRAIHSIALSQIAIKGDPTGKEYYQKKLKEGKTKLWSLRCLKHQLAKVVFQKLRYA

SEQ ID NO: 515998 - protein, 357 aa, unidentified
MSRHSVAAGDLAGLLARFWAIRDKASARTGISYPIIVIQEAGLDGFWIHRALEKEGIESHVVDAASIAVSRRRRRAKTDRIDGEALLRVLLAFKRGEPRVCSMARAPTPQAEDSRRICRERKTLIVERVQHVNRIKGLLFSQGIGDYEPLRRDRRRALEAVRTGDGRELGAHMKAQIGRELDRVELLLDQIAAVEGERDAMLAREAEKARAAQDAKRTPAAVEMLIDVRGLGADTVAMLWTEALYRSFDNRRQVAAFVGLAGTPWQSGSIDHEQGVSKGGNQRLRTAMIQLAWLWPRHQPGSALARWFVERTKGASKLHRKKMVVALARKLLVALWKWVDAGVVIEGVVLKSAAKAS

SEQ ID NO: 515999 - protein, 359 aa, unidentified
MYFAGLDAHLKYVSIAVLDRRGQVALETSVSTREPEQLLAALAPYRPLEVVVETCPFWPWLYDLLVPAGIGFHLAHAKQLRAIAAAPQKSDAVDARLLARMLLAGLIPEAYPRPADQRELLRLLRHRTTLVRYRTRLAGRIHSQLHQQRLSLPREKLLRQATRAWLEETAWPRLTVEQQAIVTTHLELIDGLTPLVQALERRIATAAAGHATAPLLATIPGIGPYRSLLLAAELSPITRFPRAEHLVSYAGLAPVTRSSGGHTHHGSIPQGANRWVRGALVSAIPTHVRWAPTSPVTMAYAQLKARLGWRVARVAAARKLARVVYVMLTRRTPWCGAPVAGDVRDEVQNSHVAATTSFC

SEQ ID NO: 516000 - protein, 337 aa, unidentified
MKYCGIDLHSNNSVVSVIDETDRVVAEKRLPNDLAKILAFLDPWQAELTGVVIESTYNWYWLVDGLQAAGFIVHLANTTAIKKYEGLKHNGDETDARYLAHLLRLGILPTGTILPPEARSVRDLARKRMQLVQNRTTHILAIENITARQHGMRLSGAQVHRLTAEAIDQMGLPAEVALAMQSSLAVIQTLSTQIGLLENRLAENVEARAEYASLKTVPGIGPILATVILLEVGSIERFDSAGNFASYARCVDSRHMSNGKKKGEGNTKNGNKYLSWAFIEAANFALRFCAEAKRFYERKKAKTNPILARKALAHKLARACFHILKERRPFDTTRCFV

SEQ ID NO: 516001 - protein, 361 aa, unidentified
MEKHSTQTRKVQVIHIGIDVHKSSWRVTEMRDGVALKTYSASPSAAELGARLRREYPGAEYRSVYEAGFCGFHVHRELEAQGIRNIVINAADVPTSGKERANKNDTVDSRKLARELSNGSLEPIYVPSPANLLLRGVVRCETQTVKDVTREINRMKGILAQRGEEPPRINGGALKLRLEQAVREGDEEMALAVGRLMTRRSERARAVQAERRTVEALGLWPLLHRLMTVPGVGFRTAVVVLSEIWDMSRFPTENHLVSFAGLAPRLTGSGEHERTGGIGHRKHRLLQGILIEAAWTAGRKDAELHDKYWALAMRKTARKAVVAVARRLLLRIRAVWLHGADYVPKQASDKAGGTGNDGHGE

SEQ ID NO: 516002 - protein, 345 aa, unidentified
MDSMYYIGLDVHKKTISYCIKNASGQIHGEGTVGATRRELDGWMKTLPQPWRVAMEATIFTGWIYDHLLPHAEQVKVAHPLMLRAIAAAKKKNDRIDAGKIADCLRCDFLPECHMASTEIRDRRRTLRYRHLLVRQTVQMKNRISGLLLETGVSHNKQRLHKVGYFRELLSTNDEVNASIRPLLRLSRETIVRLQKTEYALVSSLQRDPLLAERIQRLRTVPGVGPITALTWALEIGDVSRFRSIRQVISYCGLCGDEKSSADKVMRTPLSKQRNKHIQRVLVEAAKLAPRQNHELALVYEKEKQKGNGNRATLAVARKMVAYLLAVDRRQRDFRPSEDHRNAAV

SEQ ID NO: 516003 - protein, 364 aa, unidentified
MWEWASAPRWRPRYFGVLTTPLRREALVSRYVGVDLHRRRSQVVILDEDGVKVSSVKVDNSDRAGFVGAVLEAGVGSHVVLEATWGWYWAADLLNEAGFVVHLAHPLGVKGFQNRRVKNDDRDAALLADLLRMGSLPEAWIAPPALRELRELVRYRHKLCELRSGLKSQVHAVLGKEGVIPQLVELWGPAGALWLDSLELGDTYRDRIVSLRRFIGHYDREIKRLDQEIYSWLRDDVGYREIQRLDGVGPVLAAVFVAEIGDVSRFQSAKQLSSWAGLTPRHRESDTTINRGPITKQGSTLVRWAAVEAVARYQGGPPIRDAYQRIAERRGNKVARVAAARKLLTLVFYGIRDGEIRCLTEAAA

SEQ ID NO: 516004 - protein, 308 aa, unidentified
MYIGIDVSKARLDVAGITSSVRSFSNDQTGHQQLQAELCSARPALIVLEATGGYEAAVSACLHLSDLPVVVVNPRQVRDFARATGTLAKTDQIDAQVIARFAEAIKPPQRPVPDEHLRALRALVNRRRQLQDMISAERHRLENAPSIVHKEITAHLNWLEKRLRKTDDQLHAAIKDSDIWRVRDDLLKTVPGVGPVVSAALIAGLPELGQLDRKRIAALVGLAPFNWQSGQYKGKQRTCGGRAAVRKVLYMAALVAIKHNPVLKTFYQRLVHAGKPKKVAIVAVMRKLLLILNAMVKNHEPFKAAMTP

SEQ ID NO: 516005 - protein, 309 aa, unidentified
MTVAGIDTGKAFLDLAVIPGGPVFRVGNDPQGWREAIERLRRAGVERVGIEASGGYERGAIAALEQVGLAVVRHQPAQIRLFARMRLQRAKNDRIDAQVIAAFTALVHPRRAAADPRLQALGDHLVYIEQLGEDIARLKTRLEHQHDERLAELIKADIALLKRRQAVERGMLEAAARLDAALSRRLDLLLSVPGIGLPTALVLMIQMPELGSITREQAAALIGLAPYDRDSGQHRGQRHIAGGRGRPRRALYAAALPAAFQWNRQLVALYRRLRANGKAHKQALVACARKLVIFANAVLARDTPWQTQN

SEQ ID NO: 516006 - protein, 401 aa, unidentified
MRFAGIDVGSERHMLAMVGEEGEVLCRSSPFGEDASGYARLFELLGPPEGCLLALEATGHYWRNLFVALLAKGYAVAVLNPLRTRRFAEEELQRTKTDAIDALGIARFAAQKRPSAAQLPDVATEELRELARLRARLQEDFASRLRQLHRAVDLGFPEFTRHVHTLESPLAAAILSRYPTAASFHGVSVKKLARIVYDGSHKIGEELARALIDEAANSVGSHHSEPYRLRIRYLCEDLDVLRRRLKDLARDIERKLDDHEVGKLLTTIDGVGPLTAACLIAELGDPARFRSAGAIASYVGVVPRLRQSGKKRFSGSPTIPFGNARLRKALWMVVLNAVRCNPWLRQYYERLRAAGKPGKVAVIAAMRKLLTAVWSVATHRKPFVPHLPRVPAPLGAVTNKA

SEQ ID NO: 516007 - protein, 342 aa, unidentified
MLIIGCDYHPSVQQIAFVDTETGDCGEQRLKHSDREAEKFYRDLKLRAESVRVGLEATGHTRWFERLLAELGYELWIGDAAQIAAMRVRKQKTDRQDAQFLLKLLLEDRFPRVWVPSLENRDLRQLLWHRHRLVQMRTRIMNQLQSIAMNEGIQRRGGLRSEQGRKRLEQLVLAPWATKRRQDLLGLLDQLNDSVEELSAALQQEAEKRAEARLLMTHPGVGPVTALAFVLIVGDPERFRCGKQIGSYVGLIPEEASSGVHRRLGHISKQGSTLLRFLLVEAAQAAARFNPEWRSKFLHLAMRRERRIAKVAMARKLAVSMYWMWRKQRSFQPSIEVGSHAG

SEQ ID NO: 516008 - protein, 444 aa, unidentified
MSKKRSAHLRGDRGQAFADLVRGIPPEQILCVSVDISKYFHVAMIHNSLGEILTPPFEVDIYQSGFDQLCQKIDAARLQVQAQVVLVGMEPTSHYFENLARHLLDRSQPVKLVNSFSVKQNREQQLMRREKTDQIDVAAIGDLLRRGEGTSYRPPSRVYLQLQQIDRVRLGKLKIESMLKNQILGHLDRIFPGLVLIGEAAQARYAPFFNVDFWQCRTLQALIRICPNPHHLVGMSPEQLIRLFHAQKYRMGPAMAAKIIAQAQKTLLPDPELAAIRCELLQHDLALLESVQAHIASLEQRLTSLLAQTPYQVWTKFKGISAVQAASLAAAIGDPSHYSEAAQVFRRSGLVSGRNDSGNHQRKGCGNPILKVGDVYLRRNLMNAVSTLLVHQPVLYCYYKRLALSKPAGVARVATARKTIGLLWAAQRDQFSNTLIKCKGADMQ

SEQ ID NO: 516009 - protein, 341 aa, unidentified
MKQVSTIGLDLAKHIFQVHGAGADGSPVFNRRLRRSEVLHFFSKQPACLVGIEACGSAHYWAREIATLGHEVRLIPPAYVKPFVKRGKTDAADAEAISEAVTRKTMRFVPIKTAEQQAGMMVLKSRALLVKQQTQTINALRSHLAELGIIAAAGRTKVEALVAIVRDVADIRLPAAARFALTAVADQIEAQADQIDKLERAIVAAARTDKDMRRLTTIPGIGAITAATIKALVPDPGGFKSARHFAAWLGLTPRQHSSGGKERMGRISKMGNPELRSLLVLGATSVLRIARKADRAPPWLKSLLARRPYKVAAVALANKTARIAWALLNRGGVPCRPTSRG

SEQ ID NO: 516010 - protein, 424 aa, unidentified
MKSAVEYAALIGLDWADQKHDVCLLVPGQSAPEHLTLANTPEAIHDWIGQLRQRFGGRPVALALEKTRSGLVHTLMQYDFVVLYPLNAEAVARYRQTFATSRAKDDPTDAALLADLLAKHREEFRPWQPDTAATRELAALGEARRQAVNLRTNLSNRLTAALKSYYRQALELIGEDVYSPLALDFLTKWPSLPALQRAQTETVRRFYYAHNSRRTDVIEARLQLIAAATPVTTDEAIVEPAMLTVQMLVEQLRALTVAIRRYETRQAALFTAHEDAPIFASFPGAGAVFAPRLLAAFGSDRTRYDSPLAIQQYSGIAPVTERSGNRCWVHWRWGCPKFLRQSFHEYANESIRHSLWARACYESQRHAGKGHSAAIRALAFKWQRIMWRCWQDRTPYNEVHYLTVLQKRGSKLLKWIAEPKEQAA

SEQ ID NO: 516011 - protein, 336 aa, unidentified
MENFYFIGVDVSKKKLDICVMCGSKVVTEEQVTNHQQAILKLINELKRDLNMTNGDFIICAEHTGQYTYPLICVCKSIDCKLWLENPAQIKYCSGLTRGKNDKVDAKRIAMYASRFCDQAVCYKRPSEELTRLNQLEAERTLYLVDLSKYKAQLTDQKDFMPKALYKDKSGRLKMLIKSLEQVLKAIEDEMNRIIESTKILSRQMDLLTSIDGIGRVVAMNMIIVTEAFTRFDNPRQFCCYAGVAPFAYTSGSSQHSKNRVSQRACKYIKTLLHMSAVAITHRKSGELKAYYERKVDEGKNKMTIINALRAKLVARMFAVIKRDEFYSPILSENIC

SEQ ID NO: 516012 - protein, 314 aa, unidentified
MTGPACFVGIDVAKATLECAVLPTGETWQVANEDGAFLALVVRLRALVPVRIVLEATGGFEHGVVAALAAADLPVVVVNPRQVRDFGRACGELAKTDRIDARLLALFAARVQPELRALPSEAAQALDALLTRRRQLLEMLTAERNRLGFARGRVRRDIDQHIRWLQKRVKEVDHDLQATVEASPVWRATEDLLRTVPGVGRVVSCTLLGELPELGQLTRKQIAALVGVAPHARDSGTLRGKRMVWGGRAPVRAVLYMAALVAAKFNPVIRVFYQRLRGAGKPAKVALTACMRKLLTILNAMVRSGEPWRVTTTA

SEQ ID NO: 516013 - protein, 402 aa, unidentified
MNCVGIDVSKGKSMIAVMRPFGEVVVSPFEVRHTANELSELAGLLKSLDGETRVVMESTGNYHAPVAWLLHDAGLYVSVVNAMLVHDYGNNSLRRAKTDKKDAVKLANYGLDHWLTLPRYIPEEDTRLMLKICYRQYQQYSKVQTMLKNNLISLLDTTFPDANRLFTSPPRADGSEKWVDFVATFWHCECVCGRSEKAFTTQYQKWCRKHGYNFSEDKALDIYASACRHFGVIPKTDTAKLLVEQAISQLQTTSSALAALKQEMQSLAASLPEYPVVMGMFGVGPTLGPQLLAEIGDVRRFHSKKALVAFAGIDAPPYQSGQIDVRSRSISKRGSASLRRTLFLVMSVILQCAPMDEPVYQFMDKKRSEGKPYRVYMMASANKFLRIYYASVKAYLESLEHD

SEQ ID NO: 516014 - protein, 408 aa, unidentified
MTVVGIDVSKGKSMVAAMKPGGELVAAPYEVRHSDIELSRLALDVLCMEPDTRVVMEATGRYHEPVAALLHSEGIFVSILNPLLIKQSGAGSLRKVKSDPKDALKIAKYGLDNWSTLREYTPTEAIRQQLKLCERQCDLYSKNIVMLTNNLISLSDKTFPGVNELFSSPEKADGHLKWVDFYRTFWHCDCINRMSPDAFGERYKKWCKKKGYHFSADATDALYAASCGLYTTLPRDNNAKLLVTVAADQLIALRENQSKLEAEMLNLCKQLPEYETVMAMYGVGKSTGPHLMAELGDIRRFPHRSSIVAFAGVDPGVVGSGKMQLSSVATSKRGSPQLRKALFQVVSTYVKRKPKNEAVYQFYAKKRDEGKPFFVCTTAAANKFLRIYYARVKECLNAAESAVQTEEG

SEQ ID NO: 516015 - protein, 278 aa, unidentified
MSRRCIGLDVHRDFCEVAIWDQGEVRSAGRIDSRPKTLAEFAATLGPGDEVALEATSGARQVAEILRPCVARVVIANTHRLAAISEAKCKTDRNDARTLAQLLAAGMLEGSWLPDEQTRALRRRVSRRHNLVVARTRAKNEAMSVLHRNLSQRPPMSDPFGVKGRKWLGALELPDDEVETLSASLRLIDFHGAEIETIERELARFAASSAEARRLITVPGVAMVTAVTFLAHVGEIGRFAAPKQLVGYLGLDPRVRQSETAPPSPAGSPRRARSSSGT

SEQ ID NO: 516016 - protein, 422 aa, unidentified
MQTLLSQKFTAYIGIDWADTKHDVCLQVAGQAQRCFSVIRHNPEAIDQWAHALYQRYGGPIAIAVELDKGPLIAALQKYDFFCLFPINPATLAKQRKAFVPSGAKDDPSDAQWALELLLKHPDRFPLQEKQSPAIRSLASLTEHRRTLVDERVRTSNRLVCMLKQYYPLALELFHDHDTQVFCDFLERWSTLETLKRARPTSVLKFLNAHNVRHAELNQQRLALILKATPLTEDPGIVTPSALYVRTLASQLSGMLVAIKQFDAAIEETANTLADYSLFKSLPGAGQQLAPRLMVAFGEQRDRFKDAGAMQRYAGIAPVTERSGKKKIVRWRYQCSTFLRQTFVEWAAHSINQSVWAGAYYRQQKAKGCSHQAALRALAFKWIRIVYRCWNAGSQYDESVYLQALARHDSPLIRAPEATKAC

SEQ ID NO: 516017 - protein, 362 aa, unidentified
MEFFSGLDVGMERTAICVVDDKGEVQMQTEIVTDPDAIVTALRPFLPRLRRVGHEAGSLSPWLQPELARRGLAAVCLETRHVRAAMSAQRNKTDATDALALAHIVRTGWFRQAHIKTESCYRLRLLLTQRRNLKRKVLDLENTIRHSLKAFGIRIKGTGRTGFDAAVREAVAGDALTSELMDAMLVARAVLWKQYCRLHDLVVKFVARHEVCRRFMAIPGVGPVTALSFVTAIDDPQRFRRSRDVAAYFGLTSRRWQSGTSVDVQGRISKAGDGDVRRALYEAASALMTRFKGRDKVRTWGLALAKRSCHRKATVAVARKLAVIMHAMWTDGTCYVGDAAASAGDRAARAARKDGKLLGAQA

SEQ ID NO: 516018 - protein, 345 aa, unidentified
MIIGCDFHPSWQQVSWMDTETGETGEKKLVHATGDAKTFYQQLEAPVLIGVEATGNSQWFVELVEDLGHAIWIGDAAQIRASYVRKQKTDKRDAAHILKLLVEGRFPRLWTPDREQRDLRQLVLHRHKLVEIRSRVKNELQHLSMNKGMQRKGKLWSQTGQKLLRELPLKPWAACRREDLLGLLAMLDQQVGKLDDAVQQAAEQHPQARLLMTQPGVGPNTALAYVLTIGDVSRFPRGKQVASYLGLIPREESSGGRQKLGAISKQGNGLLRSLLVEAAQIAVRYDPGYRKQYLHRCHQKPKGVAKVAAARKLAVRFYWMLRTQTAYPEIVRIESSPRVPLVGAS

SEQ ID NO: 516019 - protein, 368 aa, unidentified
MNCTAVGVDIAKNVFQVHYVDQATGEIVNKPIKRAHFLEHFANRTPCLIGMEACSGAHHWARQLLKMGHEVRLIPAEFAKAFNIRKKNDAADARAIWLAVQQPGKPVAVKSETQQAMLALHRMRQQLIKFRTMQINNLRGLLTEYGEVMSQSRAALDKAIPEVLGRVAERLPAVVIDTLREQWNGLTKLDEQVAQIERRMRAWKKEDKAVKAISEIPGVGLLTATAAVAMMGDPKAFRSGREFAAWAGLVPKQTGSGGKVNLHGISKRGDAYLRTLLIHGARAVSRHANQPGTWVDQMIKRRPKNVVIVRSLDWLVHDLAGSLIYVMHLKHVFGDIHTHSCTVHAGSSGLREKNTMIFQFWHSDAVGP

SEQ ID NO: 516020 - protein, 357 aa, unidentified
MKQKDNRIDFSNQELFIGIDVHKRSWTVTERMKDLELKTYSMNPSAEELSAHLQKYYPGGNYNSVYEAGFSGYWLHRKLKDLGFNNIIVNPSDIPTSGKERLRKTDIVDSRKLARELSAGNLKGIYVPSILFQELRGLSRQRYQQTKKLVRIKNQIKSYLNYYGQPLPENYEVLHWSNRFIMHLKTLEFSYEIGKEQLTNYIDELVILRKRKLQILQSLKGDLQKHNLYNKIKLLLTVPGISYITATTLLTEIADIHRFKSTDRFASYIGLVPSTKSSGEKEKVLGLSVQFNRYLRQLLVEASWVAVRNDPALALSFTKYSERMCKQKAIIKIARKLLNRIYYVLKNEKEYVCSVVA

SEQ ID NO: 516021 - protein, 385 aa, unidentified
MVTGITAYKRRSLMNNSIVYVGMDVHKESYTVCCYCFDTDRVMYQQKMPSDYKMILKYLEQLRKRFHEEVEFVCGYEAGCLGYSLYHQLTDHGVKCIILAPTTMAITNKNRVKTDKKDAGNVARCLAFHTYSEVYIPTDEDNSIKEYIRMRDDQKNNLKKTKQQILALVLRLGKKFEGGKTYWTIVHMKWLKSLDLGGVFQETLEEYLITYEYFTEKINRFDQRIEELASEEKYQEKVEKLGCLIGVKTHTALSMIVEVGDFERFAKPEKFAAFLGLVPSEDTSDEKRNQYGITKAGNSHLRRLLVEAAQAYTRGTIGHKSVALKKRQQGNMPRVIAYADKANERLRRRFYKMTLNKGVNRNVATTAIARELACFMWGLMTDHVA

SEQ ID NO: 516022 - protein, 351 aa, unidentified
MRNLAAPEGDRRFGRKVTMVGVHPDGSTLTPEGIVMQSILDLGADVDSRFVVVACAAGSFRPQRIANERKAILAWLRAVPRGSRLAMESTGGYQELLAGLAHKAGMQVFVINPRDLRRYAEGIGRRGKTDRMDAEVIARYVAREHSELHAYVPPSKAQRELAQLMGRRAKLVQTKGSIMQSLRGLPALRCEAKQLAARIDQLIARLEAMMQRALQQTPPARQAAEHIATIPGFGTLSSTCLGHSFTRLPYANSDAVVAASGLDPRPEDSGQKHGRRRLSKRGPAEERRLLFNCARSAARTQLWRPYYQAQLAKGLSTTAATVILARKMLRVAFALYKHRQPFNPSLLGSRA

SEQ ID NO: 516023 - protein, 347 aa, unidentified
MKIATVGLDLAKTLFQVHGVDSQGHIVVRKQLRRVDVLAFFAKLEPCVVGMEACGSSHYWGRELTKLGHTVRLIAPQFVRPYVKTNKTDAADAEAICEAVNRPHMRFVPIKTQAQQTMLSLHRARAGLVKSRTALANQIRGLLSEFGIVLPQGIRLLGQRVTEALSNREHELCEQFQTLIQLLVEQLRELGNKAAELEGRIRAMHRTDEAGQLLETIPGVGPLTASALAASIGNPRAFRDGRELAAWLGLVPRQHSSGGKPRLLGISKRGDTALRTLLIHGARAVIRMAANKPEMTDSWVMKLCRRRHKNIAAVALAAKNARTAWALLIRKQVYQVSHVPVRADVTV

SEQ ID NO: 516024 - protein, 373 aa, unidentified
MDPEADDSQKERHFRFPNTPDGWAQLLPQLDRTCWVALEVTGSAFEVHDVLSVHVGRVLLANPIDLKRFGSGRHTDRVDAARLAKMLAVGTIPTVWVPPQPMREVRRLVSYRARLASNRRRAINHAKNVLRRHGQVLPRETDVQRWLTPERVAVLPGADRVILLSACRQISAVEAEIDGLEGEIARGVADVPAVQVLLTITGMGLIGAAASWAILGDPHRFTRPKQVTRYAGLDPSIVQSGEQHRQGRISKTGSLLLRTLLVEAAHSLAQWDSGPLGQFYARKAQEIGPRKAIIALVRKLLIVAWRMLLTGEVYRAVRATTVARKHRERQKKIRIQMPSTVPVPDPARVTRRPRVYAGGTEGAMSRQRTLVST

SEQ ID NO: 516025 - protein, 411 aa, unidentified
MIKENYIYVGIDLHKETHTAVMIDCYNQKLGEITFPNRPADFPKLVAKVKKCNTDGKTIVFGLENAYGYGRALAVWLIDKGYLVKDVNTAISHRQAKHRGAMYRKSDSDDAEAIALATLNMLDKLPDAYPNDAYWSLGQLVHRRDNIMKQRTRLVNQLHEQLCIAYPSYKQFFNDISRPTALYFWEHYPSRKYLKGKSVEDLRAELVPVSHNKCSTKTCEKILDAVASDKVKNIDYQDARDMVTLSIVSDLQHYDSQLAEVDKMLEQMYKMLGYTLTTIPGVNVITAVKILAEIGDIKRFSNANKLAQFAGIAPLHLSSSGKGKDVATKQGNRRLQAIIYFLAIQMVQLSSKGTPRNPVVRAYYEKRKAEGKNSQQALICISRRLISIIYGMLKNGTEYRMPVVENAGENR

SEQ ID NO: 516026 - protein, 448 aa, unidentified
MKEKTWYAGLGIAACVGLDWAMDKHAITEKDLESGQRERCQLGNTPEAVEHWAAALAVRFGGRPVAVALEQSRGAVIGMLSKYAHLILFPVHPKTLADYRKALHPSGAKDDPTDADLLQEFLQLHGDRLRMWQPDTEATRSLQWLSEERRKFIGDRTRYGQRLQAMLQLYYPQMLQWFDDIDAPLVLDFLRRWPGLEEAKKARPATLRRFFHQHNCRQEVKIEQRIQAIATAVAATHDAAVILNARLAVTALVAQLEALHASIAAYDRQLAEITLAHPDYALMASLPGAGPVMIPRLIAAMGTLRDRYESAEEIQRCSGIAPLIERSGQNCWVHWRWACSKFMRQTFHEWASHSIASSAWAREYYQAQRDQGKGHHAAVRALAFKWIRILFRCWKDHTPYDEAKYLRALAARQPKQSPDRKSSFGRGRQPNFVWTSCNGFNKLVGLDY

SEQ ID NO: 516027 - protein, 338 aa, unidentified
MSAITTIGLDLAKHVFQVHGIDADGKVLIRRQLRRNDLMKYFKELPPCLVGIEACGTAHHWTRTIAALGHTVKLMPPAYVKPYIKRGKTDAADAEAICEAVTRPTMRFVAVKTLDQQAALMLHKTRDLLVRQRTMLTNSLRGHLVEFGIIAAKGPVGVKAAIEALHAGQEQLPEIARVALHTIVDQLRELASRIEELEARILVWHRTRDVSRRLATIPGIGPITASVLAAAVPDATLFRSGRQFAAWLGLTPKAHSSGGKDRQVGISKQGDGYLRRLLVVGATAVMRRARQDNASRSWAAKLLERKSAKLAAVALANKTARIAWVVMTRGASYVAPAA

SEQ ID NO: 516028 - protein, 315 aa, unidentified
MEQELFVGIDVSKGSLEVALGAAGELLSVSYEERGIAELVKRLKAVGPALVVLEATGGRETALVAELGAAALPVVVINPRQVRDFARAAGQLAKTDALDARVIALFAERMRPELRRLPDAQELELKALVARRRELVEMITAEGNRLESAPKVLHQEIKAHIRWLKGRLKQRDHDLNRTLRSSPLWREKENLLRSAPGVGPVLCATLLADLPELGTLSRHEIAKLVGVAPFNRDSGSMRGRRTVWGGRAKVRATLYLPTLAAIRAQPALRSFYDRLIANGKPAKVAITATMRKFITILNAMLKHHSAWSPQCLSAP

SEQ ID NO: 516029 - protein, 339 aa, unidentified
MKKILFIGIDFSKSKFDVSILENIDQKSFAQETFENAETGYKSFLKWVSKQSKIKREDWLFCGEHTGLYSRNLSNFLAQKGLFVWLENPLQIKWRSGVKRTKTDRYDSVVIAQYACRYIDKAVAYKPAEKEIESLQLLVAYRSRLVKSKVAIGTGADEMRSVIKRNGTARLINEKSQLGVKFIKKQINEIEQEMHKTIMNSSLKENYLLIYSIKGVGMQTAIALIIHTNNFSGFQTARQIASYCGSAPFQNESGTKDKGSHISNLANKELKVLLSQCATSAMLYNDDIADYARRKIAEGKPKRVVINNVRSKLIHIIFAIVKSKIPYRENYLNPFAKSA

SEQ ID NO: 516030 - protein, 344 aa, unidentified
MERYAGIDVSLKWSSVCVVDATGKIVRETKVPSEPETLVAFFRQLGLPLTRIGLEAGPLSQWLHAGLTRAGFEVVLLETRQVKAALSAMVVKTDRKDARGIAQLLRMGWFRPVHCKSLPAQETRALLAGRKLLQSKLLDLEFSIRGILRGFGLKVGPVSKGRFVARIRELTTGQPMLERVIEPMLRAREALSKEFHALHRAMLDLVRDNSLCRRLMTVPGVGAVVAITFATAIDDPARFRRSRAVGAHFGLTPKKYQSGETDVTGGISKVGDGTVRVALYEAANVILTRSGRFSALKRWAMEVAKRRGMKRATVALARKLAVVLHRMWLDGSEFRFGKEEAAAA

SEQ ID NO: 516031 - protein, 413 aa, unidentified
MDKIYDICCGIDVHKKLIVACLNHKRKKELREFGATTRELMELAEWLQKNECEIVAMESTGSYWKPLYNIMESYGLHAIVVNPAHMKAVPGRKTDVKDAEWIAELLQHGLLQPSYIPSKDQRELRELVQYRKSLVGERTRELNRLQKMLEGANIKLSGTVTNINGKSARKILEYILSGNEIDEKKYDEMYEEKLIAHNLKASKEQILDDLKGFMSPLQRRMLKELLQHLDELNVHIENLNDEIDNFMKPEEKQASQVIQDVTGIGNTSAQAIIAVIGTDMERFPSDRHISSWAGLCPGDNVSAKKRKSGKIRKGNALLKSTLVLCAHAAVRHKSSYFHAQFKRISTHRGKKRAYVAVAHSILIAIYHILKDGVKYQDLGAEYYNQFNAERKIHAYLKKLKALGWEPPKEAVPA

SEQ ID NO: 516032 - protein, 333 aa, unidentified
MGWTDRVLHSSSNTGAMNTERNMIMIKQTSPAAISTIGIDIGKNSFHVIGFDDKGAIVLRQKLSRGQIAVRFANLPRCLIGMEACVGAHHLSRRLQALGHDVRIMPALYVKPYLKGQKNDFRDAEAIAEAVQRPTMRFVATKTMEQLDLQALHRLRTRLVRQRTAVINQIRAFLLERGFAVRQGLNPLRQALPDILAKPGDELSPRMVQMIEGLCEDWHHFDRRVDDLTNEIEALVKADDGCQRLMTIPGVGPLTASAMVAAVGDGAAFRRGRDFGAWLGLVPRQMSTGDRTILGGISKRGNKHLRTLFIQGAWAVLMRSKNWANYSFGPGRF

SEQ ID NO: 516033 - protein, 341 aa, unidentified
MSKITVGLDVGDRFSQVCAIDAEGVVLQESRVATTREALRERLPGQPSCRVILETGPHAGWISRELSAVGHEVLVANGRKLRWLYANEHKTDRVDAQYLARVGRWDPTLLSPIRVRSASADGALRLLRARASLVRARTRLINHVRGAVKSVGCQLPAADATSFARRMAPRLPPELNDALQPLLTQIAALTQLIASYDRQVDQLATRYPETSRLCQVTGVGALTALAFVLTIDDPARFRNGRAVGAYFGLTPRRADSGGQRPQLGITKCGDGLVRQLLVQAAHYILGPFGPDCRLRRWGLALSERGGKNAKKRAIIAVARKLAALLFSLWIHQSDYEPKPLE

SEQ ID NO: 516034 - protein, 458 aa, unidentified
MSSPKSIPKPRYQPAPRTLPPEAYGAIDVGSENIYAGINGSKAVKVCSTMTASVRELAAYFRANGVQSVAMEATGSLWISVYEILEEAGLQLIMVNGGHVKNLPGRKTDLQDCQWLAYLHGQGLLSPGFVPTAQIRRLRDYHRLRQDHVTMGSAHIQHMQKALDRMNLKLHLVFSQTIGANCLRLIEAILKGVREPELLLALCDEEVSRRLRKQLLQALEGNYLPEHLFALEQGLAGWKFYQRQIADCDGRLEQALGQIREERPVVVTSEASAAGAPKDSKRDQPRRNAPQIPDLKKTLEQVYGQDLTKLPGLTTYTATQLLGEIGYDLSAWPTAKQFVAWLGLAPGTKNSGKRRRRRAMPITKAGSIFTMACFGLTRSKYLALGGFLRRVRGRRGPQVAIKATARKLAILFYNVLTKGWDYVEKGLEAYEKEYQEQTVKRLSKAAQAHGFQLVPTKP

SEQ ID NO: 516035 - protein, 344 aa, unidentified
MNHYAGIDVSLESSTICVVDGAGKILREAKVASEPEALIAWFRLLGIPLDRIGLEAGPLSQWLYAALREAKFAVELLETRHVRDAFKSMPVKSDRNDARGIAQLMRLGWFRPVHCKSLAAQETRAMLTARKLIQAKLHDVEMSLRGILRGFGLKVGETTERTFAGRIKELVAGHPGLEIVAQALLEAHAVLQREFGGLDKRTQKLARLHPQAKLLMTTPAVGPIVALTYASAIDDPARFRSSKATGAHFGLTPKKYQSGQTDYTGRISKIGDASVREALYQAAHVMLTKPVKNCSALKGWAMRIARRAGMRKAKVALARKLAVILHRMLADATPFNPTAKAAAT

SEQ ID NO: 516036 - protein, 467 aa, unidentified
MRKAIGIDPDSKGYICCLVEAGENQTARKGYVTTVKDLESLLRWVKSEGEVIVAVEGSNGYSRPVEQAFQKEQVVFYSLRPSDVSKFRKVVLGHNKNNEKDAESVARYALALQDQGKLEKFRRVWFPDESLRLLTRGYERKSKELTAEINRMWKVLRIASPDLYLALAGTNPEVEISEKVLQQQGILKLLEQKPDLYEWRNLSMEAFRTAMGGGNYRGREKLIAELQKLSAIFRPTPAAVSLMIKNAAQTILQIKRQLNEMKKMMGEITAENPAVKALEQMKGISVITSSTLMAEIIDIRRFANDDHLASYGGLGRSEYSTGDRSKMIPNPQFNHRLKDTFITAAKNFVINNPDSHLSGYFRNLVKKRGMKANEAYKRVARALVRVIFRTLRSLLEDCPEKQKRSESDMANGSYLRSDQSHESDISLSAPNENDIEREGKIKGGLPVLALPPKSNGKRRKMVSVEKM

SEQ ID NO: 516037 - protein, 408 aa, unidentified
MRLFVGDDWAEDHHDVEVMDEAGKVLARKRLPEGAAGMAQLHALVGGFLGEDADAAEVIVGIETDRGPWVAALAAAGYRVLAVNPLQAARFREQHQVPGAKSDAGDAHALADMVRTDSHQLRPAAGDSPEAEGVKVLARTHKTMIWERTRAVQRLRHQLREYFPAALEAFADLGAPEALELLGKAPEPARAARLTRAQVSAALKRAGRRNITGRATAILAALRSGQLGQPPVLTAAYAATARSLTAVITVLNERVKILQGQVEEHFGQHPDAEVIMSQPGMGPVLGARVLAESGDDPHRYRDGKARRNYAGTSPVTRASGKRKVVAARFVHNDRLVDALHAQAFSALTASPGARAFYDQQRASGHGHHDALRRLANRLVGILHGCLKTRTLYDEDTAWAHRQQTQQAA

SEQ ID NO: 516038 - protein, 397 aa, unidentified
MQNHLHVAIDIGSVCHRVAIGLDDGAVIDEFDCPHTPLGLSNFFKRVQSHEHKHAAQVAVAMEGFGGYARPLDSQVLAQGWSLYSINNLKFARFKEIFPAPAKTDAIDAKRMLELMRLRNRVPMAQAVLQEVAPVDALHQQMKAVTRRRKQLVFERMKISQRMQAELQGAAPGLLAITGQADNLWFLNFLTCRESLAKLKTVRRASLLKIAGIGVGYAAKIQAWQQSAAFAPPIDWIGPMIQADAKRILELRDAINALDESIAVLVEQSTIAQRLMSMPGFGNTTAGEVASEIGNIARFRDEASLAIYLGVAPLDRSSGKRVGAIPRQINPRARDAMLIVTIHHMATVATSRAYYDRKRAQGKTHMQATRALARHLVRVLFSMLKQNRDYRLPAVSA

SEQ ID NO: 516039 - protein, 380 aa, unidentified
MPEAVIGLDVGKSSHWACVATRDGEVLLSAPVANREGDLDSLFGRFPDALVVVDQSRNIGALALARARAAGMSAAYLPGLAAHGAARLFAGDAKTDERDAMVIAKTALGIPDALLPVGDPGPTIAAARALAAQRNFLTCENTRNKNRLRSILLESCPAFEALVDLSDGPQLRLMASLGGAWSVADAGPRRAAALTRGAARGKIEALVRSTTSSTRPDASIVAAEDRAVKLLARRISENSAEIEAITAEISALLEGDDTYRCLLTVPGIGPKTASELAISIDIEDFPSHDRLASYCGLAPRNRQSGTSISSVTASRQGNKRLKNLLIFSCNCLTRTEGRWGDYYTRCRERGMSHGKALKALARKRLKVIYAVMRDRVPYAA

SEQ ID NO: 516040 - protein, 417 aa, unidentified
MLKIVFPICCGIDVHKTFLVATIASTDRSSVTTYQTKRFSTFTKDLENLSKWLLDNQCTDVCMESTGKYWIPVYNVLELTCEVILAHPKYVKSLRGKKTDRKDSVWIADLFKHGLVKASFIPEKAIRDLREVMRYRTKLVSMKSSEKNRYQNALTVSNVQLASVVSDTFGKSAQALINQLLQQPKDTSFDVLPFLHGSLKKKAEQISESLNGSIDDIQAQKIRSCTSHMAELDSHIEDLQVAADLIASPFTAALRIIESVPGIGHLSALTILSEIGTDMSKFLSAKHLCSWAGLTPCNDQSAGKKKSTRISRAGCYIKPILVQCALAAIKDKSFPYYGQRYQVLKHRRGHKKAIIAIARMMLSVIYTLLSRGELFSKELYEESLKNPMVILSPEEQFQRLAKKFGYAVVKVHEPVPV

SEQ ID NO: 516041 - protein, 485 aa, unidentified
MKTKAANASRRSDRKQSGPIRPAASLPVVRPHAAGIDVGSVEHWVCVSEDSVPAGQANVRCFGGFTADLDRLVEWLLACGIQTVALESTGVYWIALVQKLEVARIEVILVNARHLKHVPGRKSDVKDCQWLQQLHSYGLLNGSFRPAQDICALRSLLRHRHNLVESAGSEVQHMQKALQQMNVHLHHAVSDLVGATGLRILDAILAGERDPQVLVGLRDDKLCTKTTKEELEKALAGDWREEHLFALRQGLESYRHFLRQVAQCDEQIQKALAQVEIPQPPEPEGPVPPNPKAKESAGTKPRKKRFHRTQTGAGLKLDLTEQLKQLCGVDLTQVVGLSVLSVLTIISEIGLDMSRWRNAKAFCAWLGLCPRNKISGGRVLDSRTAHVVNRVSILLRILAPSVGKTDTYLGIFHRRMRARLGPAGANTATARKLACLVYHLLKYKEGYIEVDQLVFMEKIRTQRINRLRKQAEELGMRLTEMPVAA

SEQ ID NO: 516042 - protein, 352 aa, unidentified
MAVTIVETRTEIRAITGGVDTHADVHVAAALDPLGGLLGVREFAATTAGYARLLDWLAGFGIVALVGIEGTGSYGAGLARHMASAGVRVVEVDRSDRQDRRRQGKSDPLDAVSAARAAQSGRARGAPKGRDGAVEAIRALMVARRSAAGERTRAINQARALILTGPGDLRARFTRHTPAALVTGIASLRPRPGDVPGYATRIALRELGRRAQFLDGQLGRLDELIVPLVTARAPGLLALYGIGSRTAALLLIAAGDHPGRLRSEAAWAHLCGAAPIPASSGKVTRHRLNPGGDRQANHALWRIVFTRLGSDAATRAYVERRTAEGKSKAEIIRCLKRYVAREVYPHLRPAGG

SEQ ID NO: 516043 - protein, 345 aa, unidentified
MPIVGGLDIHRKQITFDYLDTVTGEVKRGQIAPADRGHLRAWLARFAGRGDVAFAVEGCTGWRYVTGELAAAGIAAHVAEPADTAALRGRKRHAKTDKTDSAHLRRLLAEGRLPECWIPPAQILQYRALLETYHDLRREHTAWVQRIHAVFFHQGAPPLGEEALRTEPGLARLRAAAAAHLSPAGQQQVATALDMLAATEAQLGPLRHQLRDAAWHLTGARVLAERLYGVGPVTGLALTCWLAGQDRFSSSAKAVRFTGLDITVHSSDRKGPPGRLSRQGPPMLRWAVYEAGKTHARAAAPDHGYYAAVKDRSNGKLAALSEARKIVRQACHILAELGDDALTTA

SEQ ID NO: 516044 - protein, 406 aa, unidentified
MFYLGIDVALNTHRLVILDDNGERVSNGISFQNNTADFEKILNKLKELSIDPDNSIAGLEATGNNWENLYCFLTDKSFRVIVLNPHQTNKFREALRKKAKTDDIDAFVIAGLLRSNEFASSYVPEDKIQTLRELVKLRYEFIKDHKNYQRQVLALLNIIFPEYKQTALKNPFTISSTAIFKSFATAKHLSIVKPKHIEKIVRSIKGNNFNIKEIENLISIAKNSVYSGRCQESRALTLNILLTQIENFSKAIQQLDEQTNQILSPESNDDINSFPGSNLLTIPGVGPKTLAAILSCVGESGQAFSTGVKLIGHIGFFPQIYESGETRRANKLSNKGPAYLRHALYIASVACLKHNIQLRNLYHTKISQGKKPKQALICVAKKLAHLCLSMLHSGQDYNPARVFSYV

SEQ ID NO: 516045 - protein, 346 aa, unidentified
MKKDSIKGEIKVLGIDLAKNSFQLHGIDENGRIVLKKKLNRKKLSAFIAKLPPCLIGLEACGGAHHWVRVFKSFGHTVRMIAPQFVKPYVKSNKNDAVDAEAICEAVQRPSMRFVPAKSIEQQDIQSIHRIRSQLVARRTAQGNQIRGLLLEYGIIIPKGISYIRKEIPLILEAADNGLSDLFRELLCELYDELVHLDARVETMEQKLLRLSAQNKDCQRLLTIPGVGLLTATAMVAAIGDISAFNNGRELAAWLGLVPRQHSTGGKPTLMGISKRGDSYLRTLLIHGGRTMVRVAHKYQDRRNQWISEIDQRRGKNISAVAVANKNARIAWALLSKKTTYQAVAV

SEQ ID NO: 516046 - protein, 441 aa, unidentified
MGHHVEEIDAEGDEQMLERAGAIDVAKASAKVCVRLPGAKRRITKVWDVAATTKAIVALADELAELEVERVVLEATSDYWRPFFYLLEARGLCVWLVNARDVKNVPGRPKTDKLDAIWLCKLNERGMIRPSFVPPKEIRELRDYTRLRAELVEDRSRHKQRLEKLLEDSMIKLSSVAADIFGKSGRAMLEALIAGERDPEVLADLALGQMRKKTAALKEALTDRFDAHHAELARMLLDEIDALSEKIERLTRRVEELVRNIPEAQAPVDPDTGEIGSGGLPVLERLDEVPGIGLRAAQVIVAEIGLDMARFPTAGHLVSWAKVSPRTIQSGSKIHSGNVGKGNSYLKRALGEVATAAAKTDTFLGERYRRLVRRRGKQRALVAIERSILVVVWHLLVDPNARFVDLGSDFYERRVNKERRTHDLVRQLMALGHEVTLSPAA

SEQ ID NO: 516047 - protein, 401 aa, unidentified
MVSDFRKGRYNLMKIFVGIDIAKLNHFAAAISSDGEILIEPFKFTNDADGFQLLVSKLESFDKNSIIIGLESTAHYGDNLVRYLVAEFYQVCVLNPIKTCQMRKNNIRKTKTDKIDTYVIAKTLMMQDDLRFVSFYDLDMMNLKTLGRFRQKTIKQRTRLKIQLTTYVDQIFPEIQYFFKSGLHQNAVYALLKEAPSPKEIASMHMTHLANLLKVNSHGHFTKEQAKELRVLAQKSVGANDSAISIQITQTIQQIELLDSQLEKIEAEMTDIMKFNDSVIMTIPGIGYINGGMILGEIGDIHRFSNPNKLLAFAGLDPSVYQSGNFQAKTTRMSKRGSRVLRYALVNAAWNVVRNNATFKAYYDAKRAEGRSHYNALGHCAGKLVRVIWKMLTDEVEFNLE

SEQ ID NO: 516048 - protein, 350 aa, unidentified
MHYYAGIDVSLEQSSVCIVDAAGKIVREAKIASEPGAFLEWFGSLGFAVTRIGLEAGPLSQWLFAAMKTAGLAIELLETRHVRAAFKTMPVKTDRKDAHGIAELMRVGWYRPVHCKSMGAQEARAVLTARTLVQSKFHDVENSLRGLLRGFGLKVGRVTRRNFSGRIQELVKGHPTLEKIAEALLAVREVLLREWNGFEKHVRMIARADSNVKLLMTTPSVGPIVAITYAFAIDDPKRFKSSKQAGAHFGFTPKKYQSGETDRDGRISKIGDASVRVALYQAAHVMLTKPVKGCPELKSWAMRLARRAGHQKAKVALARKLAVIMHRMLADGKPFHSAAAAAAATVIATP

SEQ ID NO: 516049 - protein, 321 aa, unidentified
MTYVGIDVSKVTFVVAYSSVKTNKTRTFKNTVNGVHEFVQTISASEHNCVLEATSNYSALLVYLLSEAGITISLENPLKIKNFARVMLTVTKTDEIDARLIALYGEKMQPAPYKLRSDAILVLKQKRTVLRQLKKQLVATRNLKGSMEVLPFFDPKCKKTIEKTITFLEKQIKEMEEELASLAQGEYKKQMDLLTSIKGIGVTLAAALIVATGRFSYFDNAKQLTRYLGLSPTYQQSGTSVNVKGHINRNGDSSLRSQLYVAAFSSLRCNTECKACFDRLRSNGKPGKVVVIAVANKLVRQAFAVVTQGKPYVDGFKSEKP

SEQ ID NO: 516050 - protein, 412 aa, unidentified
MEGETVIAGVDTHKDVHVLCLLDGLGRKVWSGSFRADPEGYDRLAEAIGDPGSCAVVGVEGTASYGAGLTRRLVELGYNVVEVLRPKRDKVRPGEGKSDPLDAERAARKAASGRGCSVPKSQDGWVEAVRQLYVARRLAVATSTSCVACAKSMLTTAPSALRERFRGRERPKDLMPLLARGRKAGDALEESVLASLRSVAAVWKEARSQVESCDERIRALLEANAPALLGVEGCGTTTAAALVVAAGDNPGRLKGEAAFSMLCGASPIPASSGKTERHRLNRGGNRQANWALYEIAIKRMAYDERTRRYVARRTSEGKSRREAIRCLKRYIAREVYRVLMDPNPDGAAPEGPELAKMRKAMRVTQKQAAAGLGMSAASLGHLEHGRRRSTKLERRYYELLCELERALPQTAS

SEQ ID NO: 516051 - protein, 457 aa, unidentified
MNTRVIGIDLAVTAVHKAIVLDANDNKFVSRVLNFRDDPASMKMVLDAARKDAPEDLHLVAILEATGMSWLTVGQYFQSHGVEVYRINGQRVSDFRKVYQRHAKSDRIDIRVLARLYLIHPERLHRLGIPSGESLALQRACRERARLVKQSTANKNRLVATDKFAFVGFSKVLPPYGERAFWIRRYWYNPWKVAKTGPKALTLVWQEAFPHRDTEIAWITDLYEQAQLMIALYGNSVLAYDFLQEDLHREQSRFQKAQTQIVNLHRNVIRPLYRNLHPHRHLETLQGIGEDSAAVYIAFINDIERFPTVKQFRAWSGMIPYSNQSGHAESKGMHITQAGPDLVKATAYLNAQVARLYDPQIAKIYYDQMLNKGKHHNQAICACATHLLSRIYAVLKENRPYQLLDTDGNLVTKSEARQICRKQFHVPDKVRDRNNQRTRKAKRENKIEHRYQKRYKI

SEQ ID NO: 516052 - protein, 335 aa, unidentified
MKEITTVGVDLAKSVFTVHGVDAMGRVVLRKTVRREQLMELIAGLPPCLIGVEACGGAHEWGRKFQIHGHRVGIMMARFVAPYRKSSKNDGNDAEAICEAVARPNMRFVPVKSAEQQAILSLHRVRQGFIEQRTATINRIRGLLAEFGIVLPQRAEQVRRAAVVVAEELPVLAREAIADLRAHLTYLDERITRYERQLVSLARQREAAVRIQRLPGVGPLTASAITASISDGHEFANGRQFAAWLGLVPRQYSTGGKPRLGRITKRGDPYLRTLLMLGARAVLQSAAQKTDRLSRWALALRARRGYHRAIIAVAAKNARIIWALLVKNRDFVLPA

SEQ ID NO: 516053 - protein, 325 aa, unidentified
MQSQANYTGVDISKSFFDVAFMTEGKYKYYKFSNDHSGFKSLSDVLSENSHVVMEASGPYYLQLACYLNGHGIALSVVNPLVIRRFSQMRMSRAKTDKKDAMMIAEYGKTEKPALWQIPETHVIALQQMEALLSNLNKEQTALNNQMESFTNSGMLDKQLKKLIVKELEHKESLIKKINKSMEVLARQHYTEMLSNLESIPGMGKKTATALIVISGGFKRFGDYRKLSSYVGICPRLFESGTSVKGKARICKMGMSRIRAMLYVCSWSASRCNKACRELYQRLLAKGKAKKLALIAVANKLLKQAFAIAKQQTKYNENYSNITCF

SEQ ID NO: 516054 - protein, 352 aa, unidentified
MRNVADLRAFVGLDYHDSVVQVCVLDREGAVLGNGRVDNQLGAILEFVDHALDGRLVMGVALESCCGAANLAEQLRQQGWEVDLAHAGICSRMKQNPDKTDFSDAQLLADLVRVGYLPRVWLPPAQIRDLRRLTRHRQQLVEERRRIKLRIRAMLREERISPPSDVGNVWTVSWKQWLQSTAALQGHSRWVMDVHLGNLDRVSKQIQDVERRMEESTKDDAVVQKLLAEKGIGLVTAVTMRAEIGSFRRFQCGKQLARYCAVTPMNVCSGKKQADGGLIRAGNLHLRTMLIETAHRLARYVPKWKTLKDRLKSAGKPASVAAAAVANRWIRQLYWQMQQPQAETDTETQTAA

SEQ ID NO: 516055 - protein, 321 aa, unidentified
MFQITVGVDIAKKKFDVALLIENKYKHKHFTNDNAGFGAFIAWLLTFNLSIRPLVCMEATGAYSLPLAYFLVDNGYPASIVNPAKIHAFAKSELSRAKTDKADAKLIARYALSMQPALWTPPPPEMRRLQALTRRIEHLLEIEQMESNRLDTADDSVKESINTLLKTVEDEIKAIRQAINDLIGNDPHLDKCRGLLESIPGIGTATVAHLLVALSPHQGFTSAKQVVAFAGLAPALRESGQWAGKTHISKNGDPVLRKILYMPAISAWGHNPVVRTFCERLKAKGKNGKAIVCAAMRKLIHIAFGVLKSGEPFDPLWAYSK

SEQ ID NO: 516056 - protein, 449 aa, unidentified
MREPEEIEDGEHEQVLDRVCAIDVAKASGKVCTRVPHPSGPGRRRTRVWDVDATTNAVLELAGHLVSEGIEKVTLESTSDYWRIWFYLLEAAGLQVQLVNARDIKNAPGRPKTDKLDAVWQAKLTERGMLRPSFVPPGEIRQLRDYTRLRTDLTRERTRYWQRLEKLLEDALIKVSAVASSLDTLSARDMIEALIAGERDPQLLAGLARGKMKAKRAALIEALTGRFDDHHAELARMLLDQIDALTAQISRLTTRIEELIAAIPAAQGIDADGTTGPAAGTGPGAAVLPAVSRLDEIPGIGPGTAQVIIAEIGLDMSRFPTAAHLVSWARLCPRTIQSGARHRSGKAGKGNPYLKGVLGEIAAAAARTDTFLGERYRRIVKRRGKLKALVAVARTILVIIWHLLTDPAAHYHDLGTSYYGQRISREKKTRNHIRQLEALGYTVTLAPAA

SEQ ID NO: 516057 - protein, 309 aa, unidentified
MKKTVEYEQVFERGCGMDIHKDSVYATVMGEGINTETRVFKTTTRGLRELGAWLTELDVKAAAMESTGIYWKPIFHVLSEFPIELMVVNASHIKNVPGRKTDKADSQWICKLLISGLLKGSFIPPADIQKIRDLYRYKKKLVQYISSERNRIIRALEDANVKLSSVISDTSGVMATHIIEGLLAGRKDLKNLVMERYHHRVKASPEEIVEAIDGKITPHIRFLINCIQKHISALHQQIAEVDAEIDKYVKAYETQIELLESIPGVGREGAISIISEIGVNMDFFPSEHHLASYGGMCPGNNESAGKKKK

SEQ ID NO: 516058 - protein, 480 aa, unidentified
MTANLRKIDYSNKQIFVGIDMHTKTWHTTTLIDDFPIRKTFTSDIDKFANHLKNNYPNANIVLGYEAGCFGFTPKEKLDSHGFKTIIAHPADIPTTDKDKRQKTDKRDSQKIADGLKGGKLKGIYIPSRQSQENRTLIRRYHDLSKQQTRIKNIIKGNLKFYGITFPEQFEKSGTHWSKAFISWISNIKYETVSGNDAMASYIKELLFIRGEIVLITKKLRALSRSERYASDYNFISQIPGIGLINGMTLLLELIEIERFKSNDDFINYVGLAPTEHTTGGKRRIGHLSRRCRVILRTTIIEASWVAIRYDSSLSQYYAVQCKKGKSSYAIIKVARKLANRIRYILLHKVPYVKGIENVNKHYSEISVKDLLVGNEEKDVKSDLIQSKIIKLSSYKDLLVDDEEKDLKPDLIQSKIIKLSFGKDLLVDNEGKDVKPDLIQSKNIEPSSGKDLLVGNEEKYVKPDLLKTKSVKQNSKKTKI

SEQ ID NO: 516059 - protein, 405 aa, unidentified
MNAVGIDVSKGKSMVAILRPYGEIVSLPHEVKHTSEQIDELIHEIQSLEGDSRIVLEHTGRYHEPIARQLSDAGLFVSAVNPKLIKDFGSGTLRKVKTDKADAVKIARYALDSWPNLKQYGYMDELRDQLKTMNRQFAYYMKLKVAMKNNLISLLDQSFPEANTFFESPVRNDGSQKWVDFVYTYWHIDCIRDMTLMAFMEHYRKWCKRKGYIFQSEKAKEVYKTISNLIPILPKDDMTKFLIRQAVEQLNSVSAAVETLRTNMNDIASQLPEYPVVLDMKGVGTSLGPQLMAEIGDVTRFTHKGALAAFAGVDPGAKQSGTYEQKSVRISKRGSPLLRKTLFQIMECLLMTMPEDDSVYAFMDKKRSEGKPYYVYMTAGANKFLRVYYGRVKEYLSEHKVKEEN

SEQ ID NO: 516060 - protein, 435 aa, unidentified
MKLTQIRENTAGIDIGSEHIFIGLDDDSVHSFGTFTCEFRAAIELLRSHNVQSIAMESTGVYGVILHEMLQQAGFEVWLVNPAHIRYVPGRKTDVSDCQWLQQLHSYGLLANSFLPDPAIKALRAYLRLRERYISESAKAVLHMQKALTMMNIRLHQVISQIHGASGMRVLKAILAGERDPHNLVALCDRRIQANKHDQVVASLEGHYRPEYLYELADAIDCYEFFQGKLNECDRQIDKEISQLAEKQPVPEEYGKAKPIRHHTPAIDQLHQKVVRAAGGVNVNELPGLTDYSALRLIGEIGVDLASFPSEGHFTSWLKLAPGKKQSGKSIRKHKYKSSPRAAEVFKQAAQSLLESKNHALGAFGRRIRARRGPGIAVKAVARKLAILYYRAMTQGMAYVEQGVEAYEKQYQERRLHNLHKQARRLGYTLVELNE

SEQ ID NO: 516061 - protein, 353 aa, unidentified
MKYDKYMGMDVHQATTVIAVLDADGKVIMETIVKTEAAGIIRLVQSLSAPLHVTFEETTQSAWLYEVLRSFVTEVVVCDPRRNKLLSEGSKGDKPDARKLADLLRTGMVRPVYHGHEATRKLKELVRGYETLSSDTQRTMVRIKAIYRGRGIRTPGRGVYQPKQHEEWLKLLTEPGVRQRMDWLYKQLDQLRPLRREAKRAMLAESREHRAVGLLRTIPQLGAIRAAVIVATVDTPHRFRTRQQLWSYSGLGVVTHMSAEYEMKDGRAVRSRKPIATRGLNRNCNRRMKEVFIGAATGGSQTEPYRSYLEGLEKKGIRKEMARLTLARKIAAIALRIWKKGETFDPKKLNWRT

SEQ ID NO: 516062 - protein, 397 aa, unidentified
MKLIGIDIGKNKHFFCVMDQQTGEIISQPVSFSNDKEGFDFLVQKIKSYPKDSILIGMEDTGHYHFALLKYLLDLQYTVALINPKTTDFNRKMQGGITKNDKLDTINICDVLDTPERKKQYRITKVNSFDLYEQKQLTRHHHNLKEEENVYKNRLQKCIDIVFPEFNKLFNSKYGIVYTNVLKSFDSAFNIANADIRTIRKCFNYKGKGLRISLTAEDLKDAAKNSIGIQSTSEVIQIKHLINQIELINEQLAEIDKKIEEFSIQTNSPILSIPGISHFSSTSILSEFGSFSNYSSHKKLIKFAGVAPYEHQSSQFKAEHTAITKKGSRYLRKTLYQIILPVINHNKVFKDYYNLKLSQGKSHRCAQGHCVRKLLRVIYHICTSTDDNIKFDANLLK

SEQ ID NO: 516063 - protein, 387 aa, unidentified
MPQPAAVLPHAPPDYDRTLVLAIELSSKSWVLAAQVPGLAQVKAKRTIEPTKEALLGALASYRARAAAAGHQIERVVSIYEAGWSGFWLARWLITQGVQVHVVQPSSVLTDRRMRRAKSDGIDAELLLRTLLAWLRGEPRVCSMVPIPDQTDEDARRAVRERGELVAERVALVNRIGAVLATLGAGDYNPLLQSRRRRLNELRTGLGEPLPPHARAKIERLLARLELVLAHITELERERNAVAETAAPDHAAKMIQQLAGLRGIGVQSATVLVREAFVRRFANGKALGAYAGLTATPYSSGGLEREQGIGKAGNRRLRSVMVELAWLWQRYQPGAAQVVWFRERVGKTGRRLRKVMVVALARKLLIALWRYVTDGVVPEGAAMKPAI

SEQ ID NO: 516064 - protein, 366 aa, unidentified
MKKISTMQVFGNEIFKEQKLTIGMDLGDRWSFYCVLDEAGKIILEQKVPTTPEAIKQTFGKIPQSLIAMETGTHSPWVSRLLTELGHEVIVAHAQKVELITKSNRKDDRHDARTLARLARIDPELLGPVRHRSAKAQIHLTVIRARAELVSARTALVNAARGLAKSFGERLPKCGTQQVSGKLAEGVSAELRDVLSPLLREVESLNERIQEYDERMEKIAKEVYPEVSLLKQVKGVGTQIALTYVLTIEDPYRFPKSRAVGCFLGLRPGRRNSGESEPQKGISKEGDRYLRTMMVQGAHYILGPFGEDSDLRRWGLKLAERGGKNAKKRAVVAVARKLAVLLHRLWVSGEVYEPLRNSQKAMRAVA

SEQ ID NO: 516065 - protein, 354 aa, unidentified
MIIIGVDFHPEFQQIALLNTTTGEVEEKRLAQPDEAEKYYRALATAGETVRIGMEASGHGRWFERLVAELQFDLWIGDAAEIRAKRGRKQKTDRQDAQHILKLMLKDDFPKIWVPSWENRDLRQLLWHRHRMVQARTRVMNQLQAVALNEGLHCKKKLWRECGRQQLESFSLAPWASRRRHDLLELLDRLNPAIADLTQAIEREVENYPAAQRLKTHPGVGVLTALAFVLILGDAERFDCGKQVASYLGLVPLEDSSGKRRRLGHITKQGSSIVRFLLVEAAQVTVRSLPEWRSKYFHLVLRRGRKIAKVAMARRLAVQLFWMMRKEWNYEQLKKFGSHAGQPGNRHGVQSNTE

SEQ ID NO: 516066 - protein, 344 aa, unidentified
MPIVADRVDAVIGVDTHTDTHTAAIVTSLGAVIAQRQIAADPAGYAQLIAWAASHIPGPRLAWALEGTRAHGIGLTRALAAAGAQVIQAPNPPAARRRRGGKSDALDAIAAARAVLACTTPATPRADGVREDLRILLTCRRHYTDTRTATVNLLKSLILTADEATRTALRGRSTPHQVAYLLTTTPATDPIRATQLLDLAHQIRVLDQTLTTNLHHLRDLTRSWMPTLLDQPGVGPVTAATLLTTWSHPGRIRSEAAYAALAGTNPIPASSGRTTRHRLNRGGDRTLNAALHTIAASRRRHHQPTIDYTNRRTTEGKTTAETTRCLKRYLARHLYRHMQQHATT

SEQ ID NO: 516067 - protein, 387 aa, unidentified
MPQQNDLSRCLVTLEQDDTLIAVIELSQASWLVAGIVPAIERQPVKKIEADEVALLRLLERWRDEATKAGRRIMRVCVAFEAGRDGFWLARWLRARGIEAYVIHPSSVAVSREHRRAKTDRLDTELLKRAFLGWLRGERGHCSMAAIPTVEEEDAKRPNREHESLVSERTRIVNRMKSTLARLGVRGFKSTLRKASERLGTLRTPEGMQLPPNTLAELGRDMARLRFVMDQIKEIEAARLEQLARQPDEGAHAMIRLLARIVGVGIETADMLVREVLSRNLRDRRAVACYAGLTGSPDESGRRRREKGLAKAGNARVRHGMVQLAWRFLLFQKESALARWYRERTADARGGTRKTMIVALARKLLIALWRLVTTGEPPEGVLLRPAA

SEQ ID NO: 516068 - protein, 391 aa, unidentified
MSMYFIGIDISKYKHDCCIISAADQKVVSKVTIKNNKSGFDELLTIINSLSNPEDIRIGFESTAHYALNLELFLENSLLTFMEVNPVLISEYKKSKTLRRTKTDSVDCESIARWLMTVEYKPHSKGFYHAYSLKSLTRLRDKLIRQRSFYLVKITNVLDHTFPEFKPFFNERLSKTALYLLENYGSAEKMARMNSASYEKLRSLSRGKFSPQQFLKLKELAANTVGVNNSIFDVELNSLLALYKSLSKEIDTLEKEINKLIEEINPHYMSIPGIGPLSAAVIYSEYGDISNFSNPGQMLAFAGIEPGINESGTESHGGRMVKRGSSQLRYTLINCCLPLIRFDMTFATYYAKKRGEGKPHRVAITHVAKKLIRVIYALERQDIDFNTQKLH

SEQ ID NO: 516069 - protein, 356 aa, unidentified
MTEKNNTGSERVQEYYVGMDVHKGKWVITIRSCGLEIKTLVVEPSVEVLLKYLGRNFAGGKYTCAYEAGFCGFWIARELKKCGVECLVVNPADVPTRDKERVNKKDKVDSRKLARELEKGNLEGIYIPDERMQRLKSLGRLSISCGRDMTRIKNRIKSHLHLYGVEIPSHSECYHWSGNFIRALEGMCRKGDPFGDYLGACIEKLKAERERQVQLLKKLRGYGHSCGWGEILARLISIPGIGFKTAVTLMTEIEDMRRFKDLDSLCSFVGLIPSCGGSGDKERDMGITRRHNTYLRYLLVESAWVIVRKDKVLLEAYNKLLSRMTKQNAIIRIAKKLLSRIRHVWMNNKDYDYCRI

SEQ ID NO: 516070 - protein, 338 aa, unidentified
MQKNYLGIDVSKLSFDVTLIAVISGRKQPIIISKFDNNTGGLKDFKKWLTDHQVTFDENSLLVIENTGIYHRPIWNFCTTNLLPVFIGNAADLKWSFGIARSKNDKVDSMRLCEYAYKNHEDIKPTTGLNKALVTLKDLLSNRSKLLRQKNAIKQTLGELKMSNDKATQQLLEKLNKAALDGLKTSIKLIESEMLRLVQKDDAVFTNYKLMLSVPGIGKITAIFIICCTNNFAIKVTGKQLANYAGVVPHEHQSGTSVKGRSRVHFMANKELKSILTMGALSAINTYPEFKDYYERKMSEGKKHLQALNAIKNKMLLRVAAVVNQQKLYENKYQAACA

SEQ ID NO: 516071 - protein, 413 aa, unidentified
MDVLHPRCCGLDVHKSSISACILLREAGRVQKHQRRFGAMTQDLRELAEWLRQFAVTQVAMESSGVYWKPVWNILERQFTVVLANAQHIKNVPGRKTDQKDAEWIAQLLQYGLLRPSYVPCEIIRDLRDLTRMRASLSQEASRISSRIQKVLEDANLKLASVATNALGKSGRAMLEDIIAGEDDPEHLASLALGHLRVKIPQLRLALEGKIRSHHRFLLRRLLDQMQFVEHEIALLEERLEDIGRERPELSQAVARWDTIPGIDRLAAWALLAEVGDNMAQFPTAEQLASWAALCPGNHESAGKRLRGATRQGSPWLRRMACQCAWAAARTKNTYLSSQFRRLAARRGKKRAIIAVAHTLIVIGYHLQKNQTNYDDLGGNYFDRIHSDGLKRYLVKRLQQLGHKVTLEPIEAA

SEQ ID NO: 516072 - protein, 416 aa, unidentified
MGRINQYKGAAEETIRIMEVCIMEHFIGIDNSSLDHKVRVIDENGKLDLSFTITNDFDGFEKLNHEINQLKESKIGFELPHGPLVDYLHEHGYKLYSLNPLKIKRFKESLKVSGNKNDDIDAVAIAEYLRSNDRYTRELIYNSHEIEKLKNLSIIHTRMIQNRARHINKLHFVVRQYFPLQEALFGDFACTVQLKMLIKYPTFADLNNTSDKEIDEFLKLNKYRMQDYIDKIIQKIRNYNQLISEDVESTYRIEAEYLCDLLLVINNRIKEIEIEMNKITDAHNLGKVFKSLPGAGNILACKLLSIFGDNKDRFDNYNGVQCLFGTAPKNYQSGMYHKVIMRKACSKSARAVLYTFAFSTLRFSKWSRDYYDRQKAKGKTHSVAVRALSNKWIRIIYKLWKEEIFYEESKKVTAAA

SEQ ID NO: 516073 - protein, 322 aa, unidentified
MAEDEVMAGVDVSLAQLDVALWPGGESFSVSNDPQGVGQLLERMGKLRVQAVVIEASGGPEDLLVSELCAAGIPVAVVNPRQVREFARSLGQLAKTDRLDALVLAQFGQSAQSHGRLTLTQLPDTAAAELKALVRRRRQLIGMLVAETNRRQRASKVVKRSIVATIRALKRSLVELEQQVRETLKNSPVHQQKIAMLQEVPGIGPQLARTLIAEVPELGQVGRRQIAALIGVAPHAHESGKFKGRRMIWGGRTGVRTTLYMAMLSATRCNPLLVPFYRRLLQRGKSKKLAFIACARKLLVILNALLRDGTSWRPDLAFQHSR

SEQ ID NO: 516074 - protein, 403 aa, unidentified
MNSVGIDISKGRSTIAVMRPFGEVVISPFEVRHTDSELSELARQLKILDGETRVVMEATGNYHAPVAKLLHDAGLYVSVVNAKLVHDYGNNELRRVKTDRKDAVKLANYGLDRWLTLPRYIPEEDTRLLLKNCYRQYRQYSKVQTVLKNNLISLLDTVFPNANRLFSSPIRGDGSEKWVDFVAEFWHCRCVSEKSERAFTSKYLRWCRKHGYNFSEAKAHTIYAEASGHIGVMPKSETTKLLVEQAVAQLRATSTALAALKHEMQSLASQLPEYPVVMDMFGVGPTLGPQLIAEIGDVRRFYSKKALVAYAGLDAPPNDSGDVTGRHKSMSKIGASSLRRTLFLVMTVYLQNAPLDEPVYQFMDRKRAEGKPYRVYMMASANKFLRIYYATVKAYLESLEQTA

SEQ ID NO: 516075 - protein, 375 aa, unidentified
MKEKVRFLGLDVHAETIAVAVAEPEGEVRSLGTIPNRAESIRKLIKKLGPATKLRACYEAGPTGYVVYWQLAELGVECEVVAPTLVPVKAGDRVKTDRRDAEKLARCYRSGDLTAVWVPDEGSEALRDLVRAREAAKQDQTRARHRLSKFLLRSGQRPPTGVRPWTRPYLIWVAQLRFTQIAQESTRQDYLHEVEHMRERVSRLEQAIMEAVKLASPGLQQVINDLQALRGIADISAVTIASELGQVSRFESARQLMGYCGVVPSEDSSGKRTRRGGITKTGNAHLRRIVVEAAWSYRRPPAIWYGLRRRQESISEQTKEIAWKAQHRLHKRYMKLGAAGKDQRKIVTAVARELLGFIWAIGTRAETVVSQQVAA

SEQ ID NO: 516076 - protein, 392 aa, unidentified
MISVGIDVSKDKHDCFIVNSEGEVLADVFTIHNTMDGFNFLLQRIRECTMPQDKIKVGLEATGHYSYNLLGFLLDNGLATYVLNPLRTNLYRKSLSLRKTKTDRVDARTIATMLLSDAGLKPYTNTAYHNEELKSLTRYRFDKVKERAKLKSSISRLVCILFPELEKLVPTLHMASVYALLEEFPGAKQIAAAHLTRLKALLETASKGHYKRDMALEIRDAARNSIGSRMPAKSLELQHTIRLIRELNAEIAEIEEQIQSLMEELDSPITTIPGLGFRMAAMILAEVGDFTRFSSPDKLLAYAGMSPSTYQSGQLKNCYPHMEKRGSRYLRYALYNAAKYVCLWDPTFADYLAKKRAEGKHYNVALSHAAKKLVRLIFAMEKSRQSYCSSAA

SEQ ID NO: 516077 - protein, 316 aa, unidentified
MTDNSMICAGIDVGKSHLDIALHPGKARLRVTYDTAGLKALDAFLREHDVSRIGFEASGGYEWRLLAHLRAGKRPAARLQPAQLRFFAKSRLKRAKNDRLDAVLIALFTASLEQLPALPDARFDKLAAELTYLEQIEQQIALVKTFAETALSEAIKRRHLREVARLETCRKAHLLRLEKTVRDDCDLAQRLDLLISIKGIGLRSALCLIIRLPELGHASRAEIAALAGVAPYDDDSGKYHGRRRIPGGRERLRKSLFMCAFTATRHNPDLAAFYTRLRQSGKEHLRAVIAVARKLIVLANTILFRKTEWTPQYRKN

SEQ ID NO: 516078 - protein, 438 aa, unidentified
MSNKVIFNLDELFISVGIDVGADFSWMSIALPNQQFVGKPYKILHNSIDSLTTAVSKIKEAEELYSLESRIFLESTGIYHYPLFCYLRDKGFNCSVINPIITKNSTNINIRKVHNDRFDSKKAALVGLKPDLKVSLMPSDLALNCRNLCREYYDLMDNRSAYVNKLQGELRMAFPQYLGIFSKVTINTSLTLLETYTSPSAFLEADKQEIIDIIKSTARFGLTYAQNKYNAIIQAATDANQFGYIIESNIKRIRLYISFIRKYDEEINDILESLHKLVDSNEDTKFVKQVHLIETFKGAGFLSAATIMGEIGDFSAFSKPKQLFAYFGLDPAVKQSGKFEGTKVQMSKRGSAIARRVIHTLALQSISISRNREAKNPVLLEYYLKKCDSKPKLVAMGAVSHKVCNMIFAILRDNKPFKIIAPQEHIKQYNSAKCDIAA

SEQ ID NO: 516079 - protein, 409 aa, unidentified
MERQLERCCGLDVHKDSVAACVRLGGRTGKPEQYVQTFGTTVAELLVLHDWLAAHGVTHVAMESTGVFWKPVFYALESDFTCLLVNAAHIKQVPGRKTDVKDCVWIAQLLEHGLLRGSFVPPAPIRDLRDLTRYRKALIHDRTRVANRLHKALEEAGIKLASVASDILGVSGRAMLAALVQGTTDPAVLADLARASLRRKLPALRQALASRFRPHHAFVLGQLLAHLDYLEEAITTLSTEIERVMAPFAEPLRRLDTIPGINQRTAEVILAEMGPDMSAFPSAGHLASWAALCPGQHESAGKHKSGKTRKGNRWLRTALIEAAAGASRAKNSALQARFRRVLRHRGPKKAVVAVAHALLRMVYHVLADGTVYREAGADYYDRHHRQRITRRALQTLERQGYRVTLEPAA

SEQ ID NO: 516080 - protein, 343 aa, unidentified
MQTVTTIGLDIAKSVFQVHGIDDAGQVVIRRQLKRRYVLAFFEKLPACLVGIEACASSHHWSRELQSLGHTVRLMPPAYVKPYVKRQKNDTTDAEAICEAVTRPNMRFVPTKTVDQQGCLMLHRARHLFIRQQTAVINSIRAYLAEFGIVAAVGRRGVEQLLEVVADAADRRLPDVARVCLAALGSQLRRLKAQILEFDRRIMVWHRSNATSKRLDAIPGVGPALATALVASIADPKAFRSGRDFSAWVGLVPKQNSSGGKDKLGSISKQGDRYLRSLFTVGALAVIRYAKIHGTGHRPWLTALLARRPTKVAAIALANKLARMAWAMMARNERYREPVALAA

SEQ ID NO: 516081 - protein, 331 aa, unidentified
MAHTPPPRVTIGVDTHKDLHVAAARDELGRRLGTTMAPATRAGYATLLDWAAGLGEVTAWGVEGTGSYGAGLARFLCVRGQRVLEVNRPDRAARRRRGKSDPVDADAAARAVQAGEATGTPKAQDGVVEMARALRVARQTAVKARTQAINAIKGLLVTAPTGLRQQLAGLSTTRLVGQAAALNSDTLTTPTAAAMLALRGLAQRYQHLDAEITLLTGTLDQLTANHAPALRELLGVGPDSAAALLIAAGDNPSRLRSEAAFAALCGTSPVEASSGKTRRHRLNRGGDRQANAALHRIVVVRLRWHQPTRDYVARRTAEGKTSKEIIRCLKR

SEQ ID NO: 516082 - protein, 329 aa, unidentified
MTLAKLGIDMAKQTFEVTLIQGEKLRHQTFEIAPAGFDALTAWLTRQGVSQGHAVMEATGTYGEDLALYLYHAGHRVSVVNPARIKAFGQSALQRNKNDRMDAASIARFAVKHDPEAWTPPPEELRQLQGLVRHLDDLMAQHSQWQQRLTESRPVPAVQTSLQTLVAVVEDQMQQVQQQIRDHVTQHPELARQQALLTSIPGIGEITATRLLAEMAPLERFQSARQAAAYTGLTPKHHESGSSVRGRTRLSKIGNARVRKALYWPAIAALRCNPLICAFGQRLRARGKAKMVVIGAAMRKLVHLAYGVLKTGKPFDEQHVMGAVPTHAR

SEQ ID NO: 516083 - protein, 348 aa, unidentified
MTITTVGIDLAKNVFAVHGVDQNGRTVLVKPKVSRAALPELIASLPPCVIGMEACSGAHYWARLFRQYGHEPRLMAAKFVSPYRMAGKSGKNDAADAQAICEAVRRPHMRFVPVKDESQQAMQCLHRTRQGFIEEKTATYNRLRGLISEFGVIAPQSADALRHMVSVQKSSLPLQVQQCVDDLMEHVDRIEANITEYDRILSHIAKTDHRSQRLMELKGVGPTTACALVASIGNAHDFKNGRQLAARLGLTPSQYSSGESRNSAGSQKPVIRICERFWFRGLVQCLLAPGKGLTHSAVGFVCWLSAEGTGGLLWPSPPKMRGCVGHHYITVMISGCTQSTKARSCITI

SEQ ID NO: 516084 - protein, 386 aa, unidentified
MTIQTQVTSFIPRNYDVFAGLDVDKKSMAVVFADHDGAMRSLRMANSATPLLNYVRKRFPGQRVAFAYEAGPTGFGLHDELTSEAYTCVVVAPSKVPRAPGERVKTNRLDGRRLAESLRGGQLRTIHVPGRAYRDLRHLVQLRDTHVRQLTSSKLRIKSLLLYEGISFPEPSEKWTARAMRELQTLACSETVRFKLDDLLNTLHFHFQAAALATKQIRRYCLNDPELRQSVDLLLSLPGIGWIVSSHLVARLGDPQQIKNGRQIAGFLGIVSSEHSTGDKENRGEITRSGDSRLRNKLIQSAWTAIKKDPELRAFYRRIYQRHPKKVAARKAIVAVARKLTTRVYVVLHEQRPYVMRPDSSIAPLTAEETVGPRDRLDAAQNDQSR

SEQ ID NO: 516085 - protein, 424 aa, unidentified
MKVTYQTCCGVDVHKSFLVATIVKTTGGIEPSYQKERFSTFNNSILEFKQWLLDNDCHDVCMESTGKYWVPVFNLLEDDINVVIANPKWVKAVKGNKDDTKDSKWIGDLFRLGLVKGSYIPCKKVRILREYTRYRYKLVSCRSSEKNRYQNALTVCNVALDSVVSDIFGKSSTSIIDYLLEQSGTSINHEEIASKLLRSLKSKEDAVIESVEGYQMTDAQKYRMRLVRAHMDYITAEINDVDKMIENMISSNTDFENAVQFLCTIPGVKRDSAITIISEIGTDMSQFSSSRRLCCWAGLTPGSNESAGKKKSVRITRAGVYLKPALVQCAHAAVKSDKSPYYKKKYESLVKRRGKKRAIIAIARMILTAIYQMLSTGEQWNPSDLYKIDMPVALVEKQKAKAIKQAKKLLQREGLLPPDEPLAS

SEQ ID NO: 516086 - protein, 358 aa, unidentified
MTPTMIDTQVVVLGVDTHQRTHHAAIVAADGRPLVDREFPTTTAGYTEMWQWACGFGRIEHAAVESSASYGAGLTRMLTDHGVTVIEVNTPDLPRRYAHGKTDQLDAYAAAMAVITGRATAVAKDTRGAVESIRMLTLARTSAVEEATRIGNQIRDLCTTAPVEFADQARQARTIAARAAFIAGLPVPADQGDLSGPAAAFVRAARSLLERHRLARREVGSLTRELERLLATVVPTLLSRPQIGPVTAARLVITAGDNVERMRTEATFAKLVGAAPLPASSGKTSRHRLNRGGDRQANSALHVIAVGRMKSHAPTRAYVERRSAEHKTKKDIIRCLKRYIAREVFRDLTTDLGTLDKL

SEQ ID NO: 516087 - protein, 343 aa, unidentified
MKLHVLGIDLGKTVFHLVGLDSTGRVVIRKRCSRTQLLAFTANLQVQVIGMESCSGSHFLGRALREQGHEVRLMPAQYVKPYVQTNKSDFLDAEAIAEAVQRPRMRFVPIKTEEQLDLQALHRVRERWVMRRTAVVNQIRSLLLERGLTLPKGRRYVDEQLPRILEDAELRLSGCFRVLLAQLQVELGQLTARIEQMDRVIQQTAKDNEACQRLTEIPGVGPVTATALIAAVGNGSAFRKGRDLSAWMGIVPRECSTGGKQKLLGISKRGNKYLRRLFVQGARSVMQQRDKQAPGLSHWLAQLLGRTHQNVVVVALANKLVRMAWAVLCKNERYRAPDLAMCT

SEQ ID NO: 516088 - protein, 392 aa, unidentified
MVCVGIDVAKGKHDCFILSSEGEVLADVFTIANNRDGFETLLQRLHSCTHPTDNIKVGLEATGHYSYNILGFLLENGLHTYLINPLHTNLYRKSLSLRQTKTDRIDARTIASMLMSDVDLKSYTDTAYHNEELKSLTRYRFDKVQDRARLKQSVSRLINILFPELETLVPTLHMASVYAMLSEFPGARQISDAHLTHFKTILSDASKGRYDREKAVEIREAARRSIGSAMPAKSLELQHTIRLIRELDKEIDEIETAIKAIVDEMAPPILTIPGIKYRMGAMILAEIGDFSRFDSPDKLLAYAGLSPSTYESGKLKATGAYAHMEKRGSRYLRYALFNATKYVCIWEPSFKAYLAKKRAEGKHYNVAISHAAKKLVRLIFALQTSGKAFQPA

SEQ ID NO: 516089 - protein, 315 aa, unidentified
MKIVALDVHSECSQMTVASEETGEVLLELKVPTRPEDLRRVVGGIPGPKRVLFEEGPMSGLIRDALEGLAEEVVSCDPTRNALVARAEDSSDERDARRLIVLNRARATHPVFVPPEPYRTLRSLLHYDHRLARAVTGVKNGIKAAFRRQGIHCRGVRVYGRTGRSEALKKQVRGMDAVRRLQTIPGVGPVTARTLVAWVVDPLRFRSRKALSSYGGLGLGQGFTNRQPTGRARASKRGRRELKRALFLAARGAIRSKGSALARRYEARLASGWEDRKAIRDIARCILFIARSVWITGKEYQDARVSVPQNQSGAR

SEQ ID NO: 516090 - protein, 341 aa, unidentified
MKKFIRIGVDLAKNFFQVHGIVREGAEAVSRKFTRTKFREFFLSVAPCRVGMEACGSAHYWARELRSMGHDVVLIAPAYVKPYVKRGKNDAADAAAICEAMSRPDMRFVPIKSADQQAALMLHKTRELLVKQRTMIVNALRGHLSEFGLIAAKGIQRVHELVALALGEEGLPEAARQAAALLAEQSEQLEGTIDTLEKKIAEASAKYPMVRLLKEIPAIGPLISSAMAASYPDPGVFASGRDFAASLGLTPSQHSSGGKEKLGSITKKGNRYLRKMLVVGCTSVLRVAHKYKGALAEWIVAIKARKPERVAAVALANKLARICWAMLSTGEGFREELYTRA

SEQ ID NO: 516091 - protein, 423 aa, unidentified
MKIVYPICCGIDVHKSFLIATIITSQGITPHYVKKRFSTFNNSILRFKQWLIENNCSDVCMESTGKYWIPVYNLLEDTIRITIANPKWVRAIKGNKDDTKDSKWIGDLFRLGLVPGSYIPNKQIRTLREYTRYRAKLIACKSSEKNRFQNAFTVCNVALDAVVSDMFGKSASAITDYLISANTFSPEYCTSLLQKSLKKKADAVVESIDGYQMTQEQKNRIVMVRSHLEYITESIDALDKKLNKMTEPYENAISLLCTIPGVDIQSAITIISEIGTDMSQFSSSKRLCCWAGLTPGNNESAGKKKSVRITRAGVYLKPALVQVAHAAVKSDKSSYYKIKYERIYKRRGKKRAIIAIARMILTAIYHMFTTGEEFNPCDLYKIDMPQELKDKQKEKAVKEAVKFLIAQGLIKPSDIISSKLPKA

SEQ ID NO: 516092 - protein, 346 aa, unidentified
MPIVGGLDIHRKQITFDYLDTETGQVRRGQISPADRLHLRAWLARFAGREDVAFAVEGCAGWRYVAEELAAAGIAAHLAEPADTAFARGRKRHAKTDRTDARHLRMLLAEGRLPECWIPPARILECRALLETYNDLRRERTAWAQRIHAVLFHQGAPALGEGALRTEKGVTALREVAAAHLSPAGQLQVATALEVIDALEARLHVVRHQLTDAARHLAGARALAARLYGVGPVTALALTCWLGGAGRFSSSRQAVRFAGLDITVHSSDRKGPPGRLSRQGPPVLRWAVYEAGKTHARTSAPDHRYYAQVKDRKNSKRACLSEARKILRQAHHILAELGDDALAPAA

SEQ ID NO: 516093 - protein, 424 aa, unidentified
MHLTAVSPSVAPTIVSCDVSAYKLNLVCRELSTAGAVAEWEIENRTGSITTTLLAIRERALARGIPELLVVVEPTGIYHKLVLRIARSLGFATGLVDAGHVKKLRSVIFGDNGKTDQRDPYAIAMVATQGRLIPDRRHDQVYELLRQWGKLYSDAETALIDAKSRIHRALTLLFPDFDFSTDFLYGPSGQAILRCFGLDPHVIAPLSESRIYERLRKYSRIRRSSVVRLRTLARQTVMAISKSRVTDLQVRELAFAWEDLEFATRRRQNARLELEALYGEARLGDPLLPDTTGTPISKLAMARLLGEAGPLSAYASWRQLLRMGGVNLRERKSGKYVGQTKIARTGRPLMRAILNQMALPLVKRDRLYGSYYHRKTGVQNMPGAKAMTAVGRKIVKMIFGWYRSGAAFDQRRVFTCEGEHQRAA

SEQ ID NO: 516094 - protein, 309 aa, unidentified
MDNSVGIDVSKDRLDVAFAASGTVFFVENSHAGIDDLVERLKEVHADIVALEATGGFETLAVARLSAAGFAVIVVNPAQVRAYANAIGRRAKTDAVDAAVIAAFVSATKPQIRPLRDQQTQLLSALVERRRQIVQMIVAEENRLRMALEKSTRKSIQRLLAALRREVDSIDAEMDDHIRKSPVWRVREALLTSVPGVGPATARTLLAEMPELGSLDRRQIASLAGLAPWTRQSGKWKGKSFIGGGRGKVRAVLFMAALVAARHNPVLKAFRDRLVQAGKPKILATVATMRKLLTMLNAIIRDNKPWQNA

SEQ ID NO: 516095 - protein, 475 aa, unidentified
MPLLGRDQPPYMKSKTSKHKRANQKITISPAWEPVNVHAAGVDIGSREHWACVPAGSSDRPVRQFGTFTADLEAMADWFKDCGVTSVAMEATGVYWIPLFQILERRGFQVVLVNARQTKNVAGRKSDVQDCQWIQRLHSYGLLQGSFRPEDAYCVLRTYLRYRDELVSARGTQCQHMQKAMQQMNIQLTQVLSDVTGLSGLAIIGAILEGERDPVKLASLVDRRVRATAAAIQQALRGDYREEYLFVLGQAYELHGTYEAKINECDQQIARETATLPDKVDPKLQPLPPGKPGRRPSADQLDGQDMRLRLYEKFGVDLTAIEGIGIQTGLILLTEVGPDLSRFKSEKHFCSWLGLCPDNRISGGKVLSSKTRRVINRVADALRIAASSLERSQSALGGFYRRMKARLGAAEGVTATAHKLARTIFRLIKHGEAYVRQGLEDYEKKFQARKLNALQKTAKAMGFELISKPISHAVS

SEQ ID NO: 516096 - protein, 349 aa, unidentified
MNITTIGIDIAKRIFQLHGIDKNGKVVLKKKLMRDQVLNYMANLPKCLVGIEACGGANYWGREITKLGHEVKLMAPQFVKPYVKTNKNDQADAEAICEAVSRPNMRFVPIKSVEQQDILSIHRVRQRLVKNRTALANEIRGLLLEFGFTIPQGINKVIPMLTEILDGDNLSNISYQTFYALKEEFIENDNKIKTLERHLKEIAKQHDLYKRLDTVPGIGLITATALIASIGNASCFKNGRQLSAWLGLVPRQHSSGGKEKLLGISKRGDVYLRTLLIQGARAVFNSKLRYTTLEQQSKKDYSRFTGWMFNLADRSCHNKTVVAIANKLARVVYAVLRNENEYTEHKVCS

SEQ ID NO: 516097 - protein, 340 aa, unidentified
MRTKPSRYLGVDLHHDSFVVCTREGGQQQFQHWKMEQIEEFVASLRRGDCVAVEATGNTRWFCQRIGERVQRRVVVNPHQFRLISQSVKKTDRRDAALLAEYLEKDLLPEVRPKTLQESELAQLVSGRDQLVKIRTMLKNQLHGLLRSYGLRVSKQGMSSNKQRKQLATLELPVLADVHRRVLLEQIASIGCAILELEQQIKPAAEQLPGYRNIASIRGIGALSAGILLSAIGRVQDFSEPGKLAAYFGMVPTVQQSNQSEHHGHITRQGNKLARTTLVQCALVAIRYNPKLRSFYERIRRRRGTGKAIVATARKLLTIVYYTLKNNWIFSDSDHFVLAT

SEQ ID NO: 516098 - protein, 345 aa, unidentified
MMKITRVGFDIAKRVFQVHGVDENGKVRAQKTLAREKVLEYFAQLPACLIGMEACGGAHYWGRELSKLGHTVKLMAAQFVIPYRKRGKNDANDAEAICEAVGRPNMHFVAIKSEEQQSVLMVHRARTLVVANRTAQVNQIRGLLGEFGLVVPKGVARLRRELPVILEDAENGLPGLAREVLAGLLDQFHDFDTRVAAYDRQIRALAEASEPARRLMQVEAIGPQTATALVASMGDPHVFKSGRSYAASLGITPRQHSSGGIDRLGQITRQGDSYVRTLLVHGARAYLRVVDKKTDGKSAWARRLKERRHINVVAVALAAKHARIAWAMLAKGTEYRVMGTEEAAA

SEQ ID NO: 516099 - protein, 405 aa, unidentified
MIYTGIDWSDKSHCLCILDEAGDELDSFQISHGQDGFETAHSRIAKHANPEDVRVAIETKDSLLVDFLCELGYTLYFLNPRQTDRFRDRHRMSHSKSDSFDAYVLADAVRTDAHLFNALPPLDEASLRLRVLTRTREGLVSRKVAVQNEITAYLKRYFPVALELFNGIDNLEAISFLLPYPTYQQARSVSQTRIAAILGTWAGVSKAIATRHAIEAHAKLRQAQPLPSASVARSYPLAVRSLLRQLQSILKEIEALEQEIRDTYGDHPNKELIESLPGVAETLGPVIAAELGADMARYSQLRTLKAFGGSSPVTQQSGQYRSIHFRRACNNHLRRALHLASQGAIRKAGWARELYDRLRADGKSYGRALRAVADQLLEMLYVILTKRTPYDEAYHLRIKEIHGRA

SEQ ID NO: 516100 - protein, 405 aa, unidentified
MNAVGIDVSKGKSTVAILRPYGKVVASPFDVAHTGSDLRALADLIKKLPGETKVVMEATGNYYESIARCLHEQNIFVSVVNPVLISDFGGNTLRKPKTDKKDSVKIASYALTYWLDLKEYTPQEDLRKSLKLLNRQYQQSIKLKTMMNNNLISLLDLTFPGINKLFTSPSRESDGHEKWVDFVLEFPHCDMISKLTIKSFTRKHMKWCSNNSYYFTESSCEKIYAFAKECVSSVSSDEAIVFSVVQAAKMLVSATENCHAIQTEMNRVASKLPEYDTVMNMYGVGKAVGPQIMAEIGDPRRFHSRKAITAYFGYDSENNDSGQKTTRSNPMTKKGSGVLRRTLFIIMQVLLKTKPQDNPVYDFLIKKQSEGKHYYSYMNAAANKFLRIYYAKVKEVLHTTETPLT

SEQ ID NO: 516101 - protein, 346 aa, unidentified
MKKIFIGIDFSKEKFDATVIKAVGVEECAERKHEVFDNKVSGFRRLLRWVKSVADEQDTGLWLFCGENTGGYSKALCNYLYGSGYDMWLENALSIKRSSALQRNKSDKADSNIIAEYAMRNYDQMRLYKPLGKNLERLREVFLYRHNLVKLKASMTARKGEKNLTQDKSDISRFMAMSSKHLISEFNKKIAECDIRIEKIISEDEELRRNFEIITSVPGVGTQNAVCLMVYTDNFNRFDYNSRKIACYYGVAPFGRQSGTSVNTPPHVSPFANKLIKSLLSQAALSSVRSCPHLAMYYHRLVEAGKKSPVALNNLKNKMLHIITAMVRKGEKYDPEHDYYAAIKAA

SEQ ID NO: 516102 - protein, 393 aa, unidentified
MKVWDFCERIDIRKISLESSAVEKIGNSEFQQKAPNYYNFDVIISISLSDEMTIKATTKAVIKYLEAIKKKHREEILFACGYEAGPTGYGLCRGLQKAGYGCVVMAPTTMSNPDGKRRVKTDRIDARAIARILAYKSYSQVHLPSEEMEALKEYTRARDAKKRMFKKAKQELLSFLLRNGKSYPESGNYWTEKFFKWIKTVQFSEKWMQEAFNEYLAEVYSLKAKIELMDMKIREIAELEIIKDKVDKLVCFSGIDIITAVETAVEIHDFTRFATAAQFVSYLGLCPGEDSSGKTKNMLPLTKAGNKRVRALFCESAKAIKRTNPYGQKSKRILERQKNASPEIVAYADKATKRIRTKMKHLEERGKNYNVSSAAGARELACFVWGMMNGKIA

SEQ ID NO: 516103 - protein, 413 aa, unidentified
MKQLLDPVAGLDVHRDNVVAAIRTVGTDGEVAFTKARYPTTRRGVAELAAHMSQAGVVRVAMEATGVYWKSLYYSLEGLFPELWLCNAQHVKNVPGRKSDLSDAEWLADVAAHGMVRPSFVPPPEIRELRELTRYRKTQIDERTREIQRLEKTLQDAGIKLTSVASGVWSVSSRRIIEALIAGERDPIKLASMALGRLRPKTAELEEALAGHFGAHHAFVCRQVIDHIDFLDGSIAALSEEIAARLLPFEASVALVSSVPGIGEVSAQVIVAEIGVDMARFPTAGHLCAWAGLAPASHESAGKRRPAGTRNGSRWVRRTMIEVARVAARSGGTYFSAQYSRIARRRGPNKAAVAVANSMLAAIWHLLTTGAFYEDPGADYFERRHDPVLEAKRLQTRIEALGFVVTMTPMAAA

SEQ ID NO: 516104 - protein, 312 aa, unidentified
MSEPLYVGLDVSKQHLDLAFEPARTPRRVPHTDEGIATLVTELRPLAPALIVLEATGGYETDVATALALAGLPVTLVNPRQVRDFARALGRLAKTDALDAQVLALFAARVRPEPRPLPDEAHQALAALVTRRRQLVDMLTAERFRLPLAKGPIRRDVQAHIHWLEQRVKDTNADLRAALKTSPLWQAATRLLQSVPGIGPTTAAVLIADLPELGRLTRHQLAALVGVAPLNHDSGQHRGIRTIWGGRAPVRRALYMATWVATRYNPVIRAFYRHLLAAGKPKLVAVVASMRKLLTILNAMIKAQQPWTPRHP

SEQ ID NO: 516105 - protein, 352 aa, unidentified
MAKRTRVVIGGVDTHGRTHHAAVVDQHGRLRADAEFPAHTDGYRQLLGWLRRHGQLLSVGVEGTGTYGAGLTRFLLGHGVQVLEADRPDRKTRRQRGKSDPIDAEAAARAVLAGTATALPKRRDGIVEAIRVLRSVRAGAVKARTAAINQLKGVVVTAPALVREPLDGQSTAQQVAACARLRPDPEQLADPAQATKAALRALALRILALEQEIKVADQRLGELVPKAAPRTLGLLAIGVEHAGQLLVTAGDNPERLRGEAAFAHLCGAAPIPASSGRTQRHRLHRGGDRNANCALHLAVVVRMRYCPRTRAYVERRTKEGLSKPEIMRCLKRYLAREVYHAIQADFAALNAT

SEQ ID NO: 516106 - protein, 368 aa, unidentified
MPRMAEQAGPVTGGVDTHADVHVAAVIDPVGRVLGTQAFPATAAGYRAALAWMKLHGELARVGVEGTGSYGAGLARYLADCGVEVAEVIRPNRQARRQRGKSDTADAVAAALAALSGEASGMPKSRDGAAESIRALKVARAGAVKARTQAGNQLRDLILTAPEPLRQQLAGLPSGRQVETAARFRPGDPARPAEGAKAAMASVARRHQQLTAEVTRLDTMLDELVRHAAPEQFLAKRGVATQVAATLLVTAGDNPARVRREASFAALCGASPVDASSGKQIRHRLNRGGDRQANSALWTIAMTRLAHDPRTKAYAARRTTEGKTRKEIIRCLKRYIAREIYKALCRPSGPGMPSTPQIKQDLSVQVLT

SEQ ID NO: 516107 - protein, 468 aa, unidentified
MKTVVYSTFNHIQGKIGSRWAQLVRETRPENLLLVAIDAAKYTPKVIITSFYGDILVKPFDIDSSMSGFHKLKSLVESTKSSHNLTKVVIGIETTGHYYEHLVYKCHLEGYHVRTVNAATTAKERETLLNWSKTDNLDLMAIIQSVIHGRGTSNELPSGDILNLRKLTRARRELVSERTKTKNLILMHMDHIFREFQGKTVWMKGKRYLSKPFSKVFGKGSIYLMRHHPHPSDILELGVKGLREVSQRENLKIRDKTIQTLIEFARDSITLPKEQVEADIYLLNQKLDRLEFLEKQIKRLEMKIEELFVTTDGAVILSVQGIGLVTGAELAAEMGDISDFDQAGQLIKLAGTNPIVKQSGGNQPAYYGVSRQGRRPFRNIVYQVGKSLAVNNPEMHQRYLALKERGKHSRQAYIALGNRMIRLAFSMIRNQTLYQTKAENYTLYDEISKKIRKENVEKFFKAHVVSNQ

SEQ ID NO: 516108 - protein, 458 aa, unidentified
MSPKRSKPKSDRTMPMVHPNAAAIDIGATMHMAAVRADRTSEPVRSFGTFTTDLHRLVDWFTECGVETVVMESTSVYWIPIFELLDARGFAVFVVNARDAKHVPGRKTDVSDAQWLQRLHSYGLLRASFRPKGQIAELRAYVRLRERLLEYAASHIQHMQKALTEMNLQLHHVVADITGATGLRIIRAILAGECDPKVLARLRDYRCHSSAETIEKSLTGSYRAEHLFALEQALALYNVYQDKASACDARIEAVLKELSTSRGRDAGPLPSPRRRLHGKANGPDFDVRAALFKLLGKDLTQIDGLGSYLSLRLIAECGDDLSAWPSAKHFTSWLCLAPSNKISGGKVLSSRTRRSGSRASALLRLAAVTVGRTDTALGAFYRRLSARIGKAKAITATARKIAALFYNAVRHGMEYVDPGSSFYETRYRTRVVENLHRRAKAFGFVLRPLEPIAGGVVS

SEQ ID NO: 516109 - protein, 466 aa, unidentified
MKHNHRKTAGTRRVSRTVLDRINPNAAGIDCGSEEHFVAVSPDRDPMPVQCFKTFTSDLLRLADWLTTCRVTSVAMEATGVYWIPIYEILEARGFAVLLVNARHLKNVPGRKSDVSDCEWIRELHSVGLLRGSFRPTDAIVALRAYLRHRQTLIESAGTYVQRIQKALVQMNLQLPLVVSDITGLTGLRILRDIIAGHRDPHHLAEHRDPHCRASKAEIVAALTGNYRPEHLFVLRQNLELFDMCQVQLAACDRAIDAHLQTLTASVAHPATPLPAPRVTRKPFDNDPRFEIRTPLHHLTDGVDLTQIDGIKPYTALKLISEIGTDMSRWATEKHFTSWLTLAPNNRISGGRLLSSRTQPSANRAAAILRLSAMSLARTRTALGAFYRRLAVRIGKPHAITATARTLAILRQRAMKGELQYHDPGAAAYDAQQRTRVLRRLRQRAAILGFELVNRQTGEILAAAPA

SEQ ID NO: 516110 - protein, 403 aa, unidentified
MNAVGIDVSKGKSVVAIMRPGGEMVYKPFPVKHDSDGINALIKCIKSVDGESRIVMEHTGRYYEVLARKLSEADLFVSAVNPKLIKDFDNSSLRKVKSDKADSIKIARYTLDKWKELKQYGVMDELREQLKTMNRQFNFYTKQKSAMKNNLIAILDQTYLGANKFFDCPARPDGSQKWVDFATTYWHADCVKKMSLNAFIDHYKKWCKRKGYGFSKVTATEIYEVTKNIVSVLPKDETTKLIVKQAIDELNSTSRTVENLRTLMNDTSAKLPEYPVVMAMKGVGPTLGPQLMSEIGDVTRFHSKGALTAFAGVDPGVNESGSFEQKSVPTTKRGSSELRKTLFQVMDVLVKTKPSGDAVYQFLDKKRSQGKEYYVYMTAGANKFLRIYYGRVKEYLNSLDSQE

SEQ ID NO: 516111 - protein, 347 aa, unidentified
MIIIGCDFHSRFQQIALLDTETGKVEERRLAHENGAARDFYAGLREPALVGIESMGYTQWFEELLAEFGHELVVGDAAKIRKMEVRKQKHDRRDAEHLLNLLVKGDFPRLWLPSAAERDARVWLEHRHQLVQMRTRTLNGLQAVALNHGLCLRQKLWTKHGQEELKKLPLREGRARRRADLLALRAQLDRWIAELDERLEQEVAQRPDAQRLLTHPGVGPLTALGTVLILGPVERFPDAKHVTSYVGLIPQEESSGGRQHFGRLTKQGNHLLRFLLVEAAQTASRLDPGLRRAYRRLTFRRGRASAKVAVARKLAIRLYIMLRDKIDYEEFCRRGSHAGMLGEVALA

SEQ ID NO: 516112 - protein, 427 aa, unidentified
MSVTQNEKIRQVTETTMVIGVDIASEMHWARAFDWRDLELGKVVKFENSAEGFRFFLHWLSELAAEQKKSSVMVGLEPTGHYWFTLAAYLQGSSIKLVLVNPYHVKRSKELDDGHPSKSDKKDPKTIAKLVLEGRYAFPYIPQGLYAELRVAMNCRWRVQKELTSVQNQIQRWLKIYFPEHKTVFGKFEGMGSMALLHAAPFPSDLIALGVDGINQIWRQMKLRCVGLKRAQRAFEAAKNSVGCTTGIEAARMELQILLEDYDVKLQQYERIMEVVESLCGQIPEAEELLQIKGIGLTTVAGIFAEVGDIRRFSSPRQLQKLAGLAITENSSGKHKGQTEISRRGRAHLRAILFRAAMPLVAKNEEFQKLHQYFTTRAENPLKKMQSMIAICCKLLRVFYAVAIKGCAYSAEKMLADIHRNQPLKAA

SEQ ID NO: 516113 - protein, 376 aa, unidentified
MGKILKQVVGIDVDKKNLVVSLGRLNESLESEVFAHKVFSNNEKGFALLLSWTGKLFDSAVKPQFVMEATGVYHEALAYCLESKGQKLSVVLPNKISNYFRTLDVKTVTDKSSSEAIARFGLERQLNLWVRPDPMLKSVKQLSRERDQIVSERTLLKNQLHAENSEAQPNKSSISRMNQRITLLNKHEKQIKDELAALIKQDEKLKEDVHFISSATGVGVLTAATILSETNGFNLIRNRRQLTSYAGFDVKEKQSGSSVKAKPRISKRGNRYLRKAMYMPALTAIRHDPHFKALYARLLSKHGIKMKAIVAVQRKILELTFTLYKNRTTYDQNYSQSQTIAPKIGKAVILANNRPSYQADLESPSNKINKHISIES

SEQ ID NO: 516114 - protein, 423 aa, unidentified
MDVIHQRVAGLDVHKETIVACVRIMVDARVSRECRTFDTTTAGLKDLLALLTASGCSHVAMEATGVYWKPVWNILSDGTFELLVANAAHIKNVPGRKTDVNDATWIADLMACGLIRGSFVPDQAFQELRTLLRTRKQLTREQTRHVQRLQKTLEEANIKLDSVISDVMGLSGRRMVEAMIAGERNPQKLAALADRRIKASPKALYDALHGRLTDHHRFRLRLHLAQYDVLAAAIGAVDQEVDAAIDQMDEVEKGGQAFFRSLIRLLSGIPGVNTLSAQTILAEITPDMTRFATAGHLVAWAGLCPGQNESAGKRKSSRLRKGAPWLKTTLVQCAASAVKKKDSYFKAQFQRLKSRRGPQKAICAVAAAMLTTIYHMLKDGTQFQDLGAHHFDRRPPEAKARHLVAQLTKLGYTVQLQPLAEAA

SEQ ID NO: 516115 - protein, 357 aa, unidentified
MTSTEKYIGMDVHKESISIAVMNSTGKFVMECVIETKASMLLQFIDGLRGDVRVTFEEGTWAAWLYDLLKPHVSEVVVCNPRKNALLKDGSKSDRIDARKLAELLRGNQLKPVYHGEQGLRTLKELARSYLTISKDVTRVMNRLKALYRSWGIACAGTHVYAPRHRSEWLGRIREAGVRRRAEHCYQQLDVLRLLRQQIRRDLLLEGKKHQAWRLLGLIPGIGPIRAALLIALIQTPHRFRTKRQLWTYSGLGLETHDSAQYRVVEGQLQRSKKPVTLRGLNQDHNHDLKDIFKGAATRVSSSSHGPLHDFYEHLLSQGRKPTMARLTLARKIAAITLIVWKKEVHFDASYLKSQAA

SEQ ID NO: 516116 - protein, 462 aa, unidentified
MKAKREGKTGQNGRRQLQGLPLMRSDVAGMDIGSERHWVCAPTQDGSGREIGDFGATTPELNGMVEWLKARHVESVAMESTGVYWIAPHEVLEAHGLKVLLVDTRQLAQVPGRDKKTDPTDCEWIQRLHSCGLLRGSFRPSEEICMLRTLVRDKATLVAESGDWVRRMQKSLDQMNVRVHRAVSDISGATGMAIIRAIAGGERDTRKLAQQRDPHCHKSEEEIAEQLTGHWREDHLFSLCQALKMYDAIEERISAYEKEILRKLGEMEQEGQAGKNAPPLKNANKARMIKKRGQEPKRQVMYRMSGADATQIDAIGVETVEVILSEYGPDLSRFPTEDQFVSHATLAPRVPRSGGKPVKKKKRNSASTRVANALRMASQALRHSDTALGAYYRSIERRKGPGIATFAGARKIATLIYRLFRWGKSYVDEGAEAYEKRYQQQRIRGLESRAKQLGYQLTPLTA

SEQ ID NO: 516117 - protein, 338 aa, unidentified
MEWTVAIGVDTHKDVHVAVALDRFGARLGSREIETTESGYRSLLCWALELGVPAFAVEGCGSYGAGLVRFLAPAGVAVWECERPRRQERRRGKSDLIDAALAARRLLSGEGLCLPRGGGRREELRLLLLERRSAIQARTAALNRLSALVVTAPEQLRQRLGDLSGERLAQAAARLRPGADVGNAVPQRLGRRIKKLSHEVAEVDRNLLDILTEVAPELLAECGVGPVCAAQLLVSSGDPKRMASEASFAALAGTSPLDASSGQQRRHRLNRGGDRQLNCALHVIALARIHHHAETTAYYQRLLATGKTAREARRCVKRALARYFYRRLREIPTPALTT

SEQ ID NO: 516118 - protein, 412 aa, unidentified
MDRWIERCCGLDVHKQTVAACVRVPGAQGRRTQEVRTFGTTTPDLLALQDWLAAHQVTHVAMESTGVFWKPVYYVLEARFTVLLVNAAHVKQVPGRKTDVRDCQWIAELLEHGLLRGSFVPPPVIRDLRELTRYRRTQIQERTRVANRLHKVLQDANVKLSNVTHHVLGVSGRAMLDALVAGTTDPDVLADLARGQLRKKLPALRQALTGRFRAHHAFLLGQILAHLDYLEEAIAAVSAHIEEQLRPFAPQVERLMTIPGVQRRTAETILAEIGTDMAVFPTAGHLASWAGMCPGNDESAGKRRSGKTRKGSKWLRTSLIEAANAAARTKATALGARYRRLLPHRGHRKAIVAVGRHILEISHHLLRTDRTYQELGPDYFDRRHAERLQRRCIRQLEQLGLQVTITPASAAA

SEQ ID NO: 516119 - protein, 443 aa, unidentified
MARNQSRQRFELVHPHCAGIDIGSREHWVAVDRDHEQPVRSFSTFTDDLIKLADWLETLKIEVVAMEATGVYWIPLFELLDARGFKVYLVNSRATRQISGRKSDVLDCQWIWQLMSHGLLRGAFRPDDAICSMRALIRQRASKVRNQAQTLNRMQKALSQMNIQLANVISDISGVTGMKILRAIIAGERDPAVLAELTDRRIKASKETIARSLHGNWRLEHLHALGQEVECYDFFEQQIGACDKAITDARSQLPEREEAPQPSRKILRSPHRCAADQAALHQSLWRVMGVDLTAIPTIGVDTALIIAGEIGPDLSRFPTMEHFCSWLGVAPPTRISGGRQLSGKSQKTLNNAAQALKQAASNARNDKSFIGASHRARLARMDTSCAIKATAHQLARLIYAMLTKGQPYVEQGIEAFEERSKEKQYRALLRKARKLGLDLVKAS

SEQ ID NO: 516120 - protein, 377 aa, unidentified
MHSENIAAYVGLDVHKETLAVAIAAPERLGEVRYYGTINNEAQAVRRLFQKLQGLYGNILSCYEAGPCGFGLYHQLTAMNKICQVIAPSRIPKSPTDRIKNDHQDAISLARLLRAGELTPVWIPDLTHEAMRDLIRARAAAKRDSRVARQRILSMLLRTDKHYAGKHWTGKHRTWLANQSFSQPSQQIAFQHYCQSLEQIEDRILQLDQEISRLLPEWSLCNLVCQLQALKGVGQLIAITLVAELGDFSRFSNPKQLMAFLGLVPGEYSSGNSIRPRGITKVGNSELRRLLYEAAWSYRTPAKVGAWLIYYRPDSVTQYSKDIAWKAQQRLCSRYRSLTAKGKKSQVAITAVARELTGFMWDIALAAQSSFSQQKQN

SEQ ID NO: 516121 - protein, 438 aa, unidentified
MEVLHSHCAGLDVHKKTVVVCCLTPGAQGQRQREVRTFSTVTGELLQLLDWLLAQGVTHVAMESTGEYWKPIYNLLEGHLELLVVNAQHMKQVPGRKTDVKDAEWIADLLQHGLLRGSFIPPLPQRDLRDLTRQRANLMQDRTTVVNRLHKTLEWANIKLTSVLSDVTGASGRAILGALLTGQTDPTVLASLARGRLRSKQTELVAALTGVMRPHHSFLLAQALIQLDFLDEQLEVFDTMIAQYLAEAPPIHASPPDLPPDPPADPPADPPLTREEALVLLDTIPGVGPRVAAILLAEIGTNMAQFPTARHLAGWARLAPGNNESAGKRRSGATGRGNRWLKSTLVQSAWAAIKIKDSYAAGLFQRLCARRGAKRAIIAVAHHLLTAAYYMLLRHQPYHDLGANHFDQLHAQHTVNRLTHRIRQLGFEVAVTPMPETA

SEQ ID NO: 516122 - protein, 353 aa, unidentified
MKRSSKYVALDVHQATAAATVRERSGRVIHRAILPTEAAALVEFFRGMRGSVHVVFEEGTQAQWLHDLLVPVVDQVVVCGRRGERRGNKSDRVDADRLSQRLLSGELRVVYHGSRDRLTLQELSRAYTNLVEDSTRTMLRLKALYRARAIGASGRSIYNPEHQQEWLDRLPDRGARLRAEALYAQLVVAQELRPRAKVAMMAEARRDPAWNTLCSIPFYGPVRVALILATMKSPWRFRSKRNLWAYAGLAVVTESSSDHEFVAGRAVRRRRRPLTRGLNRNHNRILKNVFKAAAASSLAQPGSFRDLYDGMIARGMRPEMARLTLARKFAALTLRLWKKGERYDPTKLTVRPD

SEQ ID NO: 516123 - protein, 315 aa, unidentified
MSDVPCFVGIDVAKAQVDIALRPSGERWAVSNDTSGVTMLVDQLQTRHPTLIVLEATGGLERLVTSTLATAGLPVVVANPRQVRDFARATGQLAKTDALDARALAHFADVIRPTPRPLPDAPTQELRALLGRRQQLIVMRTAEQNRLAGTSERLTKDIAAHITWLNERLATLDDDLETLLRASPLWRENDDLLQSAPGIGPVCARTLLLELPELGTLNRHQIAALVGVAPLNCDSGTLRGRRTIWGGRAHVRTVLYMGTLVATRYNPRIKAFYERLLAAGKVKKVALTACMRKLLTILNAMLKHRTSWQPQEVQS

SEQ ID NO: 516124 - protein, 397 aa, unidentified
MIAVGIDVSKYKSTVAILNGDGSIRAKPFDVHHIADELQALVDYIKRTSEPPTILMEPTSHYHYPLLKAFQNAKLPVCLINPYQMKKYGDTELRKAKTDKRDALRIAQYALEKSYSLVPYTPQDQKYEDLRFLSRQYNQRISTLTVAKIQLLSLLDETMPGITAILPLKSRDPDNCVLLRFIKRFRSFDVIRKMGKTRFLDSYQVLVKKTRDRFAGGKGLTIYELVLNSVTTNGENPLSAMTQDQCVNLVSISQKAADEINLQMRIIAETIPEYKVLRSMAGVGDRLGPIILGEIGDIRRFHSGKALNAYAGNDAPPYQSGQFESRNRHISKRGNPALRKACFEVMQALKLTKPQDDPVYLFLIKKEQEGKPYNVAKMAAVNKFLRIYYARAIESYK

SEQ ID NO: 516125 - protein, 482 aa, unidentified
MKSNTASHSKRATRLTGRKRKELARRIWSDKPGLDVVHRDAAGIDIGSREHYVAVGPDRDAEPVRVFGCFTTELRRMAEWLNQCGIKTVVLQSTGVYWIPVYDLLEQYGFEVWLVNAQDTKNLPGRKSDVQESQWLLKLHTYGLLRRSFRPTPEIRGLRTCWRERGEYVQQAGSCIQRMQKALTEMNVQLATALSDLSGVTGMSIVRSIMAGERDGKRLAEFRDPRIKASKETIAQSLEGTWLPEQLAVLQRQLGDWDHIQGQIAACDADLQALLKQLPSAERKPQQSPAATAAPAGKRQRKKNGKSSKNEPNFNLEAELQRVTGVDLSRIDGIKAMTIMTVISESGLDMSKWPSEDHYVSWIGLSPRNDVSGGKVLKRKTRKVKSRLATAFRIAATGLRASDSYLGAQFRRLRSRLGPPKGITAMAAKQARLVYRMLKYGQEYVDKGAVIYEQKYREQQIRFLEKKAAQNGFALVPIPQPA

SEQ ID NO: 516126 - protein, 312 aa, unidentified
MQILDIGIDVAKDTMMIAQSGGAPRTLPNRRAELLAWLKTLPAGSRLAMEATGRYHTLLADLADGLGLEVYVLNPKDVRYYAKGLGRRGKTDRVDAQVIARFLAKEHEQLRAYHTPSPEQRELDQILLRRARVVALRGALRASVQDLPLVVAELTEALHTLEALIVRLDERRDALIAACPQRQQDQERLQSIVGVGPLVGAALGQALQRIPFGNADAFIAYTGLDPRPMDSGQKTGRRRLSKRGPAELRRLLYNAAMSAAKTKTWRPFYEHQRAKGLSTTAALVILARKIARVAWSIHRHHTMFNPQMVLAT

SEQ ID NO: 516127 - protein, 313 aa, unidentified
MYEEVFVGIDISEDQLDVHVLPKDKHFVSKNDSKGISKLITRLQKDRPTVIVMEASGGYEIDVASELGSVGLPVVIVNPRQVRDFARGIGKLAKTDKIDAYVLARFAETTKPVVKPLPTEKERELKELVARRRQLIELRASEKNRSHRARSKRVRDSIATIIKALDQEIKEIDDDTQSLIKSSPLWREKEDLLTSFPGIASRTATTLVAKLPELGQADRQEIACLAGLAPLNKDSGKMRGKRMIAGGRAEVRQALYMAAVSATRFNPLIRSFYLRLIQAGKPVKVALVACMRKMLVILNAMIKRKQPFQASCP

SEQ ID NO: 516128 - protein, 412 aa, unidentified
MRLFAGDDWAEDHHDIEVMDEAGKVLVKRRLPEGMAGMAQLHALIGRFLPGDDPESAEVIIGIETDRGPWAAALIAAGYTVYPVNPLQASRYRERHGVSGAKSDGADAHMLADMVRTDSHQLRPAAGDSPEAAGIKVVARTHKTLIWERTRQVQRLRHQLREYFPAALAAFEDLDAPDALELLAKAPDPARAAKLTRAQVAAALKRARRRTIADKTTVILAALRSDQLGQPAALTAAYAATTRALIAVIAALNEQVKVLEEQVREHFGRHPDAEIYRSQPGMGAILGARVLAEFGDAPRRYRDGKARRNYAATSPLTRASGKKKVVTARFIHNDRLVDALNAQAFAALGASPGARAFYDELRARGIGHNDALRRLGNRLVGILHGCLKTRTPYDEATAWGHRENHPQSSAAA

SEQ ID NO: 516129 - protein, 334 aa, unidentified
MDKVTTVGIDLAKRVFALHGVDSAGRAGLRKTVRREQLMQTVAALPPCLIGMEACSGAHEWARRFQELGHTVRLMAPVFVAPYRKSGKNDGNDAEAICEAVSRPNMRFVPIKSAEQQAVLSLHRVRQGWIEERTATINRLRAVLTEFGVVLPNRAHHVRRGARAAAEALPELARRAVEDLRAHLSMLDERIGAYDRELEAHARASEAARRLMQIRGVGPLTAVAMVATVGNARDFRSGRQFAAWLGLTPRQHSSGGKTRLGHISRRGDAYLRCLLVQGARSVLLTAMRHSDRMSRWAVSLQARCGYHKALVAIAAKNARIAWALLSKNQTLRTA

SEQ ID NO: 516130 - protein, 277 aa, unidentified
MNITAVGIDLAKNVLQVHGVDARGKVVLRRQLRRDQVVPFFANLRPCLIGMEACAGAHHWGRTLERLGHSVRLMAPQFVKPYVKTNKNDVADAEAICEAVGRPNMRFVPIKSIEQQAVLSLHRVRQEFVKARTAQANQIRGLLGEFGLVIPKGIWHIPPRVPALLEDARNELPLALRQLIDRLTCNLKDLDQQVRELEREILAWHRSSDLSRKLEQIPGIGPLAATALVASIADAKSFDNGRQVSAWLGLVPRQNSSGGKSTCWVSANAGTSTCVPC

SEQ ID NO: 516131 - protein, 388 aa, unidentified
MDAVVIGMDPHKRSATIEVMDAGEAVAGGGRYATDVAGYRAMLAFAKRFPQRTWAIEGCSGIGKHIAHRLIADGEQVVDVPPKLSARVRVFATGQGRKTDATDAHSVALVGTRMTGLRPVVDDEQLAVLRVLVDRRRALGEDHTRMVSQLHQLLLELIPGGAKKDLSAAQAKALLAKVRPRDAAGKTRRRVAAELIGDLERIYARKKAANKELNDLLAATGTTLTRLRGIGPSGAARLLVEVGDITRFPSKAHFASWTGTAPIDASSGDQVRHRLSRGGNRQVNKLLHIMATVQLRNPTEGRGYFDRKKAAGKTSMEAMRALKRRLSDVVYRQLLTDATRPSRTGPGGHSGTSLKSSVADSHPDIDTSDQSLPGPATTKPRTAVVVAS

SEQ ID NO: 516132 - protein, 320 aa, unidentified
MLFEREVPCEVSDIAECLVEFSHPIERVGFEAGAMSQHLFFGLTDEGFDVVCMEARQVNAALSAMRNKTDKTDARGIAQILRTGWFSPVHMKSREAHGLRALLSTRKALLKKTMDLANEVRGLLKIFGIRLPQTVKHGSFDGVVRPMIEIDDVLAHALVPLLDARVVLYQHYLELDRRVKRAASQDNVCMRLMTIPGVGPIAALSFKSAVDDPTRFKRSRTVGAHFGLTPRRYQSGEHDNPGRISKAGDRDVRAVLYAAANALLMRTMASSQIKSWGMRLMRTKGRRRAVVAVARKLAILMHRMWIDGSEFRQDQVGGMA

SEQ ID NO: 516133 - protein, 338 aa, unidentified
MNIVFLDIDLAKNVFQLCGLNQAGKPVYTKRTGRKELLQTLANIPACLIGIEASTGAFYWQREFEKLGHKVKVISPQYVKPFVRGQKNDGNDAQAIAVALMQPTMQFVPPKSPEQQDIQALHRARQRIVNHRTATVCQIRGLLLDRGIPIGSAVSRVRRAIPLILEDAENGLSSRMRRTIAELYELFNDLGRRIHFFDKEIETVFRQSEACQRIARVKGIGPKTATAVVAAIGKGTEFKNDRHFAAWLGLVPRQHSSGDRQVLMNMTKKGDKHLRTLFIHGARAVVRVATNNNDGHMNQWVNQLKERRGFNKTTVAVANKNARIIWSMLRNETEYQVV

SEQ ID NO: 516134 - protein, 438 aa, unidentified
MAHSYARLLDPALENDSDPFAGYDARREPLEDRLYIPCGIDPHGDICAVVFAHPYPQQTEILSQRIVRNNNLQDMLWMIETGDRLAARFQATPIYVFESTNVFWRAQRNFLHRAGYATATVCGRQTKHARSTVTRKTHNDLKDAYNIAKVFKQGDSHATRILPEPLASLREYCRLHQFLVSYSVAIQNRMYCIRYQTHPEFDDHFSKHVCPTTLALMEAELVHPLHLLDCDLDYLTHVIRTASRGKLGRKRAEELSLSAQSTFPPPYAVEGLSFGLKILAQAYRHLHTHLLSPLVQRIQATLDADDFPFTHHLDEIKYFGPIVTGNYLGELGLPSWFSTVDSVVAWFGLDPSVAESANKPTGQTHLTKRGTKYGRRIMWLVGRNWSRFMPQGRRLYLKERNQHKRSYDAAVCVVAAKLVRIAFAMVRDGSHFDIDKAF

SEQ ID NO: 516135 - protein, 344 aa, unidentified
MEYFAGLDVSVNETSVCIVDDAGRIVREVKVASEAGALLAALKNGGYHFKRIGLEAGPLSQWLYSALGEANLPVICVETRHMRAVLKAQINKTDRNDARGIAQMMRAGLYRPVHVKTLRSQKLRMLLTHRKLLQSKAIAIENDLRGTLRNFGLKVGMVGTARFEARIRELVENLPDLAVLVEPLLMVRRILREQVAVLHRRLLAIVRDDAVCRRLMTIPGVGPVVALTYRATVDVPARFRNSRAVGAVFGLTPCKYQSGESDYTGGISKCGDAMMRVMLYEAAQIMLVRSTRWSWLKAWAMQIARRRGVKKAIVALARRLAVIMHRIWIDGTKFRWTREEVAAA

SEQ ID NO: 516136 - protein, 344 aa, unidentified
MDISVLGVDLGKNVCSVVGLDASGAVVMRRKVRRETLIALAEKIPPCIVGMEACCGAHHLGRVFAAHGHDVRLMSPEYVRPYIKAQKNDDRDAEGIAEAVTRPTMRFVELKSQDQLDMQTLHRARDRLVGERTALINQLRAILLERGMVAPQGKRKLEQFLSVLMDEQDGAGLSPRMVLLIQDAGAQWAELDRRISAFDAEFVCWAKENEEARRLTTIPGVGPIVASALVAAVGRAESFDRGRDLAAWLGLVPRQFTTGGKPKLLGISKRGNKYLRRQLIHGARAALPYVAERDTPLGRWVKGLMSRTHRNVVVVALANKLARIAWAVLQRGKPFDARAVSVAA

SEQ ID NO: 516137 - protein, 424 aa, unidentified
MKSLPEFEFAALVGIDWSDAKHDICLQAGHSEEREFAVLAHHPAAIEAWAGALRQRFGGQPVAVCLELAKGPLVYALQKYDFLVLFPVHPATLAKYREAFVPSHAKADPTDAQLALELLLRYRAKLKALAPQSGPMRMLLRLVEQRRRLVADQSRISNRLTDALKQYFPDVLAWFADKDTILFCDFLTRWPTLKQLKRARRTTLLSFFHDHHVRSQARIDERLRAINSATALTEDLAVILPNQLLVLALVEQLRVTLQAIERFDAQIATVSETLPDYALFRALPGAGASLAPRLLVAFGEQRERYQSAAEVQRYTGIAPVTESSGKKHWVHWRLQCPTFLRQTFVEWAGATIPRSFWAAAYYRQQRAKGCSHHAAVRALAFKWIRILYRCWQTRTPYDESTYLNALKRRGSPLLASMMETAKNI

SEQ ID NO: 516138 - protein, 486 aa, unidentified
MASRKQSTFERLSGDRLNRQQRRELARKLTTKNPGLEIVNRNVAGIDVGNESHYVAVAPGCDPQPVQEFGSWTADLVRMADWLTACGVEMVVMQSTGVYWMALYDALEARKFKVCLTNARHTKNLPGRKSDVQESQWLLKLHTYGLLRDSFHPPEEIRALRSLWRLRDRHVKEAGRAVQHMQKTMTMMNVQLANAISDISGATGQAIIRAILNEERDPWRLAKLRDRRIKATEEEIARSLEGNWREDLLFELKQAVDAYDFIQKQIAECDQRLQELLAALPQREVIATEVQAEAPIGESAKRKQKRKKSRADGNAPKFDLQAELKRVCGENLTSIDGIDVMTAQTIVAELGTDYSRWKNESHFTSWLGLTPSRDISGGKVVKQESRKVKSPVAIMLRMAASSLIRSESYLGARYRSLRTRLGAGKAIKAMARYLACLVYRMFTHGQDWVDRGTKEFESKRTQRELSSLQRKAANLGYQIIPQPASA

SEQ ID NO: 516139 - protein, 472 aa, unidentified
MKKHQRAQAKSKANQPIHVLQPDAAGVDIAANEIWAAVPPERTEQSVRKFAAFTADLKELVKWFLDCGVRSVAMEATGVYWIALFQLLEDAGLQVCLVNARHVKNVPGRKSDVRDCQWLQYLHSVGLLTGSFRPAQAICALRSIYRYRQELLSLAGQHVQHMQAALDQMNIKLHHVIDDLTGLTGQNIVQAILSGQRDPVQLAKLRDKRIQAAESTIAKALEGDWRKEHLFVLQKAWENWTGVQKQIQDCDKELSDYTRELEACTTVIKPVKVVRLKAELLGAEPVSNPAPKKKAGRKTSKNQPEGPWQQELERFFGVDLTVIPGISVLTGLTLMTELGNDLRAFKTEHHFASWLCLCPDNVTSASKVLRRRTRRSQNRLRQALRMAASSLHHEKSYLGDKYRRLRARLGAPKAITAMAHQLARIIWTLITRQIPFDQSLFAYHEKVNEQRRLKRLQASARQMGYQLTPIAA

SEQ ID NO: 516140 - protein, 429 aa, unidentified
MTEEYRLQLFRKLRSSIRGSETHLLVGVDVAKDRHYAFFGTSNGKTLCSKLVFENSKKGYELLRSYAGNMQDKHDLAEVVYGVEPTSTYHKPLAEYLIRHTENVVVLVSNVAVKRNRELLDGRWDKNDKKDAANVADLVGQGRCLYYELPEERLRELRSLLAYRIKLKKLEHGLRMRIRNNVFAQYFPELDRLYMRRGQPDDLVLSIAEHCLDPEEIAAMEFDDFLKLIAKRKIRIEQERRMRAIWEAAKETAGCMVPEAAKWEAKNLVEQLKAMQSAVKENERRIAVEAKWFAEYNCLLSMPGFGPILSAMVLGAIGNALRFDNRRQVLRLAGLDLCASRSGNKSDSAVPVISKQGKAALRYALVQAAIVAARANPVVRSYFCRLIKGREFERGINLKMKVKLAAKMLVVAWTLMKRKEQFDPSCFSA

SEQ ID NO: 516141 - protein, 343 aa, unidentified
MKDTIYDHYIAIDWSIKNMAIARMTKKSNKITAIDVPSDIEDLQAYLKNLRGTKILAIEETTTSQWLYTELKEYVDRLFICDPSRNKLLNEGPKTDKIDATKLVRLLKAGLMKEIYHSTDKFLYLRRVVSGYEDLVKAGVRLKNQRYALLRACGKSGNEKIGSTLDFQGEQFVLKCLDRQINAYEEEKEGYEKEFEKLARKNLEIKHQKSLPGIGTINAVKIVARVVTPHRFPDKGHYLSYTGLIKLDRISGGRSYGKKNSRYSRQLKSVYKSGVLGAIGGNNPINDYYEHLIQEKNYPDHNARQKACRRLATLSLGVFKSGKKYQPFRRNDVKGSKESTSSL

SEQ ID NO: 516142 - protein, 325 aa, unidentified
MEKLYGGIDIHKENLAGCIMDRDGNIKREHTFPSSKKALEKFLCNIPSSEITIAIEACGMWRGVHKILTEIGYEVKLANPKKTHDIAGNKKMDKIDAKTLADLLRTHYLLEVWIPDEQTLQFRDLTRHKANLTRLRTQVQGKIRGYLLRKGEKFSKLSKEETLSKLAEEDPDIKNLVHVYHCLKEEEREVMRRIKRISQNMKETTMLMSMPGIAEFSALMILAEIGDIKRFSNPKELVSYAGLCCGIYQTGTTERTVHNTAVNKWLKWILYECSGRALMLDPRFQNYYYKIKEKKGFKTARRATARKMLTIIWYMLSHEESYKAS

SEQ ID NO: 516143 - protein, 480 aa, unidentified
MAKRAVQHADLKAVPMLLNESLYVGIDIGKAKHVAGFLSKTLLERHERFEACPALVFENSREGFRLLIERIRSLAPLEHIFVLMERTGHYHRTLEQYLQELDITVYVMHVQSRSTGMLKTDKRDALTLANQLYNQLELGVQVPNKLQLIRRVVPPTQAAAELRGLIRHRYELIHESTRRKNKLTAICDELFPELVRVVKDPNGQVALALRERFPTPAALATVSLTTLQQIRGGARSFSDAKLLELQRQAAQSIGIKEVARLRGLVLEQTQLIKELQMLQEHIQQLDKEIAGIVEHAREGQILLSFPGIGPIMAATSIAAIGSIHNFPSAAALKSYFGWAPVVAQSGSTLDHTRLTHGGARTMKHMLFLAVFQAIRLKDNEWARLYERLVKTKCPFDERTQSYLGKTRVIGRVAGQMTEAIYALLKRDAELLSKVPPSQDPPPPLLYDPEVHRQHHLGHYRPLKSTPPPNTITLLHPLPAE

SEQ ID NO: 516144 - protein, 342 aa, unidentified
MEQYVALDVSLKEISVCIVDSNGEVVFEGKTAAEPAILVELIRSKAPQVKRVGLETGATSPWLFHALASAGLPVVCMDARHAHAALSIRPTKSDRSDARGLADMLRMGWYREVHAKSVTSHERRTILGARHQLVTMRSELDAQIRGILKTFGLILGTGNKDTLIQRAEKLAAGHPVMSGLVAKLAEVRRHVTSQIAAIDRDIRHLVHTEPTLKRLMSVPGVGPITALAFLSAVDDPRRFKHARDVGPYLGLTPTRYQSGETDRQGRISKCGDTFTRTCLYEAAHVLLTRVQRFSPLKAWGMRLAKRIGGRKARIAVARKIAVILHCIWTDGTEFWWTRDKAA

SEQ ID NO: 516145 - protein, 343 aa, unidentified
MRIVGITGGVDTHADNHVAAAVDHNGGLLGVESFPADEVGYEDLLAWLASFGELVRVGVEGTGSWGVGLTRFLTDHEIVVVEVDRPNRQTRRKQGKSDPTDAISAARAALSGEATVTPKSRNGPVEQMRVLLVARRSGREQRIQSLNQLRHLVFTAPEEIRARFKDRPKTGLISEAANMRPRKGSNPIVYRTNQVIRGLAKRIQGLNTEIKTIDQTLVQLINETAPSLLELYGVGVDTAASLLVTAGDNPERLHSERSWAHLCGVTPIPASSGKVTRHRLNRGGDRQANAALYRIVLTRMSSHEETRRYAARRREEGLNTAEIMRCLKRYVARQTYKHLPHMI

SEQ ID NO: 516146 - protein, 356 aa, unidentified
MQLHDALTIPKIFIGLDIHKKSWTVSIQTDLFFHKTYSLPSVSEDLYQYVERTFPNHEVHLVYEAGCCGFSVARYFLNLGWHVLVVNPADVKTGDKERYQKTDALDSKNLSNQLKAGVLKGIYIPTEEHEQFTTLARHRTQVTKKLRQTKSHIKSMLLFHGIKVPDQFDNSNWSKDFVSWLEELKFSTSCGDLALQGKIRLYKFIKSEYLEIANQMRLHCRKNNKKDYYLLKSIPGIGGYLASVIIAECGDLRRFNTEAQFSSYIGLVPGIYNSGDSEKCLGITPRSRSQLRSYLIEAAWVAIRKDIEMQQYYRKHQGKNVKSIIVKVAHKMARRILSVIKTETPYQINRNLVIEQ

SEQ ID NO: 516147 - protein, 453 aa, unidentified
MPVMGVPEQIEDEEHEQRLERVAAVDVAKASGKVCTRVPDESKPGKRVTLVWDVPATTHAICELAAHLVAHRIERVVLESTSDYWRPFFYLFEASGLTVWLVNANDVKQAPGRPKTDKLDAVWLAKLNERGMLRPSFVPPAEIRRLRDYTRLRSDLTRDRTRHKQRLEKLLEDALIKLSTVATDIFGKSGRDMIEALIAGNRDPEQLAQLARGRMRVKHAALVQALNGRFDDHHADLARILLDQVDGLDTQIRQLTATIDELITAMPTTTGTTTGTGTTTGTGTGTGHPGTLSTVARLDEIPGIAEHSAQVIIAELGLDMTQFPTAAHLVSWAKLSPRTIQSGPRTRGGKTGKGNPYLKSALSEAATAAAKTDTFLGERYRRLVKRRGKLKALIAVARSILVIIWHLLADPTARFHDLGPDYHTTRINTDRKIRNLIHQLETLGHTVTLQPTT

SEQ ID NO: 516148 - protein, 459 aa, unidentified
MERKMKLGMDVVNFNAAGIDVGSRSHYVAIGQELDNVREFGVYAEDLTALCQWLMESDVTTVAMESTGDYWQNLYVELISFGFEVVLANGKFTKNAKGKKTDVKDCRWIQKLHTLGLLSGSFLPDLTTEQLRTFCRQRGNWIDLAASATHKMQKYLKLLNFRLDVVVKDVCGLTGMKIIEDICKGNLDPLSLAEHRHYNCRKPKEEIASALHGNNRSDYLFGLQQEFEAYKFFQKKIADCDKKIEHFIKQELKQHPERGKMKTTEKPHKRMNKNAPQIKDLNQIAFRYFDGVDLFAIEGLSHSTILTIMSEIGPEGFNKFGSSKQFTSWLRLAPNNKISGGKILSNRVPKGSNRLKIALRQAANAIGNLKGTHLSDFFRRVAYRKGRHSAVSATARKLAVIIWNMITKKIQYQPPKQYLFLDQKRKLGLVNRIKKQMDKFELKPEDLGFKNNLNISNLI

SEQ ID NO: 516149 - protein, 436 aa, unidentified
MPGGNQEKLMSQNQPEIQYAAFLAIDWADQKHVWSLQDANSSACEHGEVDAMPEAIEAWIAQMSQRFAGRPIAVAVEQSRGALVFMLSKYEQLHIFPVPPAMTANLRKAFYSSGAKNDPTDADLLLDLVQRHREKLRRLSPDTEATRRIQNLVEERRKLVDEKTAQSNRLEAHLKIYFPQIPRWFGDLDSPLVCALLERWPTLEALQKERPGTLRSFFRKHHSRKEDLIESRIKAIGEAMPALKDRAVVEAKVTVVKVVVQLIQVLHEGIEGLNRQIQEAAEAHPDFFIFDSLPGAGAVMAPRLLAAFGSQRERYRNSAEVQTWSGIAPVSESSGKSSWVHFRFACPKFVRQGFHEWASNSITQSQWARAYYGLQCRRGKKHHAAVRALAFKWIRIIFRCWKERVAYDENVYLAALAKHNSPLLAATKIGVVKRAV

SEQ ID NO: 516150 - protein, 315 aa, unidentified
MVKLSYVDVGVDISKKHLDIHLHQTNKTMRMENSKQGLDKLIILLSQYEVGQVACEATGGYERLMCKTLIHANYKVWRIQPRLVRAFIVSEGIKAKTDRIDAKMIALFAFKKQRPYEPIHQSDSNEKLKNLVALKSSLTNKAAQVKTQLKQAYDHDCLKILTKHLNFLKKQISKLEIKISTLIKSDNEFRDKAQQISSIPGVGNGTIAMTLAMLPELGKIGNKQIASLTGVAPYIKQSGNYKGKARIGGGRSQLRRVLYMAALSAIQHNFVLINFYQRLIADGKPFKVAIVAVMRKLIIYMNTLVREKKLWNPAI

SEQ ID NO: 516151 - protein, 362 aa, unidentified
MTEVRSWAGLDVHASKVLAVTVDRESGELCSRRLSGRTSEVVAFCAGLPGPVRVAYEAGPTGFTLARALMDAGIECVIAAPGKIERPAQDRVKTDRRDAERLVRLLMLDGLHAVRVPSTEEEALRDLVRAREDVRGDLMRARHRMGKLLLRHDITFDGPGQNWSVRHREWLGRVELSDRGAQITLLDYLGAIDALIVRREALESAIGELVGGSPWAQTVGRLRCMRGIDTLSAVGLCAEIGDWERFARPGQLMSFLGVVPSEDSSGQTRRQGAITKSGSRHARRLLVEAAWHYRRAPAKGVTLRRRQEGQPPHVIALSWKAQQRLHRTWRRLDADRGKRRTIVAVAVARELAGFCWAIANAD

SEQ ID NO: 516152 - protein, 421 aa, unidentified
MTIDNAIGIDVSMHESTFVGLARPEEVVLRSRLVPHTADALRQIAAEILALPGATAAFCECTGVYHEPVVKALREAGVAIVPLNPLLINKFGGDTLRKVATDKAEAKKIALYGLAWGWKFAPSVAEEPIRATLKAVSRQHAFFTKQKTAQRNHLHALSERMFPGIQSLFSSQDRDDGSVKWVDFLYDFPHADAVGALSLAKFTERYRKWCKKHGYYAVKAGEIHSHAKACIASFPKNADTILIVQTAIKQVNQVAKTVAVYQKRMVELAKLLPEYDVVASIYGCGDSTGPQLMAEIGDVRRFALRKGYKSLVAFAGVSPGDSQSGTYDAASVPIEKRGSPYLRRTLFCAVNAHLMHSPSDEPVYKILDKKRSEGKKWLVFMTAAMNKFLKVYYARVMENFAKLAASEITSDQSAESIGFAV

SEQ ID NO: 516153 - protein, 344 aa, unidentified
MDHTTFGLDIAKNVMQVHWVDGQTGEIGRRSLKRSQLVPFFARQASCRIVLEACGGSHYWGRTLSALGHEVQLIPARQVRPFVRGNKDDAADAQAIWSAAQQPDRRWVPIKSEAQQAVLSLHRVRAQWIKVRTQTVNGLRGLLHEFGVLLPGGRQAGVKTLTTGRAQIDAQVPTLMHGLIDGQLQRLRQIDARIEAIEAQLQGLETQLDSARRVRQIPGVGLLGATALAAVLGEEAKGYRNAREFAACLGLVPCHRGTGGKVVVGHLSKRGDPYLRTLLMHGARSVICRAKTRSAWLEKLLARRPLNVAVAALANKMARTAWALVAHGRAYQAGGAAKAGSSPM

SEQ ID NO: 516154 - protein, 327 aa, unidentified
MLNITRVGVDIAKWVFHVHGVDRKDQAQGRGKYARGKWLDALVKRVPVGAENGMEACASAHYWARELQQRGYRVRLIAAQFVKPYVKSNKNDRVDAEAICEAMGRPQMRFVAVKTIAQQDMRAAHRIREELLGQRTAKANQIRGLVAEYGPIAPKGIQQLRRALPGWLEDAENGLSDAFRVLLADLAGDLRHLDERVASLTAEIERRARQDPVAQRLLTLRGVGPLVASALAGALGDGRAFRRGRDFAASLGLTPRQHSTGGRDRLLGISKRGDSYLRKLLVHGARAVLRHADGRDDGLSRWLLALTARKHVNVAVVALANKTARIA

SEQ ID NO: 516155 - protein, 359 aa, unidentified
MREQRNKISFRGQKIYVGIDVHLKSWSVTVLSETSVLKKFSQHPGPEALYGFLTRSYPGAEYHSVYEAGFCGFWIHERLTALGIDNIVVNPADVPTKSSEKLRKTDTVDSGKLARSLRANELKGIYTPDSVSLEMRSLIRLKNSITKDTTRQKNRLKSQLRYLGIEIPQEFLTPFSNWSKRFFAWLKEIETLTPSGRQALDIHIRHLEELRRQKLEMTRALRTLAKTDRFREPLRLIMSVPGFGQATGMAFLSEICDITRFRNAEQLAAYIGMIPMCHSSGEKDGTGDITIRKHAVMRCNLIEAAWVAVRQDPAMNLFYTEQCKRMPKSKAIVKVARKLVNRLFFVLKHQTEYVNSIVS

SEQ ID NO: 516156 - protein, 338 aa, unidentified
MEVYAGLDLHSTNTYVAMIDGENKVLYKQRHKNEVPAILSALDPFKRDIKGVVVESTYNWYWLVDGLMDAGYRVHLANVSAIKQYEGLKQIDDKRSSLWLANLLRLNILPTGYIYPKEERPTRDLLRKRLHLVRHRTSHILSVKNILARNLGVRMKSDEVKKLTAPEVKRLFPDKEMRVAVMASVGLIGHLEEEIDGIEKLITKKLRIREEFIKLLTLPGIGQILGLTIMLEVGHIDRFPTVGDYSSYCRCVKSTRTSNGKVTGYGNRKNGNKYLSWAYVEAAQFARRFHEAVRTYYEKKMGRTNRIVAIKAVSHKLARASYYIMRDGVGYDQARLFG

SEQ ID NO: 516157 - protein, 388 aa, unidentified
MHPTGPCPEQDPPRDRHHQATLYASLELSRSTWLVTSLAPGDRKMSKHSVAAGDGAALLALLARLRGRVERSAGGPVGVVVVQEAGRDGFWLHRLLEAEGVESHVVDPASIAVPRRQRRAKTDAIDGETLLRTLLAWRRGEPRVCAMVRPPSPGEEDRRRTSRERGTLLEERVRHTNRIKGLLATQGVYDFEPLRPDRLERLGALVTGDGRPLPDRLRAELRRELERLELLRRQIAEVEAERDAAAAAESEAGPSPVALLAGLKAIGPQTAAVLYHEGLYRSFANRREVAAYAGLAPTPWRSGKVAREQGISKAGNPRLRHAMVELAWLWVRHQPESAPSRWFRARVGQERGRVRRVAIVALARRLLVALWRYLAHGEVPEGAVLKAA

SEQ ID NO: 516158 - protein, 346 aa, unidentified
MEHYVGLDVSLKLTSICIVDRTGKVEREGAVASDPEAIATFIKLHAPHVVRIGLETGATSTWLWTELNKIGLPVICIDARHAKAVLKMQINKSDRNDAAGIARIMQCGWYKEVCVKDLDSHATKALLVSRALLVKIKRDIENQIRGLLKNLGLVIGRAKMNMFAVRAAQLAEDRSELFAAVDPLLKAREAVEQQIVDLDRKVLRLARNNAQVRRFMTTPGIGPVTALCFLATIDDPARFKRSRSVGAYAGLTTRRYASGEIDWTGRISKCGDKMLRSYLYEAANVLLTRVAKWSALKAWGIRLAKRSGLRKAKVAVARKLAVILHRMWIDGTEFKWSSNDAANQPA

SEQ ID NO: 516159 - protein, 423 aa, unidentified
MKKRIYRRMPVNDFQLDSIAPADLGGKLVFAIDVAKVDMVAAIAAADGRVLQTLCWKAPEENSRVLAILRHFRIAGLAVEAVMEPSGTYGDVLRRQLELDAFPVFVVSGKRTHDACEIFDGVPSLHDAKAAAIIARLHADGLSTRLRDEGPERRQLRAALAIMDLHQERYLQLVHRLESWLARHWPELPMLIELTSSSLMALLARIGGPADVAAAPDQASKLLRGISHRLLADDQVAAVIASAHASVGVPLVGLERDALMAIADDAYRAHRAFATAKTQVDALAATTPAAALAPVVGHTTAAAVFAEVGDARSFSCTRAFLKAMGLNLKEKSSGTVQGQLKITKRGPSRVRQYLWLAAFRWIQKDPIANAWYQRKKQRDGGRASRAAVALMRKLAKALYHVGRGATFDSSKLFDVRRLQLSDG

SEQ ID NO: 516160 - protein, 340 aa, unidentified
MNVTTYGLDVAKRVFQLYWVDAQSGEILNRRFGREELIGFLAKRPAGRVALEACGSAHWWARKIVALGHEVVLLHAKFIRPFVQTNKTDAADARAIWTAAHQPGMRTVAAKSEDQQAMLAVHRMRALLVKFRTMQINQLRGLLYEFGVTFRSGRKAGLAEMRMRMAQLEEALPGALLSGLQDQLQRIDVLQSDIETLEERIGAWNKQEAACRAIAQVPGIGRLTATALVATMGQAQAFKSGREFAAFLGLVPRQSGTGGKVRLGSISKRGDPYLRTLLIHGARAVMTHAKAPSAWQTQVAARRPANVAAVAMANKMARTAWAILAHGRAYQRDYVSVRPT

SEQ ID NO: 516161 - protein, 282 aa, unidentified
MPAQSKAAKPCAQIAVIGIDIGKNVFHLIGLDKCGAIVLKAKCSRGQLENRLANLPPCLIGMEACVGSHHLSRRLIALGHDARLMPAQYVKPFLKGHKNDYRDAEASAEAVQRPTMRFVAAKTEEQLDLQALHRVRARLVAERTATINQIRAFLLERGIAMAQGIHRLRKALPDILAKATDALSPRMTRIIEALAADWRRRDERVEEVSTEIEMLARKEAPCQRLMTVPGIGPLISSATVATIGAGDLFSKGRDFSAWLGIVPKQLSTGGRTILGKISKRGN

SEQ ID NO: 516162 - protein, 346 aa, unidentified
MMIIGCDFHPSWQQVSWVDTETGDSGERKLVHATGDAKQFYQQLAAPALIGMEATGNSQWFIELVEDLGHAIWIGDAAQIRASYVRKQKTDKRDAAHILKLVVEGRFPRLWTPDREQRDLRQLVLHRHKLVMIRSRVKNELQHLSMNKGMQKKRTLWSQAGQKLLRELPLKPWAACRREDLLGLLAMLNEQIGKLDTAVQNGAEQNPQSRLLMTQPGVGPNTALAYVLTIGDVSRFRRGKQVASYLGLIPREESSGGRQKLGAITKQGNRMLRSLLVEAAQTAVQRDPGFRKQYLHRCHQKPKAVAKVAAARKLAVRLYWMLRSQVGYPEIVRIESSSGLALVGAS

SEQ ID NO: 516163 - protein, 423 aa, unidentified
MNTETLNLAAYVGLDWADQAHAVCLQAATSPTREHAMLAQQPEALAAWAQALRVRFGGQLVGVCLEQSRGPVVYALSAHPWLVLFPVNPKSLAAFRQAFHPSRCKDDPTDAELLCELLGKHQAQLTPWRADDPATRTLRGLLEQRDKLVDDRTRLSHRLRATLKQAFPQALDWAGDVTKPLCWAFLLQWPSLAALQQASVTKLRAFGRERRLRRGDWAGTLVAQARAAQPLTTDEAVLTPALAFITTLCRQLQVVEAGITAHVQQIAPLFAAHPDRALFTGLPGAGPVVGPRLLVAFGSDRTRYADAQALQQYSGIAPVVERSGRQCWTHWRWAAAPFLRQSFHEFAQHSLARSAWARAYYQLQRQRGKSRTAALRALAFKWIRVLYRCWQSRTPYDEARYLAALRQHHAPLVALLPQPQEAA

SEQ ID NO: 516164 - protein, 353 aa, unidentified
MLAELVHHVIGVDPDRDWITLAVVDAHTTGVTAHDRFPATAVGYAEAVEFVDGHSVDTERAWAIEGTASYGCGLSVALSRLGEWVIEFDRPTRKTKDGAKSDHLDAVRAARETLGRDRLSEPRAHQGAREAIRVHAVTRAGAVRARTAAINELKAMIVSADEELRGSLRGLRTSQQVARCARFRERASMSIEGRGTRLSMRALARRIEHLNDEIDDHDRALKALLDDTAPQLLTERGIGYITAAAFYLAWSHPGRCRSEAAFARLGGTSPVEATSGQKQTCHRLNRGGDRQLNRALYLVAVTRRRCDPATRAYIARRAADGISERFAIRCLKRFIARRVWRLLEHPESVLDKT

SEQ ID NO: 516165 - protein, 430 aa, unidentified
MEIVYPRACGVDVHKSFIVAVICISESIKPRYIKKRFSTFNNQLIQFRDWLIENNCHNVCMESTGKYYIPVYNTLEGHIPNVVVANPKWVKAIKGEKDDNKDAKWIADLFKFGIVRSSYIPKKDIRILREFTRYQYKLVNIRSSEKNRFQNALTVGNCKLDLVFTDVFGKSASSIVDTILSDEPYTSEDILSKVHGKCKSSTEDILSAVEGTDLNHFQKERIKIVQKHMKQLDSLLDEVQHHIDMMVLAYEDYIQLLMTIPGVSRKSAIIIISELGIDVSQWSSARKLAAWAGLAPGRNESAGKKKSVKISKAGIYLKPCLVQVAHAAVKDKSCSYYAEKFGRISKRRGKKRAIIAIARKILVAIYHILKTGEVFNPSDMADVETTKEDRIAYITNNFRNAFNQLSRTGLSEEEILSIIIKKSDNSPQTE

SEQ ID NO: 516166 - protein, 348 aa, unidentified
MNTTHAIDTTYTPQELLCVGLDVSRDTLDVCLLRPNTKPLHKQFANDEAGFALLLKWTQSQASQAQAPQGRAHFCLEATGSYSTGIALYLAHHEQPVSVVNPARIRFFGLCQRQSNKTDKADAALIALFCQRERPALWRAAAPHVQLLLALVRHLHALSELVTQEQNRLAAPAQPETVVDSLRRTLAFLHEETKSVQAQIRAHIKSHDQLKRDAQLLQSIPGIGEKTTWDILAELPDITLFDSAQSVAAYAGLAPREHRSGSSVRKQTRLSKGGNSRLRRALYFPAVTGLTWNPLIKSFYDRLREAGKGKMVALAACMRKRLMIVYGVLKHQTPFDPAWHSQSQSTPS

SEQ ID NO: 516167 - protein, 321 aa, unidentified
MKIKNLVGVDTHKDSLACFCNGKFKEFKTNKVGFKQAINWAKSSHWAIEGAYCFGQAFSNFLIKNGCEVYEINPLLTKSWRTALKVASPKNDFGDAKVISIFANMDNMNKVSFETIKLKEKLTTRKALIKQKTQITNHLKMLFYTRGEELPFKALDTPKAINWMLEQDDVIVKTNGKILEITMAGIKSLEEEIEKEMPEPAKALTKMEGISTITACTIYAETKGKLTSKEQFASYCGVAPVDCSSGQTTRMRNNKGGNRVLNSIFYSLSIAQKRYNKKAKAYYEKKLSEGKSPRHARKCLARQLTNIVFKMLKDATEKRKP

SEQ ID NO: 516168 - protein, 413 aa, unidentified
MTPHLQQRGFTCILKFEQNKGNRDYRIQKEITHMKRILKIGMDVHTTNYTLCAMEPVIGEEDRVFATIKVTPDYKNILMFIENLKQKLGLNYEYDIQCGYEAGCLGYSLYNQLKAVGVKCVILAPTTMFAPQGVRIKTDTRDAHMIAHCLSYGTYRAVYIPTEEDDSVKEYLRMRNDHKLALKKIKQQINAFCTRHGFCYTGTKWTQVHLKWLKNLEINNTLYREVMNEYMISYEEQALKIERFDKRIEEIASQTKYQEKVKRLGCFLGIKTHTALSLIVETGDFERFAKGNQYAAYLGLTPGEYSSSTNVNRLGITKAGNSHLRQLLIEAAGGICKGAVGHKSKALQARQNGNPADVIAYADKANIRLRSRYYKFIRREKKRNVAVAAIARELACFVWGMMTNKIEIRTATA

SEQ ID NO: 516169 - protein, 344 aa, unidentified
MSKQVVRGGDVAELLERFARLREKARARTGKVFPFVVIQEAGLDGFWIDRALQNEGIESHVVDPASIATSRRRRRAKTDGIDGEALVRALLAYKRGEPRVCAMVKAPTPEEEDRRRLCRERKVLIGERVQHVNRVKGLLFSQGISGYEPLRRDRREQLDTLQTGDGRLLPDHLKAQVCRELDRLELLLEQIKAVEAERDVLLAAQQVAAPAPAAMLLDIKGIGPEFAAILWSEGLFRHFDNRRQVASYAGLAPTPWQSGSVDREQGVSKTGNPRLRTTLIQLAWLWLRHQPQSALTLWFEERVRRNGGRLKKTTIVALARKLLVALWKYVTAGVVIEGAVMKRT

SEQ ID NO: 516170 - protein, 336 aa, unidentified
MRRPKDKLIAGLDLHGNNVMIGVMNQDGKRVAHRKVSCDLKEVIEFVEPLKSQLQSMAVESTFNWYWLVDGLRRQGYPIDLANPAKIQQYDGIKHADDKNDAFHLAELQRLKILPKAYVYDPEIRPVRDLLRRRTSLVHQRTSLLLSFKSLYARTHGQALDLADAKKMEPKEAPKLYEHPANQLIAQVQCEHMRAYDQSISRIEKAVLGYAREIPMYEKLLTVPGIGKILGMTITMEVGNIERFKTDGDFASYCRMVDAKHLSNGKCKAENNQKCGNKYLSWAFVEAANFARRYDQPCRRWYDRKAAKTNKVLATKAPGMQIVQGGLARDGQAVRL

SEQ ID NO: 516171 - protein, 338 aa, unidentified
MRKFIGIDLHSNNSVVVVADEDDRVVYQKRLPNNLEAIAAALAPHRDEAVGVVIESTYNWYWLVDGLMEAGYRVHLAHPAAIKKYEGLKHSGDFADAAYLAQLLRLGLLAEGYIYPREQRGARDLARKRMQLVRYRTAQVLSIEGILMRQTGSRLKGEAVKRLTAEQVDEFGFARDVALALEANRAVSQALGQQIEVLEKRLKERVSLRPEYRLLKTVPGIGETLATTIMLETGSIGRFARVGNFSSYCRCVDSVRESNGKKKGEGNTRNGNKYLSWAFVEAANFALRYCPQARSFYDRKKSRTNRIVALKALAHKLARACYHMLREQQPFDVNRCFA

SEQ ID NO: 516172 - protein, 341 aa, unidentified
MYYTGCDAHKKNCTLQHIDDDGALGLSMNVATNSEALDTFLNKLDAPTVVTFEASRSYWWLHQYFSKHPKVSRVVVVDPFRSRKIAEELSVQRGYGRAKNDRIDSEMLAEQTRLGLASGIRVPTAEQLEMRTACRHRFELVHRRTVSSNLIHSTLSMHGHAIALKELINNQDSKKRLYEQLPEYVKLIIEDFIAQIDLLNKQISECERLIAKLLPPSHPQIKLLMTAPGFGPVCSTILYTEIFDIAYFKAPKYLISYSGLAPVEQESAGKRGKVKLNRHCNYYLKYAFMVAAHAARTHPRYRRKYEQDVKKHGKTQAKINLARRLAKAIYWMLNRQQPYKF

SEQ ID NO: 516173 - protein, 356 aa, unidentified
MSEGSWVGLDVHARSVVAGVIDQGSGEVRSLRLPPGGEVTVAWLQTLPAPVRVVYEAGPTGYRLARACTEAGISCVVAAPSRIRAATDRVKTDRRDAERLARLLRLGEITPVRVPAPEEEAARDLVRAREDARGDLMRARHRLSKLLLRHGLVYDATAWTRTHDAWLRRQRFHGGPLAIVFDECYGRMLDAKSRRDALDKAITELAATPPYVNVVGRLVCLRGVSTLTAFALTVELGDWTRFRPESLGPFLGLTPSEHSSGERRRQGGITKTGNSNARRLLIEAAWHQRRPPRRSVTLERRRTGKPQVVQAQAERSARRLHGRWHALEARGKPRSIVVVAVARELAGHCWALATME

SEQ ID NO: 516174 - protein, 485 aa, unidentified
MSYRNVGIDLSVTAKHEAQVRDEQGNKIVSNFSFYLSKDRLDALSQEALKGACQGTKLRFMCEPAEMSWFPLAIYAKNNNHEIVRVKSHKTHDLRKYFTRHKKNDKLDANVLTVMPMIDSKAIEEIYLPDAQIFALERRNRQKETITSQITAIKNRLSSLYHWVMPGLLDCFENHFDSRAREFYRHFSNPFTAKDAGVCGIRKVLQPAGRQKMKNDLPEKLYSVACSACELYSRASDHVDFTEIQDEVHIELQLLEAQEEALVYVKERIESLYERVHPSKNIESLKGISENLGPSLIGIIGDPNRFSSQSKLRCFSGMIPKQDDSGETNKKGLSMTQEGPSRLRRDLFLAGDVARQWDPQLAKIYYEEMVNKGHCHTQAVCAVGTHLLNRVLCVLKENRPYELRDPKGNPISPREAKQMIKEQFTVPEEIRQRTRSKRNRKNRKNKKEERIRNLFKRQLNAPQNSYNIPPRNMLQNFEKFFKSIS

SEQ ID NO: 516175 - protein, 416 aa, unidentified
MLELTRRLFVGIDWGTETHHVCVVGSDALVVEDRKVRQSAEGLAELVRWLSALAGNSMSSVVVGIEVPHGAVVEVLLEYGFEVFSINPKQLDRFRDRYFPAGAKDDSRDAFVLADSLRTDQHCFRAIRVSDPSIIRLRELSRLDEELSFCFQRHCAQLRQQLQRFFPHVLGLSQTADEPWIWALLELAPTPGKAAKLTLKRIEKLLRECKIRRIEAAEVAAVLRGPAFSLSAGTVEAASEHVLMLLPHLRLLHQQRSALAARIEHVFDELSATGESQPPSDVQVLLSLPGVGRIVTATLLSEAPHLIAERDYHGLRAHAGVAPVTRQSGKRAAVLMRRGCNVRLRNALFHWSRVSMQNDPRSREHYHRLRAKGHTHGRALRGLADRLLALLCAMLKSQTVFDPVRRQSLTSSANST

SEQ ID NO: 516176 - protein, 389 aa, unidentified
MDYRKTTAPTVMSDVATLYVALELSLRTWLVALRSSASDKVSLKPLPAGDQAALFALIDRMQAELYAAGHREVRVVSCYEAGRDGFWLHRRLVEHGVESLVVDAASVAVPQHARRRKTDRLDVRVLLRELMALMRHESDCRVLRVPTPEDEDERQLGRERQQLVSERVAHVNRIKGLLALHGIVDYQPLRRDRRERLAELRTALNKPLERRFAARIVRELERLEGVMAQLKQVEAERDAIAANPPPDDVNAAKIVRLARLKSIANETATVFTREVYHRRFEGGRQVGAFTGFDGSPWRSGQMNREQGISKRGNRRVRALAVEAAQRWVRQQPDSALSQWFLRRVGATKGAYKRKMIVALARKLMVALWRYLETGLVPTGAVLKPEAARA

SEQ ID NO: 516177 - protein, 376 aa, unidentified
MKYFIGLDVSMKDTNACIVNELGKIIQEGVMTTDPQSIKHYIDQSRLPIEKIALESGCLSTWLAKSLIKEGLPVVCIDARHVSTFLKLKINKTDKNDARGIAEALRCNIVKEIHLESNNSVEKSSLVGTREYFSSQKTCVTNTIRGLFKAYGIRLVGSATTASNKATASFLAHAEKEAQNLNDIAKFSLLELISCARTLHEKFKEFDKKIAEITKDDSEVQLLKTAPGVGNLTALIYTMIIDDPSRFKKSRLVGAYLGMTPKEYSSGEISYKGRISKCGPGSLRRLLRQSGSFILTRSKKNSKLKIWGLKLKKKIGRQKASLAVGRKLATIMHKMLLTGKEFEFEEEKELESEIRKLNKKSAKIKQLVKRKTKKVV

SEQ ID NO: 516178 - protein, 334 aa, unidentified
MENIALIGIDLGKNSFHIHCQDRRGKAVYRKKFTRPKLIEFLATCPATTIAMEACGGSHFMARKLEELGHSPKLISPQFVRPFVKSNKNDFVDAEAICEAASRPSMRFVQPRTESQQAMRALHRVRESLVQDKVKTTNQMHAFLLEFGISVPRGAAVISRLSTLLEDSSLPLYLSQLLLKLQQHYHYLVEQIKDLESQLKRKLDEDEVGQRLLSIPCVGTLTASTISTEIGDGKQYASSRDFAAATGLVPRQYSTGGRTTLLGISKRGNKKIRTLLVQCARVFIQKLEHQSGKLADWVRDLLCRKSNFVVTCALANKLARIAWALTARQQTYVA

SEQ ID NO: 516179 - protein, 464 aa, unidentified
MSDKHPFRTPRPRRSPSLLKRINPDAGGVDCGSAEHYVAVPVDRDEVSVRAFKTFTGDLHRLADWLIRCGVTTVAMEATGVYWLPLYEILEARGLEVVLVNARHVKNVPGRKSDVSDCEWLQELHSVGLLRGSFRPAAHIATLRSYLRHRESLVRSAVTVMNRMEKALLQMNLQLHLVISDLAGATGLRILRDIVSGERDPQRLATHRDVRCKASEDEIVAALTGHYRTEHVFALRQNLELFDVCQQQIQACDHEIEKVLRELASQSSAPDAPLPPRRTKSRTKNEPRFDMRAPLHQITGIDLAQIDAIAPYTALRLVAEIGTDMSRWPTQHHFTSWVTLAPRNRISGGRLLGSGARPAPNRAAMIFRLAAVSVGRTQTALGAFYRRLAYRIGRAKAVTATARKLAILVYRCLKGEIVYQDPGQATYDARYRASVIRRLRQRAESLGLALVERTTNGPLVDGVS

SEQ ID NO: 516180 - protein, 411 aa, unidentified
MDVLYERCAGIDVHKKMVVVCLITPDATGTPTKETRTYGTMTADLLEMMDWLTDAGCTHVAMESTGVFWKPLYNLMEGTLEVLVVNAAHMKNVPGRKTDVKDAEWIADLLRLGLLRASFIPDRPQRELRELTRYRTSLLHERSAEVNRLQKTLEGANIKLSSVATDIMGKSGRDMLAALVAGRSDAAALAQLARGKLREKLPQLEKALRGQFAAHQRFLVAQQLAHIDGLDEIIERVSAEIAERVQPFEEAIEQVDTVTGIGRRTAEVLVAEVGTDLTRFRTSGHLASWAGLCPGNNESAGKHHGGKTRKGSPWLRAALVEAAKAAGRSKKTYLGAQYRRIAARRGAKRAAVAVAHSILVIVYHILTRHEPYHDLGVTYFDERDRQAVERRLVKRLQALGYDVSLRPLAAA

SEQ ID NO: 516181 - protein, 420 aa, unidentified
MKVVYQTCCGVDVHKSFLVATIIKTTSGVEPSYQKKRFSTFNNSILQFKEWLVKNQCRDVCMESTGKYWVPVFNLLEDEINITIANPKWVKAVKGNKDDTKDSKWIGDLFRLGLVPGSYIPCKPIRILREFTRNRYKLTSCRTSEKNRYQNALTVCNVALDSVVFDIFGKSATSVIDYLIEQPDNSINHEEIASRLLRSLKKKSDSVIESIEGYQMTDSQKNRMRLIRAHLDYITSTINDIDTMLNSLIAPYENAVQLLCTIPGVDRNSAITVISEIGTDMTPFSNSKRLCCWAGLTPDNNESAGKKKSVRITRAGVYLKPALVQVAHAAVKSDKSPYYKQKYERIMKRRGKKRAIIAIARMILTAIYQMLSTGEAWNPTDLFKIDMPEPMKEKQKEKAIKQAMKLLIREGKISESQLAS

SEQ ID NO: 516182 - protein, 344 aa, unidentified
MDKSITVIGLDLAKSVFQVHGINAEGEVVVRRKLSRSRVLAYFNQLDPCLVGMEACATAHYWGRELKALGHEVKLMPPQFVKPYLKSQKNDMRDAEAICEAVTRPTMRFVPIKTPDQQALLALHGVRDHWVRLSTRLINTLRGYLAEFGIVAARGRMGVEAILDTLADDQDDRIPDLARECLMPLANELRHVKQQILETDRKILKAHRANSICQRLDTIPGVGPVIATRVVAEVPDPRVFKSGRAFSAWGGLVPIQESSGVRDRMVRITKSGNPELRRLLVAGAMSMIIRAKQLGFTKHPWLSRLLERKPMMVVAIAMANKIGRMIWALMVKGEKFNPAKLMPA

SEQ ID NO: 516183 - protein, 325 aa, unidentified
MFYLGIDVSKAKLDCMLFEASSQKKKSKVVANSAAGFKQLLEWLAKHGAADAHVVMEPTGVYHENCAMALSDAGMPVTLVNPARIRDYAKGTGYKNKTDKVDSAVLAQFGAKENPPLWQPPSLEARVLKALLVRRDAIAEDLQREINRKEKAESTVTPAPITRSIEDAIAFLESELAKLQKMIDDHIDSNPDLKEMRRLLETIPGVGPRVSAHVTSLFAAKKFKRAEHLSCYLGLAPVIKESGTSVRGKPQMSKAGPGHLRKLLYMPAVVATRFNPHIRAMYERLLARGKPKMSALGAAMRKLAHLCFGVVSSGKPYDGNFAHQA

SEQ ID NO: 516184 - protein, 419 aa, unidentified
MRNGNTKKVKRINEETLLVTIDMGKVKHTGYYRFPDGAEGKIFEFSSSRNGFEDLWQRVCHAKRSRNLTEIVVGFESTGPYAEPLLHFLRKRDVGLVQVNPFHTKRLKELQGNSPSKTDQKDPKVIADIIELGHALTVIIPEGAAAELRRLTQARERGIQRRSMLMSQVQDLVFLIFPEFMPVMKDITIKSTQYLLKHYPRPQDVVEAGVKLLTQSLKKVSRGKLGKQRAEALYQAAEASVGLREGQESIVIEIKEIISAIEHIERYVKELEKHMSKHLKDISYSRFILSIKGIGEITTAGLIGEIGDFRGYHTIAEVIKHAGLDLFEISSGKHKGKRRISKRGRPLLRKLLFFASINVVRKGGILHQQYLQHLNKGMPKVKALIAISRKLLSIIFALVRDHSVYIAQYSERQQLKEAA

SEQ ID NO: 516185 - protein, 337 aa, unidentified
MTKITLIGIDTAKHVFHLVGIDAKGHYVWRKKLRRTQLLSTLAKLEACEVVLEACAASHHWARRIGESGHRVRLIAPQHVTPFRRGQKNDYRDAEAILSATLSPGMHFVGIKRVDQQSEQALHRVRSRLMSHRTAAANGLRGLLGEYGQAYRKGIKSLREGARCFAGTELARELGLVELIEDVLEEIQTLGQRADDYEQQIKQRVKTDAISARLRQELSGVGPLSASALRVKVADVREFRNGRNFAAYLGMAPAHRGTGGKVRIGKLKRGHDRYLRQLLIHGARSVVSHLGNKQDAQSRWLRELVSRRGTNIASVALAHKNARQAWAILAQEQRLQA

SEQ ID NO: 516186 - protein, 411 aa, unidentified
MDKVYDKCCGIDLHKKLIVACFKQGNRQEIRDFGATTRELLEMADWLKEGGCEMVAMESTASYWKPLYNILETCELKAMVVNAQHMKAVPGRKTDVKDAEWIADLLQHGLLTASYIPDKDQRELRELVRYRKSLVGERARELNRLQKMLEGANIKISGTIRDINGKSARNILEHLLSGKQIDSAEYDILYEKKVIAHNLKATKEQIIDDLNGVMSALQKKMMRILLNHLDELNAHIRELDDDIDNFMKPEEKEAAKVIQDIPGIGNTGAQAIISVIGADMSRFPTDAHIASWAGLCPGNNKSANKRKSGKTRKGNGLLRDTLIVCAHSAVKNKSSYFHAQFARISAHRGSKRAYVAVAHSMLVAIYHILKEGVVFKDLGADYYNQFNRERKINAYLKKLKALGWEVPVVAA

SEQ ID NO: 516187 - protein, 297 aa, unidentified
MSDSVFIGIDVSSQTLEIASSDQAKTWQVANDTSGIEQLVSQASALAPGLVVLEATGGYEFEAACALQAAGLAVAVVNPRTARDFARAMGALAKTDALDARMLAAFARVLHQHPERERFVKPLADAELQQLQALVLRRRQLVQMLTSERQRLRLAHAAARPSIERVIEFLKKELGDSEAEVAAHVQRHHAQLAQALASVPGIGAASVSVLLAELPELGKLDRRRIAALVGVAPLNRDSGQMRGQRSIWGGRADVRRTLYMATLTAVRYNPALKICYERLLAAGKRKKVALVACMRSC

SEQ ID NO: 516188 - protein, 419 aa, unidentified
MSFKIIKNNCCGLDVHKTWIFACIGITDSSNRTEYKQARFSSFTKGLNELCDWLAKYNCKDVCMESTGKYWIPVFNILEQRNLWVTLSHPKYTKPMKGNKTDRKDAKWICDLYMCGMVKPSFIPPADIRELRDLVRYRFKLTCMITGEKNRAQNCLTVSNLKLDDVFSDVFGKSSRSITEQILQHPGETFDVAPFVDGRCKTPIVEIQAAIDGAISKEQAVKLRQCLDHIDELNKHISEVEQEILRLSEKYEAALNLIRTVPGFDKNPLTAIQVLSEIGGDMSVFPTAKHLVSWAGCCPRNDQSNQKIKSTRISRAGSYFKPVLVQVANALIKSKKHSEFTNRYKRIKARRGHKKAIIAICRMILTAIWHILSDLKPYTPEGFLESRPVKDEKVLSTSQALNLLKQRGYIIKDEPLAVS

SEQ ID NO: 516189 - protein, 321 aa, unidentified
MRSIGIDAHRDFCEIAIAEAGAVRAAGRVATDPKMLALFAQSLSPSDEVAIEATANALAIARILEPHVRRVVLVNPKAVRETARRAKTDRIDAKALAQLLAVGFFDRVWAPDEAARARRRLVSRRGMLVRQRTREKNQIHAALHRNLVSRAPVSDLFGVKGRRWLDEQVPRLPLDEQLTVAGCRRQLEVIEGEIAALDRVLAGDALSDPDALRLMTLPGVGPVTAIALLGAIGDVGRFATPRHLVGYLGLDPRVRQSGNEPAKHGRISKQGPGEVMIAAKLRFLDHITALEVATSINEFEDRVREKLPDVKWQFIEPDVAA

SEQ ID NO: 516190 - protein, 422 aa, unidentified
MKKRIYRRMPVNDFQHQTIALDELGGRLVFAIDVAKVDMVAAFAAADGRVLHIVCWKAPAENLIVLDILRGFRAQGVAVEVVMEPSGTYGDVLCHQLVQDGFAVFMVSGKRTHDAREMYDGVPSLHDAKAAAIIARLHAEGLSKPLRDEVPERRQLRAALAIMDLHQERYLQLAHRLEGWLARHWPELPTLIELTSSSLMALLARIGGPGDVAAAPERARRLLLGISHRLMPDDKVAAVIASATASVGVPLVGLERDALMAIAADAYRAHRAFATAKTKVDQLAARTPAVTLAPAVGHTTAAGVYAEVGDARSFSCTRAFLKAMGLNLKEKSSGTQQGQRKITKRGPSRVRGYLWLAVFRWIQNDPIANAWYQRKKQRDGGKGSRAAVALMRKLAKALYHVARGATFDSRKLFDTSRLQLPS

SEQ ID NO: 516191 - protein, 408 aa, unidentified
MKLLVGIDVSSEKLDSCFLDSEDQVLLEESLPNTIAGASQIKAHILKFNESVHYDRIIVGMEATSVYSFHPSTFLAEDQDLKALKVEVVVMNPKAIHRFKGLFDEDKTDQIDAYRIADFLRFDRFNVSLLKEEQYMALQRLTRSRYQLICQLTEMKQHFLENLYYKCNTLTKEVDTSVFGSTMMDLLTDSMSLDEIAAMPLEDLAAFLQEKGRGRFSDPDKLAKSISKAIKGSYRLGKMMQNSVDVVLASYAMMIRTLKKEIQALDKAIQNLITTIPESKSLLSIPGIGPVYAAGILAELGQIERFEDEAKIAKYAGLYWKRKQSGNFESERTVITKTGNHYLRYYLVEAAGSVMRNEPVYREYYLKKYHEVPKHQHKRALVLTARKLVRMVDVLLRNHQLYAPERSV

SEQ ID NO: 516192 - protein, 313 aa, unidentified
MTPCGVGIDVSKATLDVAWSTDPTARWQTTNDDVGWTALVAHVRALQPTVIVLEATGGYEIGAATALSMAALPVAIVNPRQVRDFAKALGLLEKTDALDAAVLATFAARIQPTPRPLPDDFQADLQALVTRRRQLVDMLTAERNREPLARGAVRKNVVAHIAWLEKQLGKTDRDLRTQIEASPIWRARDQLLQSVPGIGPATSARLLASLPELGTLTHRQISKLVGVAPLPDDSGRRSGYRRVQGGRGDVRSALYMATVTAVTHNPTIRVAYRRWRAAGKLPKVALVAAMHKLLIHLNAMLKRHTPWQPPAIP

SEQ ID NO: 516193 - protein, 357 aa, unidentified
MKDLTINTTSVTIGIDLGDRYCRLCILDTSGEILEEGRITTTETALRRRFQNTERVRIVMEVGTHSPWVSRLLADLGHEVIVANPRKLRLIYENDSKNDQVDAEYLARIGRLDPGLLAPIQHRQLDTQADLAMIRSRDMLVRTRARLVNHVRGSVKAVGGRIPKCSTESFAEKAAASIPDTLESPLSAILDMIEIINQKIEYFDNRIAELADDKYPETELLQQISGVGPITALTYMLTIEDPYRFRKSREVGSYLGLRPRQGDSGDMQPQLRITKSGDRMTRRLLVQSAHYILGRFGPDSDLRRWGLALAERGGKNAKKRAVVAVARKLAVLLHHLWITGEVYEPLFNTQKESARAA

SEQ ID NO: 516194 - protein, 343 aa, unidentified
MENIGIDVHKNQSQLCILTDDAELIEKRIRTDRARFAAVLGIRPPARILIEASTESEWVARCLEAQGHEVIVADPNYAPMYAQRSRKIKTDRRDARALAEACRIKAYRRAHRTTDERRHVRGRLAVRESLVQTRTKYISLVRSLLRREGLRVRPGSSASFRERVGEIEIPKHLQREIAPILKLMIPLNRQIERATKDVEKIAHKDPAVRRLCTAPGVGPVTAASFVATIDTPERFQGAHQVEAYLGLVPRELSSGEKQRKGHITKAGNRRTRCLLVEASWALLRTQRPGVAPLRDWTERLAGRRGKRVAVVALARKLAGILYAMMRDETEFEDERWTKRGEGV

SEQ ID NO: 516195 - protein, 320 aa, unidentified
MNKIIRIGMDTSKHVFQLHGVNTEDKPVLRKKMRRKEMIDFFTTCPPTLIAIEACGGSHHWARLLASFGHEVKMIAPQLAKPYVKPNKNDAADAEGLCEAMSRPTMRFVPVKTVDEQAALMLISVRTRLIANRTQLANAIRGYANEFGISAAKGLAHIPMLLERVQVEKTVPELAQELFISQAEEYAELEKRIADVEAKVKAWQRNDERSIRLNTIPGIGPIGSALLIMKTPAPELFKSGRQFAAWIGLTPKDHSTGGKLRLGGITRAGDEALRAILVNGATAVIHHARRSGKASRWLAELLKRKPPNWQLSHSLTKWRA

SEQ ID NO: 516196 - protein, 373 aa, unidentified
MSNCTRYLGLDVHAESISAAIAEGRGKVRSLGKFPNRPEPMRKLIEKLGGPQGLKVCYEAGPTGYALYWQLTKLGVDCEVIAPSLIPKKAGDKVKTDRRDAEKLAQSYQAGDLTPVWVPTPEHEALRDLVRQRGAAKADESRAKHRLVKHLLRRGLRSPDESGAWTHPWWRWVQALKFDHEAQQVAFADCIAEVLHMGERLDRLDKAIDRLVLSAPPHMRAVIEALQALRGVAKLTAVTIVTEVGTFKRFRRPTEMMGYTGFVPSEYSSGARESKGRCTRAGNAHLRHVLGEAAWHSRHRPWLNLRMKKLLPSLPAGVAEIAWKAQERLHRKFTRMTYCRKPAGKVAAAVAREMVGFVWAIGTLVESQQPAKK

SEQ ID NO: 516197 - protein, 367 aa, unidentified
MKQQTSATTETGIKGRNIIDFTGKTIYVGIDVHQKDYQVAKVLNGFCLGNHRMESNREKLIEHLKSHYPGATFKCVYESCAWGFTLQRTLQASGMECIVVHAADVSTTDKEKRRKTDKVDALKLAHGYASGSLKGIHVPNEETQKDRSLIRYRKQLTGDINRSKNRLKSLLKYQGIDLPPQYAGNNWSRNFLNWVEQQAEKDALLKETLMLLLEQIKLLRQLLLKTERQLREMRKTKYAQKADLACSVAGIGPTTAMLFLLETGDINRFKGFDSLNDFVGLCPDTDSSGDVRRDRGITTRRHKQLRSALIEAAWQAIKTDPALMDSYQTLLKRMKGTQAIIRIARKLLRRLRAVLLSGRPYQKGVIA

SEQ ID NO: 516198 - protein, 321 aa, unidentified
MQTNSNMKKCPVEQIIGIDLAKRVFQVHIVSAQGDKKVNKMITREKLLAFIAQQPSSRIVMEACGSANDWTRQFSHYGHEVKQISPQYVAPFRMGSKNDKNDAVAIVEADSRPGMRYVPEKSLEQQDIQCLHRVRQRLMKNKTALINQIRGLGLEYGIAMPEGAHKITACLPGYPEDAENDLTTLSRQLFHEMLQELQGNQQRIKELDVRLAHISQQNADTHRLESIPGTGPLGASALTVALGDSRDFQNGRHFASYLGLVPKEHSSGGKVRLPGITKRGDGYLRGLLIHGARSIVYRAVNLPEERCGGLQRWLKGITARG

SEQ ID NO: 516199 - protein, 417 aa, unidentified
MNTYNKFTKIGEKTLIVGIDIGKETHYGFMRTLSIEDFKAFTFKNTSEGFNTLLNRIVDFKKRHQIENVIVAFESTGNYWIPFANYMKNQKDYTLLQVNSKHTKRFKDITDNTSNKTDNKDPKVIAQIVMIGSGLHVNLPSGPKADLRELTRMRKTIVEDRKRVVNHLESTLAVYFPELGRVFKDLSCKTCLLLLKETPCPDTILKIPEEVLIKKLRRISNGRVDQNKTRLLISHSRSSVGVKYGREAYLMNLNILLAQIELYGSQIKEIEIRITKILKTLAEYNILKSINGLGEITMATIISEVVDFNNFGTDRELLKYAGLNLVENSSGKRQGNRKISKIGNKFFRTSIFFATLRLISKKGVYHELYQTHLKKGMSKKKAVISISRKLVRTIHAMIRKNEKFTVLHEIKQYKNVA

SEQ ID NO: 516200 - protein, 534 aa, unidentified
MIQSVGIDFGKTGPHKVRCLDERAQQCDGFIFHSTLEGLAKLEERIFQDGSNPVIVFEPTGLVWLPVVIYLRAHHPDCRLVRAKVQKVAALRKYLRGRSKSDRIDALTLAKMPFIDPEQLYEVYLRPPELQTLHRLNEQRWRLEQGVTARKNRIGAIIDGYFPGLRQAFDDRWSPRARAFFREQLNPLAVLRAGEEALHAFLKEAAPRSKASLVESHQVYMACQSAAAIYEASMAAGAVNEDSFTALQEEIACELRLLEAEEAEAENLARRIKELYQKLHPEKHLETIPGVGEITAPVFLAGVGEPGRFRNQSAFANWNGVVPGAKQSSEVEGKGLKMTKAGPAIMKWGLYLAGDVGRQWDPQLAYVYYRQMVYHGKTHNQAMGAVMSHLAGRILAVRREGRPYELRDTEGKAISRKDARQLILSKYQVPEEIRRQRRRRNPRQGKPTSRTRKKGEIVECPKRGEAATAPQLEPAPAIPHKPVYAAELAISSQATRLAASLDKSRERSPGKPGRSEPESNSCRYRTGSRADPET

SEQ ID NO: 516201 - protein, 422 aa, unidentified
MNKHRYQAKKLQQVDWGKLAEVAGTRRLVLGVDVAKEDFYAALLVSAQEVLTTITWRHPQETRVLEECLQALGAVRIEVAMEPSGTYGDSLREVLRALGCRVYLVSPKRVHDVAEVYDGVPSLHDAKAAYLIGRLHLEGASRVWREDCAERRDRQALVAELDLHHSEQRRNLNRLEALLSRHWPELGRVTELNRAGVLHLLATYGSPQAVRAEAAAAEALLYRVGRGLADAQSIAAILDSAEHTLGVVCTPGERHLLQVLAEAVLRTRQALREVERRIAQWVQRDPPLQSLADTLGKTTALVLDTALGSPLDYPNPHAYLKAMGLNLKERSSGQHQGRLKITKRGPGRARHYLFLSALRFVQRDPVIRAWYLSKLRRDGQISRCNALVAVMRKLALALWHVARGNPFDSRKLFDLNNLTLAA

SEQ ID NO: 516202 - protein, 412 aa, unidentified
MEVVYPCCCGLDVHKKSITACVLWAEDKGKSRKEKKRFGTFTHDLLQLADWLAERGVTHLAMESTGVYWKPVWNILAEQFEVLLVNAQHIKAVPGRKTDQKDSEWIADLLQHGLLRGSFVPPQPIRELRDLTRYRVSLVQEINRIANRIQKVLEDANIKLASVATDALGASGRAMLEAMLAGEEDAARLAEMAQGKLRNKIPELQLALEGRMTEHHRFLLRQLFEHLRFTESKLNEIEQEIDKRMRPFEDKVTRLCTIPGVDRVTAWGMLAEIGMNMNQFPSSGHLASWACLCPGSFESAGKRLSGKMRKGNVSLRRCLAQAAWAISMMKNNYLSALYRRIAARRGAKRAVMAVAHALLEMAYHMLKRKEDYRELGADHFDRIDVNRIRRSLVRRLERLGHKVTLEPLAQTA

SEQ ID NO: 516203 - protein, 357 aa, unidentified
MRIIGCDLHTRQETMAMLDTETGEVLEKTLQHEGEKVREFYSALPRPVQVGIEATGSMLWFLNLMEELGIDSQVGHPAKIRAAEPRKQKHDRRDADLLLKLLMENRFPSIWMPSKELRDLRALLWHRHQWVRTRTRVQNALQAIALTNGLRWGKSLWSQEGQHAIASLPLGPHAAHRRTALQALYRELDADINALDKRVLEQALERPEARRLMTHPGVGPVTALATDVFLGDPVRFENAKALASYVGMIPSEYSSAGRQRLGGLSKQGNPLLRFLWCEAAIHAVRRDPLLQRFYRRKLVQKGMGKARVAVARKLGIRLYIMLRDQIDYEEFCRRGQMRQKNGAARAGIPEVGYGPSL

SEQ ID NO: 516204 - protein, 339 aa, unidentified
MSKIIRIGIDLSKSVFVLYGVDEHEQCCLKRTLKRAEVLSFFATMEACCIAMESGSGAHYWARELNKLGHNARIIDPKLVAPYRHQGRSGKNDTNDAEAVCEAMSRPQMRFVPVKDEQQQTALVIHRIRKGLVNEQNRVANRLRGLLAEFGVVIPKGLRTLHRDWAQFRQEKSEWVPACAWAEFDSLYARLGELHQQILAYDRKISAHVRQDRRAARIAEISGVGTTTASAIVATIGNGHDFKNGRQFAAWLGLTPSQSSTGGKTTLGRITKRGDRYLRTLLVHGARSELKYVHRRRDAQSLWAHKLREEKSWNKAAVALANKHARMIWAILTREPATD

SEQ ID NO: 516205 - protein, 360 aa, unidentified
MARAGRKVKKRRIVGGVDTHADTHHAAVELMNGGRIADAQFPATSRGYARLLEWMRSFGRLHAVGVEGTGSYGAGLSRHLRDHDVRVVEVNRPDRRQRRNAGKSDPLDAYAAADAVLAGRARALPKSMDGIIETIRAVHVARSGAIKARTACINELRSLLITAPARLREQLAGLSAHALTTACARLRPGADLADPLHGTKLALRGLARRYQALTHEITDLDTHLQELIAQTRPDLLTIIGVGPEIAAQLLITCGDNPDRLTSADAFATLCGAAPVPASSGKTNRHRLSRGGDRQANRALFLIVLSRMAWCPRTKAYITRRTSEGKSKKEIIRCLKRYTARELFKALTRPTRQPHTSANAD

SEQ ID NO: 516206 - protein, 446 aa, unidentified
MRALPEEIPDEEYEQILERVCAVDVAKESGMVCTRLPGGAGGRRTSRVWQVAATTNAVSDLAAQLVDQGVEKVTVESTSDYWRIWYYLLEAAGLDVQLVNARDVKNVPGRPKTDKLDAVWLAKLTEKGMLRPSFVPPAPIRVLRDYTRMRVDLTRDRTRNWQRLEKLLEDALIKVTSVASKLQTLSTRDMVEALIAGQRDPQALAGLARGRLRGKHAALVEALTGRFDAHHGELARILLDQIDRLDSQITQLTGRIEELVGEIDRAALPPPSDSTDNGQDAPAVSALRRLSEIPGLSVETAQLIIAEIGLDMTRFPTAAHLVSWARLCPRTIQSGTSTSAGKIGKGNPYLKGVLGLAAATAARGGTTFLAERYRRIVKRRGKGKALVAVARSILVIIWHLLADPTARYHDLGLDYYDTRVNTNRKVNSLVRQLESLGHTVTLQPAA

SEQ ID NO: 516207 - protein, 386 aa, unidentified
MKKNNTPEQSPSKRANKMSRKVNRTGQKSRQQTGPVTIGLDLGDKSSRYCVLNEAGQVVLERSVGSSKKAMTQVFGAIPRCRIALEVGTHSPWVSRLLERLGHEVIVANARQVKLISQSSRKNDRLDAQMLARLARVDPQLLRPIRHRSEQAQGHLTVIRVRAALVDARTGLVNAARGLAKAMGERLPKCDTDQMGEERLKMLPQGLREALRPLLQEVESLTGKIKECDVKIEQIARTEYPETCLLRQVSGVGTLIALTFVLTVEDKKRFAKSREVGCFVGLRPSQSDSGESKPQLPISKEGDQYLRKMLVQGAHCILSKRGPDTDLKRWGVALSDRGGKNAKKRAIVAVARKLGILLHRLWVTGEVYEPLRNSQAAAKQKKTAAA

SEQ ID NO: 516208 - protein, 457 aa, unidentified
MNPKRSKPKNDRTMPMIHPNAAAIDIGATMHMAAVRADRTPEPIRSFGTFTTDLHQLVDWFTECGVETVVMESTSVYWIPIFELLDARGFAVFVVNARDAKHVPGRKTDVSDAQWLQRLHSYGLLRASFRPKGQIAELRAYVRQRERLLEYAASHIQHMQKALTEMNLQLHHVVADVTGATGLRIIRAILAGERDSKVLACLRDYRCHSSAEAIEKALTGNYRAEHLFALEQALALYNVYQDKASACDARIEAVLKELSISRGRDAGPLPSPRRRLHGKANGPDFDVRAALFKLLGKDLTQIDGLGSYLSLRLIAECGDDLSAWPSAKHFTSWLCLAPSNKISGGKVLSSRTRRSGSRASALLRLAAVTVGRTDTALGAFYRRLSARIGKAKAITATARKIAVLFYNAVRHGMEYVDPGSSYYETRYRTRVVENLHRRAKAFGFVLLPLESKAGAVS

SEQ ID NO: 516209 - protein, 310 aa, unidentified
MWALMFSKSRLDVYRPDTNEVFQIDNSDIAIAELCAQLEKKKGKVIVVMEGTGGYEHLLLTHLASHKLDAAVINPRRIRDFAKGIGLDAKTDAIDAKVISKYAGVVKPQPMATKSDHELRHGALVARRNQLLELINQENNRLKQAWDRDAKQSIQEVLKTLQKQLKGVDSKLAKMLQLDTENQRAIEILGSVKGVGPVMISTVLSDLPELGKVSRSEIAKLVGLAPINRDSGTKSGKRFIGGGRGQVRRVLYMATIVAIRHNPAIKAYYAHLKSKGKVSKVAIVACMRKFITILNLLLKTDQMWENKMSV

SEQ ID NO: 516210 - protein, 391 aa, unidentified
MSMYFVGIDISKYKHDCCIISAADQQIVSKFTITNDKDGFEHLLLSLNSLSNPEDIKIGFESTAHYALNLELFLENAHHSFMEVNPVLIKEYKKSTTLRRTKTDSVDCESIARWLMTVEYKPHSKGFYHAYSLKSLTRLRDRLIRQRSFYLVKITNVLDHTFPEFKPFFNERLSKTAIYLLENYGSAEKMAHMNSASYDKLRCISRGKFSIQQFLRLKELAANTVGVNNSIFDIELNSLLTLYNSLCKEIKVLETEITRLIEEVHPHYMSIPGIGPISAAVIYAEYGDISNFSNPGQMLAFAGIEPGIDESGTESHGGRMVKHGSSQLRYVLLNACLPLIRFDITFATYYAKKRAEGKKHRVAITHVAKKLIRVIYALERQDIDFNAQKLR

SEQ ID NO: 516211 - protein, 370 aa, unidentified
MGESTTFVGLDAHKKTIQVAMLLPGREDPVEWQAANELAAVRRMAKKIQKEAVGGVRVCYEAGPCGYSLQRTLRDLGMDCVVVAPSLIPVKPGDRIKTDKRDARKLAALDRAGLMTEVHPPTAGEESVRDLCRCREDAKADQLRARHRVLKMLLRRGIRWEGGKSSWTQAHRAWLRSLSFDHPADRIVFDDYLLALEHLDERVRGLDAAIQATAQEQPYKEPVAALRCFQGIDTVTAMTLAAELHDFRRFQSPRQLMAYLGLVPSEHSSSESRRLGSITKAGNCHARRVLIESSWHYRHPPRVGPKLRGRRQGQSAAVIAIADKAAQRLHRRFTRLQARGKPLPKVAVAIARELVGFLWSVIYPASARTA

SEQ ID NO: 516212 - protein, 364 aa, unidentified
MADCTTWVGIDDSANKINIAILHGQEIEPREELVFVNDSTGLGRLAKKLKTIRGEVRCVYEAGVNGYYLQRFLSNHGIFCDVAAPSLTPRRSGKRVKTDKLDAKALGRLFRAGELTSISIPKKEQESLRDLVRGREDALEDQQRARHRLARFLMRRGLKYPAGKNWSCGHLKWIKGIRFEDERDQMVLDEYRFALEEQTERLNKFQIKIEELGSQAPYQKRVHYLMALKGVQVLTAMTIIAEALDLRRFSDAPAFMAAIGVVPSEDSSGDMQRRGSITKTGNSHLRRVMIESSWHYQHSSLAGKTLKKRREGLPKEVLEIARKCDQRLHKKFRHLVNRGKDRRKAAVAVSRELAGFVWAMGQVA

SEQ ID NO: 516213 - protein, 320 aa, unidentified
MESAGAYQSAMGIDVCAERLDWYRLPERSGGSHSNTAEGIRALLADLKQSSVDIVVIEATGGLQRQAASALAGAGLAVAVVNPRQVRDFARAAGQLAKTDRIDAQVLALFGLRLQPQPRQLPDEAALALSDKLARRGQLIEMRVAEKNRRFRASTAMKRSIDKHLAFLDQAIKNLDKDLDDTLRGSPVWAEKVELLQEVTGVGPQTLRRLLIDLPELGQLNRKAIAKLVGVAPLNRDSGTLRGKRAIWGGRVHVRGTVYMAALSASRFNTPLKAFFQRLVAAGKPRKVALVAVARKLLTILNAMLRDRSIWNPQLVERRA

SEQ ID NO: 516214 - protein, 348 aa, unidentified
MSKNPATEVQVFVGVDVSARELSVAVRSATMDREEVQTFGNNAAGHQALLDHVLQGKRRARICLEASGNYSLDLALTLHAHRRVEVSVVNPRRARRFAESLGKRSKTDPVDAHVLCQYAVRMPWEPWVPPTPLALRLRGLTRAIEAVGVTQTQEKNRQHSLQASQALSTFVIRELQRHLEYLQLRITRLRREALRLITRDPELDRRFRLMLTTPGIGETSALQILGELVVLPTTLDARQWVAFAGLDPVCFTSGTTVDKKPRISRGGSRHLRRALYMPALVAIRHEPHLRAFFQRLVAHGKAPLQAIVAVMRKLLHAFFAMFRSDRSYDGSKLCLLEATPSPVVMCAA

SEQ ID NO: 516215 - protein, 341 aa, unidentified
MQKTYDIFIGIDVSKDKLDYCITNKETLQNQFGIVANNAKGINGFIKSLLKTTGSGTSAANNVNLLFCLENTGVYSMPLCYWLQAHKLNYAVVAALEIKRSKGITRGKTDKADARDIAAYALSHVQELKLSELPQDDFVELRLLLAEREKIVKAVNLFATTAENKNYLPAQVLKTTLHHNKIMMAALNKQLKQIEKSIDSLIQRNDVFKHQDELLQSIPGIGRQTSIMFIAYTQAFTLFKTYRQFACFAGVAPFEYSSGSSVRGKTKVSPLANKKIKTALNMAALTAKKYDPQLKLYFDKKVAAGKNKMLVLNAIRCKLISRAFAVINRNSPFVNTLKAVA

SEQ ID NO: 516216 - protein, 367 aa, unidentified
MEKVRFVGLDVHSKSIAIAVADGDGSSPENLATIPNDTAGLIKQLRKVGALSELKCCYEAGPTGFGLCRDLKAAGVNCIVVAPSLVPVQSGVRVKTDRRDAVKLARFLRSGDLSAIYVPTSETEAIRDLERSRDDAKKAERVARHQLGKFLLRQGRRYEGKSAWTATHLEWIRKQQFEQPAHQRVLTDYLKTVEDNTERVNRLTKDIGELVETWTLAPLVKALQALRGVQLVTAVVIAAELGDLKRFPSAPELMGYLGLVPSEHSSGESKQRGRITRTGNGHVRRVLVEAAWSYRYRPSMSYEIRRRNEGVADGVKKICWKAQQRLHGRYQKLMGRGKTKQKTVVAVARELAGFVWAIGQEEQLLAS

SEQ ID NO: 516217 - protein, 393 aa, unidentified
MTATHSHDSTTASPVLYLAFELGWGEWKLGFTTSLAQPVRQRTVRARNLKALNEEIAKTKQRFGLAPETPVRCCYEAGRDGFWLHRYLSQQGLDNLVVESASIEVNRRARRAKNDRLDVEKLVRMLLRYHSGERQVWSVVRVPSVEDEDGRQWHRDLQTLKAERTQHTNRIKGLLAGLGLEAEVTADFAERLPALRNWDGVAVPARLQERLLREFARWQFVDRQIRDVENERARKIRTSAEEPERKVRKLLELRGIGANSAWLFVREFFAWRQICNRRQLGALAGLTPTPYDSGDSAREQGISKAGNRRLRAMAIEIAWCWLRHQPTSRLSQWYRERFGGGNSRMRKIGIVALARKLLVALWRHLEEGKVPEGAEIKPSSRKRLPAAGEPALA

SEQ ID NO: 516218 - protein, 334 aa, unidentified
MTLELLAIDLGKRSFHVYGIDTDGVILSQKVSRAKLAEVVGHLAPKAIAMEACASAHYWARCWLAAGREVRLINPRFVKPFVKGSKNDAVDAEAIFEAAMRPTMRFVPVKSTDQQDLQSLHRARDRLICQRTALINHTRGLLAEYGIVLPQGPWRFTAQAPAAIAGADLSDLARAIFSELLDQLDDLDRRIKKFDATMVNLCRTNEMCRRLAKLPGVGPVVATAIVAAVNEGRQFRSGREMAAWIGLVPRQYTTGGKPRLGGIGRRANHYLRRQLIHGARAVVGRLPKRDDRRANWLKALVARRGFNRTIVALANKTARIAWALLNRKEAYAVP

SEQ ID NO: 516219 - protein, 343 aa, unidentified
MQSITTVGFDIAKSVFQVHGIDAEGHVVIRRQLKRRYVLTFFEKLSPCLIGIEACASSHHWSRELQALGHTVRLMPPAYVKPYVKRQKNDAADAEAICEAVTRANMRFVETKTPEQQSCLMLHRTRHLFIRQQTSVINAIRAHLAEFGIVARVGRNGVEELLNVVANPSDKRVPEIARACLFALGAQLRRLKEHILEFDRRIMAWHRSNETSKRLDDIPGVGPALATALVASVADPKAFRSGRNFSAWIGLVPKQHSSGGKDKLGSISKQGDRYLRSMLMIGALAVIRYAKIHGTKHRPWLTALLARRPVKVAAIALANKIARMAWAMMAKGERYKEPVALAA

SEQ ID NO: 516220 - protein, 421 aa, unidentified
MSKQELDDFEVLYERCCGLDVHKKQITACLITPGPDGRPKREVRTFGTMTEDLLALHDWLLDNQCTHVAMESTGVYWKPVYNILEGSFNLLLVNAQHIKAVPGRKKTDRLDAKWIARLLRVGLLKGSFIPAPEIRELKDLVRHRTTLIRDKARAVQRVQKILEDANIKLTSVATDVMGVSSRAILDHLLAGKTDPEFLADLAKGRLRKKIPELQKALNGVLKPHHRLLLAQLLAQIDFLDECISSLNTEIEERLRPFAKQVQDLATTPGLKEFIPQIIISEVGVDLSSFPSAKHFASWIGVCPGKNESAGKNKSGKTTKGNRWLKDALVEAAWAASHTKDTYLSALYHKLVPRLGKKKALVAVAHSIAIAIYHILTEGVPYYELGGDYFIKLNKKKLERRLVRRLEELGYKVTLEEVNSAA

SEQ ID NO: 516221 - protein, 389 aa, unidentified
MICVGVDIAKLNHFASALSSDGEVLIQPFKFTNDHDGFQLLSSRLDSLSDDSIIIGLESTAHYGDNLVRFLVGQGRKVCVINPIQTSTLRKNNIRKTKTDKVDTFTIAKALFLQLNSLRFITPGDLNFQDLKSLGRSHRNAVKQRTRLKIQLKAKTDQTFPELQYFFKSGLHQKAVYALLKEAPTARDVASMHLTHLAHLLVSTSHGHFKKEQAAELRVLARNSVGSPDTAVAIQIVHSIEQIELLDQQIDRIELEMADIMKYTDSVILSIPGMGYVNGGMILGEIGDIRRFPGPKQLLAFAGLDPSVYQSGNFQAKKTRMSKRGSKTLRYALVNAAHNAVKNNATFKAYYDAKMAEGRSHYNALGHCAGKLVRIIYKMLTDNVTFNLA

SEQ ID NO: 516222 - protein, 343 aa, unidentified
MSILYIGVDVGNTNSRMFGFTDDGEVIVEQRMQTLCEDSWVRLLEKLSERYEVRLAYEVGPHYEWMQGLFERYCSQVVLVNPAEFGVISKSQKKTDRRDAQKLAEGVRRGDLPEVFAPPKQSRADRRLVSFVHWLSRRQGSAKTRLRGLLLTYRLRCPVKDISSAKARKWFEEVGKKRMDEQGWCVAQMLLAELALIEQQRAELDKEVEKRLDHYGRAAEVLHSVPGFGPLTVLALVSMIVDIHRFESAKQLSAYFGACGKVYQSGKTLRLGSVTKRGNKTVRWLLSQALCGLHRADPRARKRYLRLKRRKHTGVARSAQVNWLVGLVYYLLKTERQYRRKTA

SEQ ID NO: 516223 - protein, 359 aa, unidentified
MHQKVTEKTFEGQSIYVGIDVHRKDFKVSVMSGNVFFKTFSSPPEAQAIVNYLYNNFPGASYYSAYEAGFSGFWLHRALTKMGVNSIVVNAADIPTTDKERQQKEDRRDSRKIVNGLRLGQLKGVYVPSERAQQDRGLLRIRDRIVRDLTRNKNRIKGLLYFYGIEYAERFRSNGSHWSGAFLAWLESIQFDYQTGTFGLKTYLDQGREQRALLLRLNRQIRELSHTHEYRRNFELLISVPGIGSLTAMKLLTELESVDRFNSLDQLCSYVGLVPSTHSSGENRTDNGITTRRNSSLRGALIESAWIAIRNDPALLAFYQKHCKVMNGNKAIVRVAKKLLKRIRHVLKNQELYQKSILR

SEQ ID NO: 516224 - protein, 388 aa, unidentified
MSQPFDASRSLTVLDQDSTLIVVIEVSQSSWLVSALVPGVERQPLKKLEPDEDALLKLLHRWRGEAARAGRQINRVVVAYEAGRDGFWLARWLRERDIEAYVIHPSSVAVSREHRRAKTDRLDTEMLMRAFLGWLRGEKRHCTMSAIPTVEIEDSRRPSREREKLVCDSTRIVNQMKSTLTRFGIRNFKPTLRKAEEKLDNLQTAEGTPLPENTRAELRRDMTRLRVLREQIREIELERLRKLEAISSAKEGPHAMILLIARVIGLGVETADMLVNEVLARNLRDHKAVARYAGLTGSPDESGKRRREKGLARAGNARVRCGMIQLAWRFLKFQKESALATWYRARTIDGRGDTRKRMIVALARKLLIALWRMVTTGEIPEGVSLRAA

SEQ ID NO: 516225 - protein, 341 aa, unidentified
MVDVRVIGLDIAKSVFQLHGLDGAGAIVLQKRLTRARLLPFFERLPACLVGIEACATSHYWAREIARLGHEVKLMPAQYVKPYVKRQKNDMADAEAIAEAVTRPNMRFVAAKGPDDQSAMMLHKVRLMLNRQVVMLSNAIRAHMAEFGIVAPIGRGGVDRLLAVIEDIADQRIPAEARRCLQTLTVQLGLVKRQVLDSDRQLLALTRSSELGRRLMEIPGIGPLVASALVACVPDPSIFRCGRNMAAWIGLVPRQNSSGGKQRLGSITKAGNRYLRQMLFTGAMAVIRRAMQSTRRPWLARLLERRKPKIAAMALANKNARIAWAMMMTGDHYREATAIAA

SEQ ID NO: 516226 - protein, 353 aa, unidentified
MPVYVAVDFHAREQTISWCDTADGEVHRTKLRHQHDDVRKFYEQFRGEVIVAFEASGYSAWFEQMLAELGHTVWLGNAAEIRRKAPRKQKNDRRDADLMLDLMMKSDFPRVHTFSTESRTVLRQLRYRHKLVKVRTIAKNSVHAIGINAGLPLRGRLLTQTGMEQLQALPLSPGLSQQRDEWLALIRLMNKQIGAVEESLAQRAKHDEAVELLRTHPGIGLLTALALRYTLDPISRFTSTRCVVGYAGLDCVEEQSSERRRMGSISKQGSRLLRFLLNEAGQTAARKDPQLKQFYRRLLRRRDKPKAKVAVARKLLVRSFIMLRDQIDYAEFVRRGVAARVARETHSPKVTDL

SEQ ID NO: 516227 - protein, 343 aa, unidentified
MKYIGLDLHKKSIFATVLGSDGKILARTKIGSKSRDIAYYLKSQGNKDEISVAMEASYNWQYFYRAAEGLADNIVLAHPLKTRIIGEAKIKTDKIDSAALAHMLRADMLPAAYVPKRSTMQDKMLLRSRISLVRIRTQIKNKIHSIIDRNKDSYIGLENLTDIFGKAGCQILRDTKIGPIDYNILSGYLDLIDEINKKIKDLELQINKRSIKDGDIDILRTMPGVGTFTAFLIKTEIDDISRFCSKEKLCSYAGLVPSTHGSADKLYHGRIIKQGNKFLRWALTEAAQVSIRYSGYFRYHYSKVRSKKNANSATIAVARRMLEVIYVMLKEGRAYIEKPVDIK

SEQ ID NO: 516228 - protein, 368 aa, unidentified
MKEVTTRYVGLDVHKATISIAVADDGVAPVLFGTIANDATAVRKAVSQLKRGGKLVAAYEAGPTGYGLHRQLTQLGVDCVVVAPALIPRRAGDRVKTDKRDAIALARLLRSGDLTPVWVPGQQDEALRDLVRSRFDAKDDLRRAMHRLAKFLLRQSIQAPPGIKPWSARHLQWLETLRLDHPTSQLVFQDYRVAVHAARERVRRLEADLERCAEQSPRLGTILALQVLRGVAFLSAVTIVAEVGDFRRFPNAPRFMSFTGLTVSEHSSGQSRRQGRITRAGNRYLRHILVQAAHNARFAPSLEGELKRRLKHVPADLVALSVTAQNRLHRRYRHLDRRIGRPKAVTAVGRELAGFVWAIGQRMEASAA

SEQ ID NO: 516229 - protein, 348 aa, unidentified
MLADQLDYVVGVDPHRDSHALAVVQVVSGAVLFEAAVSASSDGYANALKLVDQHAKGRRAFAVEGTGSFGAGLTRFLTANGERVLEVGRLRRERRSGGKTDALDAIRAARSVLTQNRPATPRASGEREALRALMAAREGAVNAKRAGLCQLRDLLVTTPEPLRSELRPLTRARLLQRLAATRPERRHDPELRGALLALRSVARRVLQLTAEERELAREIETLTRKLAPQLLEQPGVGPLAAAQLLLSWSHRGRISSEAAFARLAGCAPIPASSGQTVRYRLDRSGDRRLNRALHMILVTRRRTHAPTIAYISRRTQEGKTKREATRCLKRYLARNLYRLLEQGAPPAT

SEQ ID NO: 516230 - protein, 416 aa, unidentified
MNAVGIDVSSRKSTVAVLRPLGEVVCLPFDVTHDIAGLASLAEKLKALDGETRVVMEHTGRYYEAVEKALHEAGLFVCAVNPLLIKEYGANSLRRVKTDKADAVKIARYALDNWADLRDFTPMDAIRYDLKTLNRQFQLASKQRTASANNLIALLEQSFPGIRKCFDSPVRSDGTQKWVDFAHSFWHVDCVRKQPFAAFCERYRKWCKRHAYLFKQSNAEEVYALAKRAVVLTPKSKVVKVLVQEAANQLISISRSVEVYRAEMDRLAAMLPEYPVVMAMYGVGKSYGPQLMAEIGDVRRFERKQALIAFAGIDPMPNQSGDKNVRSNKSSKRGSPYLRKTLFNVIRTYLQCAPQDEPVFQFLNRKRAEGKPFYVYMLAAANKFLRRYYAKLRDYFASLDTLQPVDPIPTILKATL

SEQ ID NO: 516231 - protein, 364 aa, unidentified
MKKLTRLVQKVNAPVVGLDIHKSLIAYCLLDREGNEVESGEVGGARADFEALVARLVSRRKPHVAFEASGGITWIFDLLVARLGRQRVHVAQPRRIRAIANSREKNDANDAWWLAYLTHEGRLPESFIPTGTLRELRIATRERIAAIHARTKVQVRLRAHLRQMGVRLPTVKITAKKGWAFLEQLKEETPGTQGMALKSLLLRFVQLQEAVGAWDAEIERLAELFPAVRTLEQEAPGVGTALAATIAAEAWPIQRFRSPKAFARFAGITPSDRSTGGRQIHGGITREGSPYLRWALVQAAMGCLRAKQGPALAAGNWIRAKQKRMGCKAKARVAGAHKLSEQIWRLFHLGECFDAARPFGGVKS

SEQ ID NO: 516232 - protein, 441 aa, unidentified
MAMRKREEDLVFPNAAGIDVGGSSHWVAVPRQASDEPVREFGAMTDDLNAMADWLLACGVDTVALESTGVYWIPVFEVLEQRGLKVWLVDARQMKYVPGRKSDVQDCQWLQKLMSLGFLRAAFRPTDEVCVVRAVARQRDVLLADQASWVQRMQKALVQMNIQLTEVLSDVMGLTGQAIIRAIVAGERDPRVLARHRHSRVKASEQDIAKALTGNWRDEHLFVLRQALAMYDDIAKLLRECDAKLQGLLSALGSAKVDLGKTPRAGSKTRAEFDTRQILANWAGVDLTRINGLGLSAVMKILSELGPNLSRFANVKHFCSWLGLCPGTKISGGKVLSAKTKRSANRVRQALKMAAMSLSHSDSALGAFYRRLSGRMDKPRANTATAHKLARMVYFMLTRGEAFVDEGQQRYEEQQRERSVAALKRRAAALGFQINPTSVPA

SEQ ID NO: 516233 - protein, 316 aa, unidentified
MSSSVAFGIDVSKRQLELAAHDLDRTWTVDNDAAGHQVLLAACRELTPTLIVLEASGGYEREIVAALSVAGWPVVLANPRQVRDFARSTGQLAKTDRLDAQLLARFAAVVQPTPRPLADAETTELAALLTRRRQLVDMLVAERLRRRQAIAAVHADLTQHIRWLEQRVKRVDHDLDRWIQRSPLWRAKEDLLRSVPGVGPTIARTLLGRLPELGQLSRQQLAALAGLAPFARESGTWRGRRHITGGRREVRHMLYLAAVSAARCNPVLKARFTRLRTAGKPAKVALIAIARQLLSILNAIVRTQQPWAPTLDSQHR

SEQ ID NO: 516234 - protein, 356 aa, unidentified
MEKKVFIGLDYSKLTVDVSCFHIKNMEEVLYQQFENSEEGMLELIKWARKLFKDTKQWLVCGEYTGLYSMTSTYVFNEKGIDLWLENPSQIKLSSGIRREKNDKVDSKDIALYALRFIERVRLYNPESDVLIKIRELVRLKDRLTKCKMLIAVPAKELKQVQKNCKEVDYIKNTSDILIMDMDGKIIEIEKRMLTLLKTDPNLKQLYKLITSVVGVGMQTAIYILIHTWGFTAFETPRQLACYSGVVPFSKQSGTSLKGKSQISHIANKKLKTLLHMCALNAVRIDPFLKAYYERKTKEGKHKMSTLNNVRNKLLHRICAVVKSGEEYDKNYQSRATNEIVDKAEIQVVNIDLDAA

SEQ ID NO: 516235 - protein, 406 aa, unidentified
MPVSKASPHRFVGLDVHKHYLVAAAVDRDQNEVLSPRPVRLTRLDDWVRRTLTPQDAVVLEMTTNAFQLYDDLLPHVYSVTIVHPPHVALITRAQVMTDKIAARILARLLGAGLLPPVWVPSPEVRDARALVAQRSKMMRLSTQARNRLHAVLHRHHLLPPGGDLFTSAKHEWWLSLEVSALQRVRIQCDLDSLVFAQTQIALLEDAMKILAAHDERVPLLVQIPGIALLTALTLLAAIGDIARFPTAKHLVGYAGLGTRVHDSGLTHRSGRITKAGRRDIRAAMVEAAHTASRTHPHWQAEMARLEPRLGKNKAMVAIARKLLVAVWHVLSKEEADRFADPQQVARMLMQHAYRLGRDLRPDGQTVGEYVRQQLDRLGLGADLTAIRRGKRTIPLPPSRLCAADN

SEQ ID NO: 516236 - protein, 368 aa, unidentified
MASMPHPSPDGQPDVDTEQIILGVDTHKDVHVAALITTLGIQLADATFPTTTAGYRQLLDWARTFGVLRRAGVEGTGSYGAALTRYLRRQRLTVIEVNRPDRAARRRHGKTDTIDAVAAAHAVLSTRARTTAKTANGPVEMLRMFRLARTSAVKSRTQAINQLKAVIVTADAALRDTLIGLSNAALIRHCANLPPTPPSDVATATIYTLRRLAQRIQTLTTEERELQRHIIVVLDIHAPQLLQRHGIGPDSASALLVTAGDNPDRMHTEASFAALCGVSPIEASSGKTRRRRLNRGGDRRANAALYRIALTRARSDQRTRDYLDRRTTQGRTRREAIRCIKRYLAREIYHLIGQHDLADQTPESLDET

SEQ ID NO: 516237 - protein, 320 aa, unidentified
MYVGIDVAKAELVVAMGATGPVTTFPNDDVGLTALVGAMREAKPTLIVLEATGGYEIPCTAALAAAPLPVAVINPRSVRSFAKATGTLAKTDRIDARLLAQFGERVQPEPRPLPTAAQHELEALVTRRRQLLEMRTAEQHRLGQALGGHRQRVKQSLRKHLAYLDRELRITETDLRDRMQASPVWRARDDLLQSVPGIGPTVSQTLVAELPELGRLNRREIAKLVGVAPLNRDSGTRRGRRMTLGGRASVRAILYMACLSAIRHNPVLRAFYQRLTRAGKVKKLALVACMRKLLTIVNQMVRTGQHWSPSPSIACQLQPT

SEQ ID NO: 516238 - protein, 345 aa, unidentified
MKIVGWDLHTRYQQIAMLDEETGELVERRLEHGNGEAKEFYTHLAGPVRVGIEATGHTRWFEQLLAELGHELWIGDAARIRAAEVRKQKTDARDAALLLDLLLSGRFPRIWRPAREERDLRHLLWHRQKLVWMRNAIGNQLHALAMGEGLCRKKQLFTKKGRCELEALGLDKWASRQRQELLRLLDQLDASLAQFDQAVNEQAAANGDAVRLMTHPGVGPVTSLAFVLIVGPAARFGRSKQLVSYLGLNPSEHSSGGKQKLGAISKQGNPMLRGLLVEAGHTAARMDPELLQDYQRLRLRRGGSVAKVAIARKLAVRMYWMLRREVNYTQLVRTQGSSRATLVQQ

SEQ ID NO: 516239 - protein, 315 aa, unidentified
MPVLGIDVGKKRFQVALKVGDKFKNKAFDNTPEGFASLSDWLSRWTQEPVQACLEATGAYGEALSYYLHDQGHSVSLINPMRIKSFGKSLGLRSKTDRVDAKLIALFCEAMQPPLWQPLPPEQRQLKALIRRLEALLNMRTQELNRLEDGQDPLVQQDLHAHIQYLDKTIAELRQRIQDHIDQHPGLKQQQDLLNSIPGIGDITSAWLMAEVNFNHYAHARQLAAHAGLVPRHWQSGLLRGKSTLSKMGNPYLRKALYLPALTAIRHNPIIQQFAQRLAQNGKAKMTIVAAVMRKLLHIAFGVLKSGKPFNPNYA

SEQ ID NO: 516240 - protein, 328 aa, unidentified
MIQLGIDVGKSKIDLCLRPDGPEGRKKTKILTNGPDVAVSVLEWLAKQKVAPADVQVVMESTGTYHEHLAYGLYERAVRVIIANPARVRAFAQGMGILTKNDTVDADVLAQYGAMRQPDVWQPPSPAIQELKALLSRRDALVHDVGREQSRLEKLLSTRCSLLVEASVRKILQVLNNELQVVQALIDNHIDKHPELKRDMEYLTSIKGIGSAVGSTMLVVLRGNHFISAEQAASWVGVVPKEKRSGSSVRGRTRLSKNGPPEVRAKLFMAAIVAVKHNPLLKQFYDRLLAAGKAKMSALGGVMRKLVHICYGVVMKQQKYDENYATAA

SEQ ID NO: 516241 - protein, 408 aa, unidentified
MIFVGIDWSETHHDACIADLDGRMLAKGRVPEGVEGVARLHEMVAAHAEDPSQVVVGIELDRGLLVGALVAAGYAVHAINPLSVDRYRDRHRTSGAKSDPGDAKVLADLRHLHREVAGDSELAEAVKVLARAHQGLIWSRQRQLNQLRNALREFYPAVLEAFGTDLASKDALAVLEVAPTPEEGRSLTTSRIVAVLKRAGRHRRITERAEEIKRALRSPQLEAPELVSRAYGDVVRSTVRIVAEMSEQIESLAGELEASFEGHPDAEILRSLPGLGSVLGARVLAEFGDDPDRYADPKTRKNYAGTSPITKASGRSRVALARFARNRRLADALQMWAFCSLGCSPGARRYYDAHRAKGHTHQRALRSLANRWVGILHGCLRHRDSYSEEGHGPMSGTSPLDTLGPWDV

SEQ ID NO: 516242 - protein, 346 aa, unidentified
MMIIGCDYHPSWQQICWLDTLTGETGEKKLEHASGEAERFYRQLHAPALVGMESTGNCQWFVEMATTLGHDVWIGDAAKIRTCEVRAQKHDRRDAALILRLLMEGRFPRIWTPSGEEKDLRQLLIHRYKLVRIRAQVKTELQHLAMNQGITRKCKLWSKVGEKVLRELPLKPWAGRRREDLFRVRGMLDEQIAPLDQAVAEVAEKNEKARLLMTQPGVGPITSMAFVLTMGDVSRFQRGKQVASYLGLIPREYSSGGKQRLGSISKQGNRFLRMLLVEAAQGAVRCDPGFRNEYLHRCHRKAKGVAKVAAARKLAIRLYWMLRTNTGYPEVVRVESSSRVPLVSAS

SEQ ID NO: 516243 - protein, 355 aa, unidentified
MNKYSVGIDISKNDFHACFSGIDNNQQVKVLRSGTFKNNRKGFVELAKWVKDTAREKIVPVVIIMEATGVYFENCALYLFKSGFSVSVILPNKAKKYIAALGIKTKNDKADAKALSRMGAEQALQLWQPMDDYFYELRALTRLYQTLQESITATKNQLEAAELSMYPSKTIIRSLKKLISETEKQLLIIRDKIYKHLASNGSVATKVNNIAEIKGVAALTIAVLAAETNGFLLFENASQLVSYAGYDVIESQSGLRVGKTKISKKGNARIRRALHMPALNVVRYKVKKFDIFFERNFQRHGIKMKSYVAVQKKLLTTIYALWKKGEKFDPEYDLKNTTRDGEAVQSSRPNFTEVG

SEQ ID NO: 516244 - protein, 304 aa, unidentified
MEGVNFTQVVRRGCGIDIHRDIAVATISGEGITTETRSYKTFSSSLTELREWLIANGVTHVAMESTGVYWKPVHKVLEGPDLKVWIVNARHIKYVPGHKTDKMDSAWICKLLLAGLLKPSYIPPKEQRELRDLTRYRNKLIQHNASEKNRIIRVLEDCNVKLDSVVSSTSGVTASKLIDKLVQKGAVTMEDIDEVYHRRLQASKEEIYLACEGFIDDHQKYLLQLIQKDIDQTQKLIDELSERIKALLAPYDNAVERLKEIPGLSTKVVEDLIAEIGLDMEVFPTEKNLASWAGMSPGNNESAG

SEQ ID NO: 516245 - protein, 400 aa, unidentified
MRVVFGIDVSKISSEVAILVNGEKVHNYTMSNDAIGFSRLLGDLKTVHKPEIIFEATGVYSRRLQAFLDEHSYAYTRLNPLEAKKQLDSLRVRKTDQIDAEKLAQSQFVLNRKPTYIQEEVYQDLRDLSRFYQNLTEDIVRAKNRLHKVLQVTFPELETILSTPTGEQYWNLVIAFPCKDFVLELSKDELSKSIRLSTSKRISDKRVAYLAEKLTALANQSYCAVKKNSPIMEEVRYYAKELLRLSEQRQAVLDEMVELAQPLPEYDILLSIPGIAETTATSIIGELGDIRRFQSANQINAFIGIDLRHYESGNFIAKEHITKRGNPYARKILFKCIHNIASASHTNPCHIADFYEKRKRQSQMTSTKPHTIASIHRLIRTMYYLIMHNKLYDYISTQNQ

SEQ ID NO: 516246 - protein, 347 aa, unidentified
MKHYAGIDVSLNSSNVCVVDESGKVVREVKVPSEPVALISCIKSLGVRVERIGLEAGPLSQWLYGALRESGLPVELLETRHVKAALSAMPVKTDRNDARGLAQLMRLGWFRPVHCKSMAAQEVRALLTARKLVQSKLYDIEMSLRGILRGFGLKVGPTTSRSFAARINHLTADHPSLEMVAEALLSTHAAALCAFKNLEKNVRQISRADTRVRLLMSTPGVGPVVALTYVSAIDDPKRFTSSKPVGAHFGLTPKKYQSGETDINGRISKVGDSSVRAVLYEAAHIILTRPIHGGALKSWAMRLAKRAGMKKAKVALARKLAVVLHRMWVSASTFDFEKANSCTRAAA

SEQ ID NO: 516247 - protein, 403 aa, unidentified
MNAVGIDVSKGKSMVAIMRPFGEIVSPPFEIKHTTSDINSLVELINSVEGESRIVMEHTGRYYEVLAHQLSKANLFVSAINPKLIKDFDNDSLRKVKSDKADAVKIARYALDKWQNLKQYNVMDELRNQLKTMNRQFGFYMKHKTAMKNNLIGLIDQTYPNANTYFNSPTRSDGSQKWVDFVSTYWHVDCIRKMSLNAFVEHYQNWCKRKKYAFNKSKAEEIYTKTKELVPVFPKNEITKHIIRQAVDQLNSTSVTVETIRTLMNETASKLPEYSIVMQFKGIGPSLGPQLMAEIGDVTRFTHKGALTAFAGVDPGVNESGSYAQKSVPTSKRGSSNLRKTLFQVMDVLIKTMPQDDPVYQFMDRKRTQGKPYYVYMTAGANKFLRIYYGRVKEYLSVLPDPS

SEQ ID NO: 516248 - protein, 428 aa, unidentified
MNEKKCSRLEEFRQLQKEIRGSKEHLIVGIDVAKDRHSAFFGTATGKTLFRRLVFGNDREGFERLLLQAEAMRVQHGLKKVVFGLEPTANYHKPLGEHLITGGHRVVLVSAKSVKRNRELLDGRWDKHDTKDSANVADLISQGKCLYYEYPELRLRELRSLLSLKRRLKRQEHGLRVRIRNQLIAQYFPEFDRYFGRSESEGLAIVRWCLTPSVIASLEYDQFARWVVPGKRGIRQQERLRAIWQKASVSIGCKVGEGVRFEAKVMVEGLRQIREALGETDEKITDLCVGFPEYEYLLTIPGFGSDVSSKVLGAIGDPFRFERGNQVLKMAGLDLVADRSGKRSDGVVPIISKNGKADLRYALYQAAMISSSRDREFIIWFTNKVRGRQREKGIKIRMRVKLSAKLLVIAWTVMKKKEPFNPDYLRIE

SEQ ID NO: 516249 - protein, 341 aa, unidentified
MLIIGCDYHPSTQQIAWLDTETGEIGERPLTHRVEAEQFYRELQQPGTGVRVGMEATGQSRWFERLLAELNIELWIGDPAQIKAKRVRKKKNDREDARLLRKLMLEENFPRIWVPDPENRDVRQLIWHRHRLVQMRTRVMNQLQAIAMNEGIRRKRGLWAKQGRVQLEALPLSPWTCRRRQELLELLDRFDPQIAELTKAVEQEAERRPEVERLQTHPGVGPITALTYVLVLGTPERFHCGKQVGSYLGLIPCEDSSAAHWRLGHISKQGNNMLRHLLVQSGISAARCEPDFRRQYMRLTMRRNQAIAKIAVARKLAVRLFWMWRRGWNYEEMKRFGAHVG

SEQ ID NO: 516250 - protein, 325 aa, unidentified
MTSLSPTDNSFIGIDIGSCQLDVAWHRGDGAQYANRPDAIAALVERLLSQKVTRIVIEPTGGYEKALVKALRQAGLALEIIHTSRFKAYRELLGVKAKSDTSDARLLAAYAAAPDEVRGRRADHVEVPQDTDREALAELAARRDQLKQMMHAETCRLGTVRLAELRQAITAHLEALKDEDRQVYKRMLTLVRGRVDLKRAQRLLATIKGIGPISALTLLASVPELGQVDNKVAAALIGVAPFVHQSGTMVAPARIRGGRACVRRILYMAAVAASRHNPVLRPFYERLIARGKPVKVALIAVLRRLVTFANAVLRSRQPWKGAQAS

SEQ ID NO: 516251 - protein, 402 aa, unidentified
MNAVGIDVSKGKSMVAIMRPFGEIVSTPFEIKHTTSDIHSLVELINSVEGESRIVMEHTGRYYEVLAHQLSKANLFVSAINPKLIKDFDNDSLRKVKSDKADAVKIARYALDKWQNLKQYSVMDELRNQLKTMNRQFGFYMKHKTAMKNNLISILDQTYPGVNTYFDSPARSDGSQKWVDFASTYWHVDCVRKISLNAFIDHYQNWCKRKKYNFSQSKAEEIYGKAKELVPVLPKDAITKLIIKQAIDQLISVSTTVESLRTLMNETASKLPEYPVVMAMKGVGTSLGPQLMAEIGDVSRFTHKGAITAFAGVDPGVNESGSYEQKSVPTSKRGSSDLRKTLFQVMDVLIKTHPQDDPVYQFIDKKRAQGKPYYVYMTAGANKFLRIYYGRVKEYLSSLPES

SEQ ID NO: 516252 - protein, 332 aa, unidentified
MENFYFIGVDVSKKKLDFCVMFEGKVVHEEETANHQSAIMSLLHHLEEDYGIVSDQILFCAEHTGQYTFPLACACKAVECKLWLENAAEIKYSFGVQRGKNDKVDAKRIAIYARRFQDKVQYYERPTEDIERLKQLESERTLYVTDLAKYKGHMKDQKDYMPKALYERKMKRLQALMDDLEEAIQAITDEMDKVIASCPVLSRQRELLMSIDGVGRVVATNMIIATEAFTRFDNPRKFNCYAGVAPFSYSSGSSQHSKARVSHRADKVMKRLLHLAAVAVTHRVGGELKKYYERKVGEGKNKMSVINALRAKIVARMFAVIKRNEKYKPILS

SEQ ID NO: 516253 - protein, 423 aa, unidentified
MISFPKRERAQRAAACVGVDAGKFAHTLVVRPTGRPDSKPCTFPTTRAGFEQAVAFVRQQVPGASPANILVDIEFAGNYGFTFAHYLRELGFPIVSVLPAHTKRWKDVAHNQPLKTDAKDAGTITDLLAQGHFVGFPFLEPAYADLRYLVTARERLAVLRRGAITQLRALLQVVFPEYETIFPLVSQRTAVLLLRAFPGPQQLLAAPKAKVLRVLRAGSRGHLGAEIYERLVGAARATLGLPGAQVRLRQEIVLTLDRLALFEHQIRALEVELVAALEAVPETPYLLSIPKVAAVTAAVFLGSIGDPRAYDAGAQILRVAGLSLVERSSGVLHGTKRISKRGRPLLRAAAYLFAVRSITKGGLFRADYEGLCARNGGQKLKAIVAVMRSGLQLLYSIARDRRRFTVEPPPRRRARPTLEVTPA

SEQ ID NO: 516254 - protein, 354 aa, unidentified
MAPPVPIIGIDPHKRSHTAVVLDDCEEVIAHLRIVAGHCQADQLLAWAPPDPARVWAIENANGLGYLLAQQLIARGETVVDVPATMAARARKLSGKSGTKTDAHDARSVAIAAAHHRSLRQIIPEDLTTVIGLLLDRRWQLVSQRQRTICQLHATLTDLTPAGAKTHLTCDKTVALLRRIRPVTAVEASRKQVAQELLEDWRWLNRRIPPAEDRLFRAVAAHGTTLTSIYGVGDVGAATIISIVGDVTRYPTAGHFAAFCGTAPLQASSGDVIRHRLSRRGNRQLNKVLHVAARCQVRNGAPGRAYFLRKIEEGNGHLEALRKLKRQLATVVYRRLLADQAVRGGQVGTRPKSA

SEQ ID NO: 516255 - protein, 351 aa, unidentified
MNYVGVDYHKKYSYMVVKDENGNVAGRGTVNNTREEVQQFLEPYRPGMAVVEATRNWGLIYDWLDEVLDDVALAHPLKVKAIAEARIKTDKISADILADLLRANLIPKAYAPAREIRELKSILRQRMFLVRIQGMVKNRIYDILDRHPEVLGQAPEVSDLFGAAGTRWLNGVVLQGEDNRLLTNELELLAFVRERIAESNSVVKELAKKDTKAQLLQTIPGIGPFFSLLILYEIDDISRFRSEKNLCAYAGLVPSTYASGGKVFHGRITKTGSKWLRWAAVEAVQPAIRNNPDFYAYYQRTKARKGNNAAKVATARRLLTVVYRILKHGRPFERRITAQEQRIVPAALVSI

SEQ ID NO: 516256 - protein, 408 aa, unidentified
MEVLYPRCAGLDVHQQTVVACVRVASGATVQQEVRTFGTTTAELLALADWLTAHGCTHVAMESTGVYWKPIWHVLDGHFELILANALQIRSVPGRKSDVNDAMWIGDLLAHGLIRSSFVPPAAIHELRDLTRTRKQLVRAVAQHTLRIQKVLEDANLKLTSVISDVMGMSGRAMLEAISRGEQDVERLADLSQGRLKASRPAVVAALQGRVTAHHRFLLRLHLTQIDALDGAVREVEARLGEALAPFQAAVDRLMTIPAVGRTVARVIVAEIGIDMSRFPTAGHLVSWAGLCPRQDESAGKRRSNRTRSGNPWLKTTLVQVAWVAARTRNTYLRAQFLRLKSRRGPKKAILAVAASMLTAAYYILRDDVAYAEPGADYFERRNQAQTARRLVKRLESLGLIVQIRPAA

SEQ ID NO: 516257 - protein, 375 aa, unidentified
MKEKVRFLGMDVHAETIAVAVAEADGSVRSLGTIANRAESIRKLVRKLGPVEHLRACYEAGPTGYVLYWQLTQLGVDCAVIAPTLVPVKAGDRVKTDRRDAERLARSHRAGDLTAVWVPDEGSEALRDLVRAREAAKADQLRARHRLSKFLLRTGRRPERKIKAWTGVHMTWVRQLRFEQPAQESTRLDYLHEVEHMGERVLRLEQAITDAIQLASPGMQEVIQGLQALRGIAAISAVTIVAELGELSRFESARQLMGYSGAVPSENSSGKRTQRGSITKAGNAHLRRIVVEAAWSYRLRPGIGPRLRKRQENVPEEIREIAWKAQIRLTKRYARLSAAGKDQRKIITAVGRELLGFIWAIGIKAETAGKQRMAA

SEQ ID NO: 516258 - protein, 343 aa, unidentified
MQIVSVGIDLGKTTFHLVALGVAGKMLVRKKFTQRQLLTYTANMQTSWIGLEACSGAHFLGRALRKQGHDVRLMAAQFVKPFVKSNKNDFVDAEAIAEAVERKNMRFVPIKTDDQLDLQAIHRVRDRLISRRTAVINQVRAFLLERGLVFAKTPAKLRAALPDILKNADLDLTPQMRSLIDLLWKEWKAVEDQIEGLSLELERISAADPGCTRIRQIPGIEPIVATAIVAAIGNGAAFRKGRDFAAWLGVVPRQYSTGGKARLLGISKRGNVYLRKILIHGARAAVLRIKRDRAPIGAWLDALDTRAPKNVVVVAMANKLARIAWAVLSSGEDNRPMGNTVAA

SEQ ID NO: 516259 - protein, 360 aa, unidentified
MKTIVGCDFHPRWQQVAVFDAESGEISEHKLLNGDGEAERFYRAVEAPALIGIEACGNSQWLIELLERLGHEVWVGDAAQIRASYVRRQKTDRRDAGHILRLLMENRFPRLWTPTAEQRDLRQLLIHRHKLVEIRTRVKNGLQHLALNRGLQKKSSLWSAKGRADLEKLPLQGWTARRREDLLKLLGDLDREVNELDAAVSHAGEQHPQARLLMTQPGVGPVTSLAFVLTIGDVSRFRHSGQVASYVGLIPREHSSGGKQRLGGISRQGNRFLRQLLVEAAQTATRLDEGFRKQYAARCHHKPKGVAKVAAARRLAVRLYWMLKQNVCYPEIARIESSPRVPLTGNCQVDGLVGCSRIQQ

SEQ ID NO: 516260 - protein, 342 aa, unidentified
MSIIKVLGIDLAKCVFSIHGVDVHGKCKLRKTVKRNKLLAEVAKLPPCLIGMEACSGAHYWAREFTKLGHEVRIMASKFVIPYRQNEKNDANDAEAICEAVTRPKTRFVSIKSEEQQAVLCLHRIRQGLIKDRTARINRLRGLLAEFGIIMPKGRYPAQNAISSILEDAENALPMLARELLNDVWQSIKGLNKEILSYDRKLYQLANQMKAAKRLMTIPGVGEITATAVVATVNEAKDFNSSRSFSAWIGLVPRQYTTGGVVRLGRISKRGEKHIRTSLIHGARAVIANCKNKTDSTRIWVKDLIERRGFKRATVALAAKNARLIWALLHSGKDYQVNYLHG

SEQ ID NO: 516261 - protein, 383 aa, unidentified
MASMRMAREGAVRVTVGVDTHKDAHVARAKDQLGRRLGEKIIPTTPRGYRALLAWAKSHGEVATFGVEGTGSYGAGLARYLQSEGHVVIEVIRPNRQARRRHGKSDPADADAAASAVLAGDATGQPKAADATVEMIRALRVARQTAIKARTQASNAMKALVVTAPDDLRECLRELSTIALVRTCARLRPGKLVDPTTATKVALRSLALRHEALDTEAKVLEAQLTRLATGVAPELLAVFGLGTDSAGALLVAAGDNPRRLRSEAAFAMLCGASPVEASSGKVTRHRLNRGGDREANCALYHIVMVRLRWHQPTKDYMARRTTEGLRWHQPTKDYMARRTTEGKSKREIIRCLKRYVAREIYAVLRSMQLSDVAIAGQAQGEVA

SEQ ID NO: 516262 - protein, 316 aa, unidentified
MLYVGIDIAKNKHDVTALNVPGKTVLKPLTFSNNKAGFELLDLSLRQLNQDCLIALEDTGHYAFNLLNFLHEQGYKVYTYTPLLIKEFAKSLSLRKTKTDKKDAHGIALKLLSDPNREQFQHDNRQVELKILARHIHRLKRKQSDWKVQYTRCLDIIFPELDKIVGKHSEYTYQLLTCYPNPQKRLEAGFDKLIEIKRLTASKIQDILSVAPHSIGTTSPAREFEIIENIKHYKRLIDKAETCVNDLMAEFNSVITTVTGIGNRLGAVILAEIQNIHAFDNPAQLQAFAGLDSSIYQSGQIDLAGRMVKRGSPHLR

SEQ ID NO: 516263 - protein, 336 aa, unidentified
MHHVGLDVHARMISICILDANGHVVKKLTYEGSWGQFPKWLRRHIKGRFAVVFEACCGYGWLFDELTRLGANVRVAHPGQLRLIFRAKRKTDRIDAEKLAKLLYLGMVPPVHVPSLDMRQWRELIEYRHRLVGRRTRTKNATRAVLRTYAIDAPKGLWTNRGRAWLRDVAVAGLTVALRRDQLLEELERLDAHIRRAEGELDRIGEAHPGVALLRTIPGVGPRTAEAVVAYIDKPQRFARNRAIGAYFGLVPREDSSGGKQRLGHITKDGPATVRKLLCEASWQVVRRDAGMRAYFERICRGKKDRRKIAITATAHRLVRAMHAMLLTGEVWRGAA

SEQ ID NO: 516264 - protein, 321 aa, unidentified
MENARTYVGIDVAKEKLDIAVHSSDQRWTFANTDAGIGRVLSCLQKLNPVLIVLEATGGIEVALVAALAVAGLPVVVVNPRQVRDFAKATGQLAKTDTLDARTLAHFAAVIRPPLRPLPDAQTREMTAILTRRRQLVEMLTAERNRLSAARSKPVRDRISAHITWLEKELANVDDDLASGIRESPVWREKDNLLQSVPGVGPVLSTTLLAHLPELGNLNRRQIAALVGVAPFNRDSGNLRGKRTVWGGRSAVRAALYMATLVATRHNPVIRAFYHRLCADGKPKKVALTASMRKLLTILNAMLKHRTPWHYTDTQTLGPCS

SEQ ID NO: 516265 - protein, 368 aa, unidentified
MDTLFVGLDVHKLSISVTTAEDGRDGAVRFCGEVANTPEQVRKLSDRLSRPGNRLEFCYEAGGCGYGIYRQLTEMGHGCLVAAPTLIARKPGDRIKTDRRVSQMLALQHRAGGLTAVWVPDEVHEAMRDLVRARGDAVMALMRARQQLLAFLLRHGRTYSTGKTWTLRHRRWLAGQAFDQDAHRVVFQDYVEAVWSAQERRDQLEARISALLKGWSLSPLVEALRALRGLDMISAVSFVAAVGDLGRFENPRRLMAYLGLVPSEHSSGERIRRGGITKTGNREARRMLVEAAWSYRYPPRVSTGKTDIVSRQPKVVRDVAWKAQVRLCDRYRRLSAGGKRPTVVIAAIARELSGFIWAIGQEVRPAAP

SEQ ID NO: 516266 - protein, 429 aa, unidentified
MEEALFGASREGLFFLRLGVVSVSGLLREVEAGRVIVAIDPGKALNRVWVTTAAGRVGEPVSLPTSRAGLDGLQALLAGVPAPVFALEATGSLHRAWAAELERRWPGSLRLFAPSQTQAARSQLGTRRFKTDDRDCAALVWLARQGAGRPASAATVDALRAAVSHRRQLVLALTPLRQRLHDQLNALAPGLSAPAGHGRALALETPTGRAVLACAVAFAGRAPSVRSLKARADGRLTDATAIFWSSRWQDCLPPPADADLRAARMRRDLARFAALRGDIAFVDGQIERLLAASAGHILTTLPGVATTRAAAFAAHTLPIERFPTPEHLYSATGLAPASYESSSVRRRGAIARTGLPEHRDALIGIAWGLGQFAPAFQARLDELRRRGKAPLEARVALARHACRLCWRILHTQQPYDDRRYDRARRDRGR

SEQ ID NO: 516267 - protein, 312 aa, unidentified
MTEHCYGGIDVSKDRLDVMVLPERKSFSVDNNAAGYSELVKRLRGLSIAAIGIEPSGGYERAVIRALLAADLSVRRINPNKLRQFGRARGVLAKNDRLDARLIAEYVAIMPTRVVQRDPATEQLAEVVTMRRQLCDEHVAVENQTAHLEDAMLRRLNKRRLARLAADILLLDRRMAQIVASNANLTRRYELLTSMQGVGPTLAFTLVALLPELGQMSRKQIAALVGLAPYDFDSGRLKGHRCIYGGRLPVRNVLYMAALSACRYNPALKVFHHRLAATNKKPKVIIVAVMRKMITTLNAMLRDNVAWQPKSA

SEQ ID NO: 516268 - protein, 400 aa, unidentified
MLSIGIDVSKGKSTVCGMKPGGEIVYTPFEVQHTREGMSELVSLLHNSGEEVRAVLESTGSYHCPVVAALLENGIFVSVVNSLRMKRFCSQSIRKVKTDRIDAMQIALYGLAYWQELQPTRLPEDTYRELQRLARQYYQMTSMLIKAKVDFNALCDQVLPGMQELMSDHAGRHKLSDFVLRYRHTTHILEMGETRFRKDYCKWAEKKGYRNCERMAVLIFATAQNGIPVLPNAPSTQIVITEAIRVLHTVEASRDAILTQMQALAKTLPEYSLVREMPCIGDTLAPRLIAEIGDVRRFHSKRALIAYAGIDAPPYQSGKFCANNRHISKRGNRYLRKTGYEVMQSYVMHKPANDPIFMFIEKKRGEGKSGKLAMVAGLNKFLRIYYGKVTELYRSLSAIE

SEQ ID NO: 516269 - protein, 461 aa, unidentified
MRKTRKVAGKRGKKVVDVTAKMEILHPNAAGIDVGNAQHYAAVPVGRDPQPVQTFGSFTADLHRLGQWLRACKVDTVAMQATGVYWIALYGVLESYGLQVYVVNAKHTKTLPGRKTDVLECQWLQKLHTFGLLNNSFLPPEEIRVLRTYLRQRETLVAEAGTCIQQMQKVLTQMNIQLANVLSDLSGKSGMEILKAILSGERDPYRLAALADPRVQASRKEIAQSLEGHWQEDLLFVLRQVHDLYFFHLDSIAQCDSRIEAHLQTLESKVDLATQPLPDPTPLPHRKHIPQTNLQEELYRITGVDLTRIDGIQVQTAQVVLSEVGVDMTPWTDEHHFASWLGLSPNHQITGGKILRRGTKKVPNRAANALRLAAQTLHRSQSYLGAKYRRLRAKLGAPKAITAMAHQLARLIYRLLRFGTAYHDKGMEHYERQYRQNQINWLKKQAAHLNMQLIPNAGAAR

SEQ ID NO: 516270 - protein, 327 aa, unidentified
MQHDSIQRDPIPSTVVGIDVAKATLDCYVDPSGQRLHLANDDAGIAELLTHLRKLNLQLVVIEATGRLHRCVAAELLQSDIPVVLVNPQRAREYARSTGKLEKTGRVDAQVLACFGRGARHQMLRKTSEKQVELDDLISRRRALVQMRIAEKNRLAETQQPKLAKTQAQQLLRLIDQQIQDIDRAIAKLIDGDDDWKRKSEIITSIPGVSSGTANQLLADLPELGDLSRQRISKLSGLAPLANDSGPRRGQRSIRGGRQPVRNALYMAAFNTIQYCQRFKSFAKRLSDAGKPFKVILTATMRKLLVTLNQMVKTNALYNPSFIENLS

SEQ ID NO: 516271 - protein, 317 aa, unidentified
MERVKSNTKVAGVDIGKSWLDAAVCGSDERLRVANDPAGIAALIGWLRAREVGRVGLEATGGYERGLRAAAEDAGLEVVVHQPIEVRLFARLTRRRAKNDRLDATLIAAATARVDTVRAAQDRRLRELAERLTAYEQVTDQAAQLKTFLESVSLKDVAAAVRGQIRSLERLKAKLLTDILARIKVHPDLLARFKLLTSLPGIGDIVGASLLIRMPELGALSRGQAASLIGVAPFDRESGQYKGQRFIAGGRARPRQKLYMAALSARKHDPALRAFANRLLAKGKPKKLAIVAVMRKLIEAANLVLARGQPWVKAATA

SEQ ID NO: 516272 - protein, 342 aa, unidentified
MNEVSIIGLDLAKNVFQAHGAGADGSVVFRRKLSRAQLLKFMGEQSPCIVAMEACASAHHWGRAIGDLGHEVRLIPAAYVKPFVKRQKNDMADAEAIAEAASRPTMRFVAVKSEDQQGAAMVYRTRDLLVRQRTQTINALRAHLAEQGIIAPTGPAHVGRLAAVIDGDDGALPSTVRDLARLLLDQIAALSGKVADLDAELRRRASIDDTARRLATIPGVGPITAAAITTFAPPMETFSKGRDFAAWVGLTPRQHSSGGKERLGRTSKMGQRDIRRLLIIGAVAVVRWAARKGAPEGSWLARMLERKPKMLVAVALANRMARTAWALMRKGEDYRDPAMATA

SEQ ID NO: 516273 - protein, 345 aa, unidentified
MKITTVGIDLAKNVFQVHAVDERGTVVLRKQLRRDQMTAFFANLPPCVIGMEACGSAHHWARTLKSLGHDARLMSPQFVKPYVKSNKNDVADAEAICEAVARPNMRFVPVKSVEQQAVLSLHRVRQGFVKARTAQANQIRSLLGEFGLIMPAGISHIAKRVPSLLEDASNPLPASFRQLIARLTEHLKDLDILVGEFEAQIKAWHRSCELSMRLEKIPGIGPLGASALVASIADANSFANGRQLSAWLGLVPRQHSSGGKPALLGISKRGDVYLRTLLIHGARSAILAAQRKAVNTNVWLAGLLGRRHPNVAAVALANKNVRTVWALLAHGREFRPNYVAQPLAA

SEQ ID NO: 516274 - protein, 351 aa, unidentified
MKVKELYAGIDLHSNNLVAAIVDANGKHVDHQRLPCELEAVKRYFHPFKGRMISIAVESTFNWYWLVDGLEDLGYKLELANPAGLSQYDGLKLANDKTDAFFIAELLRLGILPTGYIYDRKLRPVRDLLRRRASLVGKRTSMILSLRNLQMRTKGYTLETNIIKQAKLFELVGMFDDPSEKLTVEVQKTHIDTLGAAIKRIERHVFRTVEAIPNAEELLGIPGIGKILSMTILMEIGDINRFASAEKFASYARTVRSERTSNGKKKGENNRKCGNRYLSWAFMEGSNFIRRYDERAANWHARKARKTNKIVATKAIACKLAKAVWHILRDGRQYDGDLLFGPMPKIKIKST

SEQ ID NO: 516275 - protein, 407 aa, unidentified
MEVVYRCCCGIDVHKRVIVVCLLKGGERELRELGTTTGEIRELANWLTEAGCEMIAMESTGVYWKPLYNLFELLGLDAIIVNAAHMKALPGRKTDVKDAEWIADLLKHGLLKASFIPDREQRERREIARYRKSLIEERARELNRLQKVLEGANIKLASVVRDINGKSSRKLLDTVIKDETLEADEVAQLLHPKMRSKLDQIMSAIDGITTPLQRKLIAKIVDHIDDMTRRIADMDDLIKEYEAEYEEAIAKLEEIPGIARRSAEVILAEIGIDMSRFPSAAHLCSWAGVSPGNNRSAGRQKHGNTTKGNKALKTTLTQCANAVKKCKGSYFAAQYQRIAARRGKNRATMAVAHSMLIAIYHILKNGASFRDLGADYYDNFNREHKIKGYLKRLASLGWSPETTPMPA

SEQ ID NO: 516276 - protein, 338 aa, unidentified
MKLYGAIDLHSNNNVTVLSDEQDRVVYEKRLPNDLSLIAEELATYRDSIQGIVVESTYNWYWLVDGLMDEGHKVHLANTAAIQQYEGLKYTDDQYDARWLAHLLRLGVLPQGHIYPKQHRPVRDLLRKRGQMVRQRTVNLLSIQNLFSRNTGSSMNANRVKRLDSKEIEELIANADLALAIKANLAMLECADGQVDILEKAVIGRVKLKSEFELLKTVPGIGLILALTIMLETGDIGRFATVGDYASYCRCVGSKKISNGRKKGQGNTKNGNKYLAWSYVEAANFAIRFSARIKSFYQRKKSKTNGIVAIKAVAHKLCRACYYIMKDQVAFDVTKAFA

SEQ ID NO: 516277 - protein, 345 aa, unidentified
MTKVYFRSFHDFQFRAAIDISKHSYAIFCVDQTTGEIFEENRSEKDFLEFFRMKSKSVIAMEACATSKYWARRLSELNHEVLLLPPKKCKPFVDGCKSDRNDARGIYRSMESVRPSPRPITLELQQIDTLVALRKFVVKEYVSYTNALRSHLAEYGKAMPKTIKGFENNASICINELEQEGLGAFLIQRFRDMLARYKDLRREDAEYSREINRLTKESRLGQLLRTIPGVGAIVAACALPMLSDPKAFANGREFAAFLGLVPSHTGTGGRTINGKITKRGDRYLRAMLVQGAMAALRQKVKAPWLERLISREPARKKVAVALAARIARVMWAIANTNQPFELRML

SEQ ID NO: 516278 - protein, 376 aa, unidentified
MKNTLYLGLDVHKDSIVIAIAVVGRNGEVRLYGTISNDLQALEKALRKIRQAHNGARLEVCYEAGPCGLVIARRLAQLKIACTVVAPSMIPQRSGDRVKTDKRDARKLARLLRAGELTAVYIPEATDEAMRDLCRARTDAVDDRRRSRHRLKGFLLRHGYRYQGKSAWTAAHERYLRELVLPHPAMKVILEEYLQGIGAAGERIERCEVGMRDLLEKWRLAPAVRALMAMKGFQTVAAMILVSELGELHRFAHPRQVMAYLGLVPTENTSSDTRRQGRITKCGNAHARWLLVECAQHYATPPKVSAHLSRRQEGQPHEVRVISWRAQNRLHHRYTRLLGRRLQRNKAMVAIARELCGFIWELLRTQSCYQAPSPSV

SEQ ID NO: 516279 - protein, 441 aa, unidentified
MKKEKTAKAFPIIYPNAAGIDISSKEHYVAVNPQLHEESIRSFGSFTEDLKELVSWLKQCKVDTVAMEATGIYWISLFLMLEESGFDVVLVNARHVKNVRGKKTDMSDAEWIRQLHSCGLLSASFQPDSFTRKLRTYMRHRKNLIEMAATHIRMMHKALEQMNIKLQHVIADITGKSGQEIIEAIIMGERNPIKLASYCDGRMRANKKEMIIKSLEGIWKEEHVFELEQSFSLYHYYQLKIKECDIQIEQHLREKTGILKDPDEKIKTPGNKNNLNFNVKELLMHITGTDLPEIFGITESNALEIISEIGLNIQKWPTEKHFTSWLNLAPNNKISGGRILSSRIPRKKNIAGQIFKLAAFAVQRSKNWLAMFYQRIKAKKGTAKAIVATARKIAVIFYKMMRDKVLFSPFPVEKYNEVFKENQIKRLKRQAQRLGYLISEG

SEQ ID NO: 516280 - protein, 350 aa, unidentified
MKRPKDKLFAGIDLHGNNLVTGIMNEHGKRLAHRKLDCDLDQVAAFLEPFKTQLQSLAVESTFNWYWLVDGLREQGYPVHLANPAQIQQYNGIKHADDKHDAFHLAELQRLNILPEAYVYDAQLRPVRDLLRRRTNFVRERTALFLSFKSLYTRTTGQEMALRELKALEPKAGKELYEHPANQLIAKLQLEHIQALARTISCIEKEVLGWAREIPIYDQLLTLPGVGKILAMTITMEVGDVRRFKTDGDFASYCRAVDSRRMSNNKQKGENNQKCGNKYLAWAFVEAANFARRYDENCRRWYDRKKAKTSAVIATKALACKLAKAAWFIMSQGSAYDASRMFPELAVSKK

SEQ ID NO: 516281 - protein, 343 aa, unidentified
MHIASVGIDLGKTTFHLIALDDHSKVVIRKRFSRKQLLAYTANLPSSLIGIEACSGAHFIGAALRNQGHDVRLIPAQFVKPFVKSNKNDFLDAEAIAEAVTRENMRFVPIKTDEQLDLQALHRVRDRLVQRRTAIINQIRGFLLERGITFAKGPANLRNHLPTLLEDAEQNITPRMRGLLGRVWQEWKQLETEIAEVSDDIERIANEDAGCQRLRQIPGVGPLVSTATVAAIGNGAAFRKGREFAAWLGLIPKQHSTGGQARLYGISKRGNIYLRRMFIHGARAVLLRVKYDTAGLGHWVHQLEARAPRNKVIVAIANKLARIAWAVLFRAEPYRHSAVCATA

SEQ ID NO: 516282 - protein, 242 aa, unidentified
MSEQYVGIDVSKDHLDVALSDGTSLRVGNDEAGHQELVARFSAAVPRLVLMEATGGLERALAAQLSAAGVPLRIVNARHVRHFAKATGLLAKTDRLDAQALVRFAQTLKPEPRAIASEQTVALQALIVRRRQLVEMLGMERNRLRTAHSGVRKSLQASIRWLEKRLAEVDEDIDGALRECGVWREKVELLESVPGIARVISVNLVACLPELGELNRRQISALAGVAPFNRDSGRWQGRRGRS

SEQ ID NO: 516283 - protein, 341 aa, unidentified
MATFTACLCQRSEDGGLTFSKVVSFSNETKGYNQFLRWVKSVIANGPELVFLMEATGVYYENLAHHLHKINKTVYVVLPNTSKHYFSSLNIKTKTDIVDARVLSQLGAERVHKAWMPPPAALLQLRNLTRYYVQLQEQKTALGNIKHSKDCSHQVQSFIIKSNKGLIAEIDKQIAKCLAEIKRLVELDKELKSRINKLATIKGIGLITMVTILAETMGFEQFHSAKQLVSYAGYDIVQRESGTSIKGKTRISKKGNRYIRNALYFPAMVACRFNPTLKETYLRIIQKKPSKMIGQVAVQRKLLILMYTLWKNDTEFIENYKLGSPDHKTEATQDSSVTELL

SEQ ID NO: 516284 - protein, 317 aa, unidentified
MTKISTAVAGIDTAKDKLDVAVHGRTERWQVENALRGWRRLRAALTKAGVGRVGIEASGGYERGVVKHLRAKGFTVLVLQPIQVRAYARLHLRRAKNDALDAVLVAACAHAIEGPRIEPDARLDELADHLTFVEQIEEDIARLKTRLEHIHDRRMRKIVVTDIARLKARRTAELLRIVNRLRAHGDLGRRLDLVLSVPGIGERTAFALVVRMPELGRISREEAAALAGLAPFDDDSGKYKGQRHIAGGRGRLRRALYAAALPAAFRWNTALINLYARLIARGRAHNAALVACARKLLIYANTVVARGTPWVNKPAAI

SEQ ID NO: 516285 - protein, 335 aa, unidentified
MTQPAELYIGADVHERESQLAIFEPSGTLLTEKRLPTTNLQTFIDSLPGEKHVAIESTGFIYPIYDKLSTLKSCHVSVAHPNKVKLIAKSKLKHDRADARILGELLRTNYLPASYMPDPETREKRLLINDRVRYGLRSGELKGSIRWLLKRRGIQIQHTFKPEGKRKLRELSLQEINIRLDELELIEAIIRKLNIQIAKIVQEDPNAKLLDTLPGVAPYTALFLSSEIGDVNRFPDSKHLCAYLGLVPSLHQSGDTTVTGHITKEGNKWLRRNLTECSRVAVRKDPHLRRFYLKLTHKRGEKKAILAIARKLVAYAYWMLKRNQTYEELSPWDGS

SEQ ID NO: 516286 - protein, 331 aa, unidentified
MTDNVTGATVVGGVDTHKDLHVAAIVDQNNKVLGTQYFSATRQGYRQMLAWMTSFGALKRIGVECTGTYGSGLLRYFQNAGLEVLEVTAPDRMERRKRGKSDTIDAECAAHAAFSGIRTVTPKTRDGMIESLRVLKTCRKTAISARRVALQIIHSNIISAPDELREQLRNMTRMQLIRTQGSCRPDASEYHDVTNVYRIALKSLARRYLELHDEIADLDVMIAAIVDELAPELIKRNAIGYESASQLLITAGDNPQRLRSESGFAALRGVSPVPVSSGKTNRYRLNRGGDRAANSVLHIIAIGPLRTDAKTKEYVTRRVSEGIQKWKQYAV

SEQ ID NO: 516287 - protein, 350 aa, unidentified
MEITTVGLDLAKRGFQVHAIGGSGEVVVRKTLRRAQMIPYFAGLERCLVGIEACGTSHYWAREIGKLGHEVRLMPPAYVKPYVKRGKTDASDAEAICEAVRRPTMCYVAIKSPEQQAALGMHRTRDLFVKQRTQLVNMIRNLLAEFGIEIRQGIGQALMVAKRAVADDMPDIPPLAAKVIAGLAGQVLDLQARLREIEREMLVWHRSNDVARRLATIPGVGVVCATALAASVTDPHQFRSGRQFAAWLGLTPLQHSSGGKERLGRISKMGDKYLRRLLIVGMTSLVRRAKYKPTTVDPRLADLLLRKPVRVVTLALANKTARVVWAIMTRGGTYRTPQPAGASVSQAAVA

SEQ ID NO: 516288 - protein, 419 aa, unidentified
MKRIDRGKPVLAKGRAVVGIDVGKRKHAATALSPQGEIIAQLASFPNTREGIDRLEREVLRKAGGPGKVLVAMEATGHYWMCLYHELQRRGYECVVLNPVQTNAHGRSRIRKTSTDRIDSAGIARLVLAGEARATRVPDAKTAELRLWVRHRQRLLRAATAMERYAHTLVDRIFPEYADVLSKPFLPSGQKLIRQLGLAPAKLAAKPQETRELLRAASRGRIAPETIDQLLQAAKQSIGTRQAEEVAEGQLAAIFDYLGPLRQQIAAIEDQLDRRVQALHSPLPSLGISTTLAAIIHAESDPIRDFRTADQYVAYAGLDPSLRESGDTIHRRGKISKRGSPTLRHALYLAAFVVCRKHAYFQRIYRKHRGRGKTHRSALVVVASHLARVIWRLLTDNRQFAKRPPAKATPHSQARRKRK

SEQ ID NO: 516289 - protein, 424 aa, unidentified
MEEKEQKKPIRAWIGIDWADEKHDVSVYDVASGKQESLVIRQTPEALQEWLGQLRSRYEGGYVAVVMEQGRGGLLNALMGCEFLVLYIINPKSLSNFREAFYGSGATSDPVDAELMRDMVRQNPNRFRAWRPDDVMTRSLRLLTEGRRNLVDQSTALTNQLTALLKGYYPQALAWVGTLDTAWACDFLQQWPTLQSLQSSSRRQIRRFYEKHLRSSLNLTEQMKQIQDARALTQDEAVLESSAMMVQAWVSQLRPLLANIAEFDRKIAMTFRKHPDRPIFESFPGAGAALAPRLTAAFGTDRDRFQAATEMQQLAGIAPVTEKSGKKSFVHWRYACPKFIRQTFQEFADHSRRWCKWAKAHYELLRRRGKSHNAAVRALAYKWIRILFRCWRDRQPYQDQIYTQALLKHGSPLSPLLAESVENP

SEQ ID NO: 516290 - protein, 384 aa, unidentified
MKKTQETLRIKDSIKEAILYIAFELSHRKWKLGFSNAEKMRTVTIEARDLDKLHEEIEKAKQRFGLEGQIRVVSCYEAGRDGFWLHRYLLSCGIENVVVDSASIEVNRRKRRAKTDRIDVRKLLHKLLRYHGGEQLVWSVVNVPSEEAEDGRQLHRELEVLKKERTMHRNRLKSLLIQQGIVVSNPSSRKFLIQLETLRTWDGKELPADLKSRIIREHGRLRMVEEQIYALGKEREKRVAAADTDAMKQVEQLMTLVGIGMNSSWKFVMEFFGWRDFKNGKQIGALSGLTPTPYDSGSSVREQGISKAGNERVRTLAVEMAWVWLRFQPQSKLSQWYLKRFAEGGKRMRRIGIVAMARRLLIDLWRYLEHGVVPEGARLVKIVK

SEQ ID NO: 516291 - protein, 344 aa, unidentified
MHIASIGIDLGKTTFHLVAWGERNKVLVRKKFSRSQLLAYTANLPSSLIGLEACAGAHFVGAALREQGHQVRLIPAQFVKPYRKSNKNDLLDAEAIAEAVTKQNMRFAQIKTLEQLDIQAMHRVRDRLVQRRTALINEIRGFLLERGITFAVRPIHLYKNLPTVIEDAEQNLNPRMRWLLQRLWQEWKQLDRDIETITDEIERISDEDVLCRRLRQIPGFGPLVSTATVAAIGNGAAFRRGRDFAAWVGVVPRQYSTGGKQKLFGISKRGNVYLRRMLIHGARAVLFRIKYNTGGFGQWVQRLTQRAPHNKIVVAIANKLARIAWAVLSSGKDYRHQPLAATAG

SEQ ID NO: 516292 - protein, 446 aa, unidentified
MPAKKKRAPSPPPRVVRPNAAGIDVGSEAHVVAVPADRDAEPVRTFGVFTADLRALADWLKQCAVTSVVLESTGVYWMSLCDFLEAQGFEVLIVDPRTLARNLKKKTDVSDAAWLQELHAFGMLKSCFRPDQEVRALRTLWRHRDHLVTEAAKLLQMMQKVLVQMNVYLHLAVADIAGVTGMRILRAIAQGQHDPQTLAAMRDANCKKTRAEIAKALEGTWDPAHLFELKQLLKAWDFYQGQLHRCDKEYDKAAGKMPDQTQGQALPEPEKRPNKHRNAPTAFASDALIFKMTGVRITEVDGLGANTVLTVLSETGPNLAAKFATEKHFAAWTTLAPRKHQSGKRTKFPAQTASRVAKAFRLAARALLNCKSVLGNFLRRLRARLGIGTALRATACKLAKLFYRLITKGEAYRRESTAVEEAKQRERQLKNLEAKARELGMRVFPA

SEQ ID NO: 516293 - protein, 466 aa, unidentified
MGKGSGGGMTRGDRRRNARRERLRGLLPRDGVVIGIDLAEDKQAIAVVDHDVRVLARKTVRVKAFRLGGALDWAVAAAGAKGFSAVTVACEPTGPRWLQVQRLCAERGLPLVCIQPLISHIAREQQDYTTHKTDESDCVMIARLAIELHCYVPEELDETWAHLRHLGRRRAQLITAATASVQRIGDFLSVAWPTVLETCAEPLRSHTWLAALQVVTVRCGGQPDKLAVGRPEAFTALVRGAVPGWGGQRAWGTICGRVFAALTDTEGVVVSCRRGLFRRCADELGDLQRARAQLRVVEADMVAVLDELGLSRLGGIPGLTAVGAAAILAETGDPRRYDSSSSLVKHAGLAPSENASGAFAGRPRISRRGRPGLRLAAWRAVWPMLRFNPVMAAKYQAMTGAGDADTAAARARRARARVACAAALLRWIYSMAVHGTSWDAAAASGDAGCQHAPHCPHAPHCQLEVA

SEQ ID NO: 516294 - protein, 414 aa, unidentified
MEQETITWFAAVDWGSEKHQGCILDSQGVIAGERVFSHSGAGLAELCDWVLSIAGSASVVAIAVEMPHGPVVDALLDRGFVVHAINPKQLDRLRDRFSVAGAKDDRRDAYVSADGLRTDRHLYRRVQLADPRLVELREWSRLAKELQEERVRLGNRVHHQLWRYYPQMLELTDDIAANWFLDLWTMAPIPSKARRLRKATIEQLLKRYRIRRIDAATALHTLRQPAIKVADGVAEAAGIRIRSLVARLRVVNSELRDAARKLDELCAALGERPPATAQSDGRRDVAILKSMPGLGRINLATLLAEASGPLSRRDYQALRTLSGVAPVTKRSGKSHIVVRRYAAHVRVRDAVYHWARVAIQHDTKSRSRYVALRQRGHSHGRAIRGVADRLLAVACTLLERQTLFDPELGKTVTA

SEQ ID NO: 516295 - protein, 362 aa, unidentified
MTSITTTTGPVTGGVDTHGETHHAAVLDRVGRELGDREFPTNPSGYRALLAWLVGHGQLDRVGVEGTGAYGAALARHLRAGGVTVVEVDRPDRKARRASGKSDPLDAYAAARAALSRRATGAGKSRDGRVEAIRALRVARCGAVKARAAATNQLKSLLVSGPAELREQLRHLSTTVLITTCANLRPTGEVADPVQATKAALRRLARRHQNLSKEITEADVDLKNLVTAAAPCLLALRGVGIEVAGQLLTTVGDNPDRLHSEAAFAHLCGVAPVPASSGRTHRHRLNRGGDRAANNALYIVVLGRLRYDSRTRAYAARTTEGLSKPEIIRCLKRYVAREIFSVLTARTVKAQSRRVHAMSTAA

SEQ ID NO: 516296 - protein, 368 aa, unidentified
MKFVQSKAGKDDNMAKTSPVVGGVDTHKDLHVAAVVDHNDQVLGTQSFVTTRQGYKLMLTWMRSFGELQRIGVECTGSYGAGLLRYMQAAGVAVLEVTAPDKLDRRRRGKNDDFDAESAAHAAYAKRRTVTPRSRDGMVESLRVLKVCRKTAVQARRIALQIIQTTIVCAPDRLRDTLRKMTRMQLIRTLAAWRPDLTAYRDVEEAYKIAFKSLARRYLELHDEIADLDIMIQAIVTDLAPELIARNSIGLNSAAQLLLTAGDNPERLRSEASFAALCGVSPVPASSGKTTRHRLNRGGDRAANSALHIIAIGRLRLDPKTQEYVARRVAQGHSKLEAIRCLKRYIAREVFNIIARRHKQINQVQIAA

SEQ ID NO: 516297 - protein, 344 aa, unidentified
MQPSITVGLDIAKHVFQVHAVDASGAIVVRRKLRRSELLRFFEGLEPGLVGIEACATAHHWARSIMALGHQVKLMPPAYVKPYVKRQKNDAADAAAICEAVSRPSMRFVPVKEVDQQGVLVLHRTRDLLIRQRTMLINALRAHLAEFGIIMRQGRAGVTALVASVEEGKAENLPELARTALMSLIAQLRDAHARANEIEREILTWHRNDELSRRLETIPGVGPITASAVVATVTDPSMFASGRELAAWIGLVPRQSSSGGKERLGRISKQGDPYIRRLLVVGAHSVLRIAHSKKPGSSNLTNWGAELAARKPYKLAAVALANKMARIVWALMAKNEVYRRQMPA

SEQ ID NO: 516298 - protein, 359 aa, unidentified
MSLQQDVRPVIVGGVDTHKDLHVAAAVDGHDQVLGTNTFPATRHGYKTMLAWMRSFGDVTRIGIECSGTYGAGLLRYLQQASITTLEVTSPDKSVRRKRGKDDSIDAENAAHAAFAGIRTVTPKTRDGMVESLRVLKVCRKTAIAARRVALQMIQTQIVSAPEELRDQLRSMTRMQLIRTLASSRPDLGGYRDVMTAYRIALKSLARRYVELHDEIADLDTMIKAIVDELAPDLVARTAVGYESAAQLLITAGDNPDRLGSEASFAALCGVNPIPASSGKTQRHRLNRGGDRAANSALHIIAIGRLRLDVKTQEYVARRLTEGHSKLEAIRCLKRYIARELFYLLRHRQREIGQSRIAA

SEQ ID NO: 516299 - protein, 343 aa, unidentified
MEHYAGIDVSLESASVCVVDASGRIVSEAKVASEPDVLIRWFGNLGVEVSRIGLEAGPLSQWLYAGMREAALPVELLETRHVRDAFKAMPVKTDRKDARGIAQLIRLGWFRAVHCKSLPAQELRAVLTARKLVQGKRHDIEMSLRGILRGFGLKVGPTTTRSFEGRIRELVEGHPTLLAVADALLLARATLGEQLGKLQKRLVSLARDDMRARLLMTTPGVGVLVALTYVSAIDDPARFRSSKATGAHFGLTPKKYQSGETDVTGRISKIGDASVRTALYEAANVILTRPVKGSLLKSWAMRVAKRAGMRKAKVALARKLAVVLHRMLADGTEFVAGKAAAKA

SEQ ID NO: 516300 - protein, 421 aa, unidentified
MLMAGTGDEAVLFVGDDWAEDHHDVEIQDDSGRKLAVRRLPEGAAGIGQLHELIGEYLGETDDPGQVVVGIETDRGLWVQALLAAGYQVYGLNPKQVARFKERYVTSGAKSDAADAQALADMVRTERHQLRALAGDSTQAEAIKVIARAHQTLIWERTRHLLRLRVALREFFPAALEAYTPLGLTGADTLELLAKAPDPVRAARLTGGQITAALKRARRHHATAKAEQIRTALRTSHLAQPEALNAAYAATVQAITAVLVTLNEQIGRLETQVDTHFHQHPAADIYLSQPGIGEVNGPRILAELGDDPDRYASAKARKNYAGSSPITRASGRSRIVLARHVRNARLADALHSQALSALTGSPGARAYYDKQRTRGASHNTALRQLSNRLVGILHGCLKTGTRYDEAHAWPQHAKQADLAAA

SEQ ID NO: 516301 - protein, 413 aa, unidentified
MNANVCDSVFAGLDWATRTHAVCVIDGAGHVLERFEINHDRDGLADLLPRLAHFAPSVRIAIERPSGLIVDALVDSGHHVFPIHPNAVKASRPRYRSHGAKSDASDAYWLADLLRTDGHRWAALLPQSDSIRALRALVRARDDLVVMRVALANQLRSLLDAFWPGAACIFAAVDSPIGLAFPRCYPSPASAAHLSQAQLHRFCRTHHYSGRRSPAQLLGRLGATAQGLTGTLTTAAMAQLVGSLVSVLEPLVTQIATLTQRVERFVQSLPDGQIIMSFPRAGRVCAAQILAELGDVRERYATLDQLTAEAGVVPLTYQWGKTRSVGFRWACNHQLRRAITCLADNSRHASLWARGIYRAARARGCDHPHAIRILARAWLRVIWRAWTDRKPYDPALHLSALKLLQTLPPSQAG

SEQ ID NO: 516302 - protein, 369 aa, unidentified
MEKDTTYVALDDSKRKIIAGILRPGDAQPELREIANDPRQTRRLFERLKREGPVAACYEAGVSGYDLYRQIIALGVDCAVIAPGLTPRRPGQRIKTDRRDAAKLVRLFRAGELTAIHVPDEAEEAVRDLVRCRDDVRRDVLRWRHRVLKLLARHGRAYLSGRNWSQAHWRWIRAQRFDLPPLQRAFEATVFTLEQALARQAELDKELAAIAAAAPYCEPVGWLRCFRGIDTLSAIILVAEVVDFQRFGRPRELMAYLGLVPSEYSSGDTHRRGALTKAGNGHARRVLVEAAWHYRHRPTIGRSLATRSQGQPQEIVGHAWRAQQRLHRRYRHLVGHGKRTPVAVAAIARELVGFIWAAMTRPENRCSAA

SEQ ID NO: 516303 - protein, 359 aa, unidentified
MRIIGCDLHARQQTLAMLDTTTGEVVKTTLQHEGNNVREFYCKLPRPVRVGIEATGSMQWFVNLMEELRIECLVGHPATIRAAEPRKQKHDRRDADLLLSLLVEERFPAIWLPTKELLDLRALLRHRHQWVGLRVKIQNALPAIALANGLRRGSSLWTQAGQHAIASLSLSAHAAYRRNELQAMYVKFETEIEKLNQRVEQQARERSGARLLMTHPGVGPITALATEVFLGDPARFADSKELASYVGIIPGEHSSGKRQRLGGLTKQGNPLLRFLWSEAAIHAVRRDPGLKQFYRRKLIQKGLGKARAAVARKLGIRMWIMLRDQIEYNEFCRRGQMHQKNGDACAGMPAARYGAKVTG

SEQ ID NO: 516304 - protein, 419 aa, unidentified
MQSQAPAAFAAFVGLDWADAKHEVCLQAAGTAQREFLSLEYSPEEINAWVQTLRTRFNGQPVAVCLELTKGPIVSALRTYDFLVLFPVNPLTVAKDREAFTPSRAKDDPTDAELQVEILLKHRDKLTPLRPQSPTMRALAQLVEHRRRLVGDKVRLTNRLTSALKNYFPQVLHWFPEKDTAIFCDFLSRWPTLKAAQLARRTTLEGFFRAHHVRSTDLIATRIEAIKSARALTTDDGVIAPNVLLVHALVAQLRVTLQAIADFDQAIAQRAQDHPDFPLFDALPGAGAVFAPRLLVAFGEQRERFTSADALQKYAGIAPVTERSGKKSWVHWRLQCPKFLRQTFVEWAAESTRHSFWAQVYYQQQREKGKAHQAAVRALAFKWIRILSRCWQNRTPYDESIYLQALNRRSAPLLHNLAK

SEQ ID NO: 516305 - protein, 402 aa, unidentified
MAYDFVIGVDVGKYFHHACVLDPQGRQVLSKRINQHEGSLRKLFGQFLADDASVLVIVDQPNNIGRLTVAVAQDMGVDVRYLPGLAMRQLSRIHVGNSKTDVRDAYVIAHAGLNLPDSLRSVDRVEDVFIQLKVLNGIDEDLARAYTRLINQMRSALVGTYPAFEHVLRGQMIHRKWILHLLAKYGGPTKIRRIGRTRLKAFARKHRARNPEPVIDAMLAAIHEQTVSIAGAEYAELGVAMSATDALTKLEHRKEIEAQVLKLIQDIPQTEILLSMPGIGPRSAAQILMTVGDMSDFPDAAHLASYAGLSPRTNQSGTSIMSNSPNRAGNKKLKNALWQSSFASIRFHERSRQFYERKRKEGKRHNAAVVALARRRLNVLFAMMRNGELYRDISTVQEAAAA

SEQ ID NO: 516306 - protein, 324 aa, unidentified
MSDKFLGIDVAKSKFDVALLGQDGKVRHRTFANKPEGFSALRQWLSHQGVEQVQACLEATGTYGVALATHLHEAGLTVSVVNPACIKAFAESELRRTKTDRVDAAVIAHFCRALQPAPWQPPSPEVAGLQALVRRLHSLRQLHTQERNRLAVPGLAEPVRASLTRVLQTLEDEIKLIEEQISDHIDQHPGLREKRDLLESIPGMGQATAHTLLSEMAATSFQSARQLAAYAGLVPQERRSGASVRGKARLSKRGNARLRQALYWPAVVAMRANPPLRAFAQRLRAAGKPTMVIIGALMRKLLHLAFGVLKSGRAFDPNYQASMP

SEQ ID NO: 516307 - protein, 410 aa, unidentified
MEVMFDRVAGLDVGKESVTVCLRTPGVRGRRHAETRTFKTTFGALRVMRDWLVEAGVSIAAMESTSTYWKPPFYCLEEVMEVWLLNAAHMKAVPGRKSDVRDAEWIAQLLEHGLLAPSFVPPPEIRRLRMLTRYRTQLMGDRVRDTTRLELMLEDASIKLSSVASSLNTVSARAMLAAMIDGETDPLRLAELARGKMRRKIPDLAQALTGTFDAHHAQLARSMVGRLDLVEQALAELDAVIVDACQPWAHQIELLQTIPGVGPTVAQVFIAETGGDMSRFPTAAHLAAWAGLAPAMHESAGRRSPAGKRQGNKWLTAMLAEAAGSVGRMHGKNYLAVKHARLLKRRGMGRANIAVGHSILVAAYHMLQRDQAYADLGPDWRERRNVEAHTRRLVAQLEHLGHTVILEPAA

SEQ ID NO: 516308 - protein, 372 aa, unidentified
MKTKTTKTPTPCVVPTPAAPVAAAGFTLGLDLGDRSHYVCVLDATGQILHEGTLVNDRVALALLLTRYPAATVALEAGTHSPWISRYLTGLGATVIVANPRKLHAISRHERKCDRRDAVMLARLARADVALLHPLQHGSAQAQHDLLGLKLRDSLVRTRVNLINTVRFTLKSLGHVVSNPSSEAFHKSILTAVPAECLPVVQPVLTVLALLTGQIKILERDLVTRSKKAYPVTQRLQQIAGVGPLTALCFVLKIGEPTRFGRSRDVGPYLGLCPGRDQSGGTDKQLRISKCGDGLLRRLLVSAAHYILGPFGPACALRAYGQHLTGSSAREKKRAVVAVARKLAVLLVSLWKHGTDYEPRVPAPVPLVLVAA

SEQ ID NO: 516309 - protein, 407 aa, unidentified
MEGCFAGVDWASEEHACCVVDNGGRIVEGRRYRHDERGIATLCRRLVDLGVELVAVERPDGLLIERLLDAGLSVIAVHPNQVAAMRPRFSASGGKSDSFDSFVLAELARTDSHRYRVLVPDSDATKALRALTRAREDLVKTRVGLANELRAQLECFWPGAVKVFAEIDSPIALAFLKRFPSPADARGLGEQRMARFLKRHGYSGRRTPAELLERLRGAAHGRAGELESEARRQIVLALVAGLEPIVARIAQLTSEIRGALADHADGDTFRSLFKDPKSVVTAATMLAEIGDCRARYPTYKALSADGGQSPVAVESGKSKRARFRWACDHRLRDAIATLADSSRHHNPWAADIYQRAIARGATHPHAIRILGRAWCSVIWRLWQDHDVYDPARHTALQHLLATQTTTP

SEQ ID NO: 516310 - protein, 437 aa, unidentified
MSFRLWVAPGPPGVLLLVRAAEELQVSVAKGSGLVPGPTRFAGVDWAKDDHVLCVVDGDGVVVERVAVAHTVAGLARLVRVLRRHQVVAVGIERGDGPVVDALLGAGLPVFVIAPGQVKALRGRYGSVGNKDDRFDAFVLADVVRTDRARLRVLRPDTDQTVLLRRLCRARKALVGHRVATSNQLRAHLDTALPAVVGLFSSLDAPISLAFLTRFATQDALDKLTEARLSTWLARQRYSGRTSAATLLERIRSAPRGPVGVFAAGLAALSQALVATLSTLSQQIKTLERQINAVFAAHPDRDIFANLPKAGTIRAARLLAEIGDARGRFPTPASLACLAGAAPSTRQSGRSRIVTFRWGADKQLRDAVCDFAGDSPNANAWAADLYRRSRDRGHDYPHAVRILARAWLNVIWKCWTTRTPYDPAKHGQLQHLLAQTG

SEQ ID NO: 516311 - protein, 336 aa, unidentified
MSHYCGIDLHSNNHVLVVIDEEDKRLYEKRLGNDLSLTLEALTPYRETLHGIAVESTFNWYWLVDGLQEHGYDLQLVNTAAVKQYDGLKYSDDHHDAFHLAHLMRLGILPTGYIYPKEQRAIRDLLRRRLSLVRTASAQLISAQSQLWRSTGLRIKSAELRKLEFAPPLVDDYTLQAVQAGLAVYQVIQREIDALEQTAHQAVKLTEAFKILQTITGIGKILGLTIMLETGTIDRFAGPGNFASYCRCVDSKRTSNGKKKGEGNAKAGNKYLSWAFSEAAHFSVRFEPLAQRFYERKKAKTNGIIAIRAVARKLARASWMMLKHQVPYDARRMFPG

SEQ ID NO: 516312 - protein, 411 aa, unidentified
MNPVVGLDISKGESEVQAFIDKGKPYGKSFSIKHDLDGLKSLLDFLRGLKSETGINPPVVLESTGHYHVPVVQFLENHQYLLIIVNPLISHRAKSSSLRKVKTDAVDAYRLCELYYKEDLEPYKKRGIQLLNLRNLTRQHDNITGMYVQTKLQFQAVLDQIFPEYRGVFGDLYSVVSLCLLQEYPSSEDILAVNEDALADRIKELCNSRSRRWALDKAKTLKAAATRNPFQKTLYNSHLLSLSMYISMLLQYKEHLSELDATIDTLAKDIEEYKIIQSIPGIGEKIAATIISEIGEIDRFNHPKKLVAFAGVDPEVFESGKFKATLVRITKRGSGRLRHALYMAVRSGIRDCRTKKTTDEIIPRNKRLREFYDKKRSEGKLYKVAVIACVNKLLHWIFAILKNKTTFQDIE

SEQ ID NO: 516313 - protein, 328 aa, unidentified
MCTLGIDVSKNKIDLCLLTAGPGGKKKHKVLTNEPAVARKVVDWLNAQKCVPESVTVVLEATGIYHENLAYGLHEAGVSVCMANPCRVREFAHGMDILNKNDAVDAFVLACYGELKSPAVWVPPSPEVRKLRALLRRRDALREDVQRTVNRLEKANSTSTPQEVIRSLERTKSWLNEELARIEKLITDHTDNDPGLKADLDLLKSIKGVKDQVGREMLALLKDGMFKSASQVAAYLGLTPVEKTSGSSVRGRPHMSKTGPSGVRAKLYVAALTASRWNKQAKAIYERLVAKGKAKKAALGAVMRKLVHLCFGVLKTRLPWDENYVATA

SEQ ID NO: 516314 - protein, 466 aa, unidentified
MQQNFYLGIDVSRGYADFIILDENKKVVEDNFQLDDTFDGHNKLYKILSGFLAKYPASNILAAVESTGGYENNWLKFLSACQSKLQLSVARINPFGVSYNSKATLNRIITDKQSARNVAEYLISHPEKVQYNNQDYYASVRRQWTFIKMLTKQKVQLLNQLESLLYIANPEVLQYCSNKMNLWTLKLLRKYPTAKELAKARLSSVCKIPYITESLANDLINNARKSVASSDDKTTAEVIIALVEQILQLRKLIVLQTKQLQASCNIAEVELLKSFKGIGTYSAVGLMIEILSVERFSSSKKLASFFGVHPVFKQSGDGLSGFKMSKRGRKQPRELLFNIARFATVHNPYIKEIYAMHLQKGMPKMAALGAVMYKILRIVYGMLKHNRQYDPEVDRANRAKHKDNINKAKEDYTRRYQPMDITAPVSRRQLKKRKQKEQSQILKPLDADPLKAGFTGSDSHCFPEET

SEQ ID NO: 516315 - protein, 346 aa, unidentified
MILIGCDFHPSWQQVCWLNMASGETNNQKLVHASGDAEKFYRRLAVPVRVGIEATGNCQWFLELLGKLGHEVWVGDAAKIRACDPRQQKHDPRDARLLLQLLVENRFPRIWTPSSEEKDLRQLLLHRYKLVRMRVQVKNELQHLAMNKGITKGRRLWSAAGEKVLCELPLAPWASRRREDLFKLRSMLNEQVAALDEAVKKAAEENDRARLLMTQPGVGPITSMAFVLTMGDVSRFPRGKQVASYLGLIPREYSSGGHQRFGSISKQGNRFMRMLLVEAAQCVVRYDEGFRNEYLHRCHTKPRGVAKVAAARKLAVRLYWMLRTNTAYPEIARVGSSSRVPLGGAS

SEQ ID NO: 516316 - protein, 343 aa, unidentified
MQVSTIGVDLAKNVFQVHGVDSAGKVVITRQLRRKQVLDFFSKLPGCLVGMEACGTGHHWAREISKLGHTVRLMPPSYVKGYVKRSKNDAADAAAICEAVTRPSMRFVPIKSTDQQALLMLHRTRDLLIRQRTQLINALRAHLAEFGLVAETGREGLAQLGAIITDESNHESLPSAMKQALQAIVDQLAALELQVGALDRAIHAHHRANDMSCRLETVPGIGVIGATAIASTVTDPSDFKSGRDFAAWIGLVPRQHSTGGKERLGGISKQGDRYLRRLLVIGATAVVRQARLHPQKHPWIMRLLAKKPAKLVAVAVANKMARIAWAIMAKGGYYRAPELAAAA

SEQ ID NO: 516317 - protein, 373 aa, unidentified
MSTTPVQFCPMLAIAVEMSGATWLVGSCAGTKLRRKAVSDEAPLVRMRSLLAEVETALKRFGAGEHTRVVVAYEAGQEGFWLVRELRARGIEAEVIDPVSLKVDRRGKRAKTDRLDVEALARALYAWMAGDTTALRMVRVPSKEDEDNREWQRERDRLTSERRSCLDRIGKKLRTHGIWRWDRVALTQGTLRCADGTPLGRMLQETLRMELDRVEKAEARLDVLNAQVAELTDAAHSRIERLALLRGIGEIGGRGLALKLYWRDFNNRRQVGACTGLVSLAYDSGTMRQDQGISKQGDPSLRALLVEVSWLWLKHQPTSAISAWFKRRTEGQGKRHKRSMIVAVARRLAIALWRYLKDGVVPEGATFKAGRPI

SEQ ID NO: 516318 - protein, 341 aa, unidentified
MKTQRHIGIDLHRNNFTCCLRLENGRNYLSDWKLEDLPRFIQKLRPSDEIAVEVTGNTRLFRDAVAPYVARVVAVNPNQFQVISRSVKKTDPNDARNLALYLEKDLLPEVRMKDKTQAQLASLTQTRDTLVKLRTSLKNKINNILSAHGINLEKEALSSEKKLNEVLAMKFDPMVKIELEVIVEEIRSLNQKVAKLEKTIADEGSKLEGHKNLTSIKGIGPLSGSILLSVIGDINDFEDEGKLAAYFGIVPRVANSNETEHSGRITKRGSKLGRTALVQCALIAQRYSPYLKRYYEKIKARRGTGKAIIALARKLLGIIYRTLKNKWVFEDFPNFVLAEAT

SEQ ID NO: 516319 - protein, 406 aa, unidentified
MNYLGIDVSKASSRYVFLDNDGEKAAKPFTFDNNHESFTQLLERFKELNLQPDNLIVGIEATGIWWENIYCFLTEQKFKVIVLNPHQTNKFREALRLKAKTDDIDAYVIAGLLRSGEYAASYIPEETIQILREIVKLRHQLVTNRQSFERQACALLGLLFPEYEKTAIKNPFATASFAILKAYPTAKHLAEAKPKNIEKIVRHIQGNNFNIEEIQALIETAKNSIYSGRAKDARGLNLIILLTHAQTLRDSIAQLDQRINDVLSPENSDDANSFPGANLLTIPGVGPKTLAALLSVVGTNGSAYPDGKSLIGYIGFFPQIYESGETRRDNTIAKRGPNYIRRALYLSAVACLKHNREFKSFYDKKRSQGKEPKQALICVAKKLAHTCLSMLKSGESYNPARVFMPV

SEQ ID NO: 516320 - protein, 423 aa, unidentified
MEEIFGEEEEAEPVARVAALDIGKATLTACVRVPHEDKPGRRRQEVRTFATVTGSLLELRDWLTCQGVTLCVMEATSAYWKPPFYLLEDAIECWVVNARDVKNVPGRPKTDRLDAVWLAKLAERGMLRPSFVPPPWQRELRDLCRYRRTLIQERTREKQRAEKLLEDTQIKLSSVISDIFGKSGRDMLDALIAGQRDPHVLAELARGSMRGKKSVLQEALTGHFRDHHGYLLKMMLDRTDALTAQIEALTGRIDEAIALFAHQVTQLDEIPGIGKTGAQELIAEIGTDMTRFPTAGHLVSWAKYAPKARQSAGKNKPGTTGKGNPWIGGTLGEAGIGAARTKTFLGSRYHRLARRRGKPRALVAVGNSILIIAWHLLSDPDARFTDLGPNWHDRLAPLRRKRQLVAELERLSGKKVLLQEATA

SEQ ID NO: 516321 - protein, 423 aa, unidentified
MDLMHERVAGLDVHKETVVACVKIMVAGKASRECRTFDTTTAGLEALLTWLTESGCTHVAMEATGIYWRPVWNILSEGPFELMVANAAHIKNVPGRKTDVNDATWIADLVSFGLIKASFVPEREFQELRSLLRTRKQLTREQTSHVQRIQKTLEEANIKLDSVITDIMGVSGRRMIEAMIKGVKNPFKLAELADRRIRASRKQLYDALHGRLTDHHRFMLRLYLRHYDALEHAINEIDEQVDAAIAKMDAEVAAGQATFRSLIALLCTIPGIAELAAKTILAEIGTDMSRFPTAGHLLAWAGLCPGQNESAGKRKSSRLRKGSPWLKTLMVQCGWAAARKKDSYYKAQFNRLRGRHGGKKAVCAVAASMLTAIYHMLKNGTEHHDLGADHFDRRSTDIKARRLAAQIAKLGFQVELRKLPEVA

SEQ ID NO: 516322 - protein, 396 aa, unidentified
MQDTQQRDAVDVFVGVDVGKGHHHAVALDRNGKRLYNKALPNDEAKLRALIAELKTHGRLLFVVDQPSTIGALPVAVARAEGVLVAYLPGLAMRRIADLHAGEAKTDARDAAIIAEAARSMPHTLRSLRLADEQLAELTMLCGFDDDLAAQVTQTSNRIRGLLTQIHPALERVLGPRLDHPAVLDLLERYPSPAALAGTGEKTLANRLTKLAPRMGKGLAAEIVQALSEQAVTVPGTQAATIVMPRLAQQLAALRQQRDEVAVEVERLVLAHPLWPVLTSMPGVGVRTAARLLTEVAHKAFASAAHLAAYAGLAPVTRRSGSSIRGEHPSRRGNKVLKRALFLSAFAALRDPVSRAYYSRKIQQGKRHNQALIALARRRSVRHAARRHHLPTQVSP

SEQ ID NO: 516323 - protein, 312 aa, unidentified
MTVTIVETRAEIRAITGGVDTHADVHVAAALDPIGGLLGVKEFPATAAGYGRLLSWLGGFGTVCLVGIEGTGSYGAGLARHITTAGIRVVEVDRSDRQDRRRQGKSDPLDAVSAARAAQSGRARGASKGRDGAVEAIRALMVAKRSAAGERTQTINQARALILTGPDDLRARFTGHTTAALVAELASLRPRPGSTVGYATRIALRELGRRAEFLDGQLERLDELIGPLAAARAPGLLALYGIGPHTAALLLIAAGDHPERLRSEAAWAHLCGAAPIPASSGKTVRRRLNPGGDRQANHVRDVSAVPNAGRPG

SEQ ID NO: 516324 - protein, 372 aa, unidentified
MNYNTVYVGMDVHKESFTLCSCKYEDEKASHYQRTPASYKNVLRYLAFLRTIYGEYTRFVCGYEAGCLGYSLYHQLENFNVECVILAPTTMLEQRSKRRIKTDKRDAEIIARSLAQHNYSPVHIPTETDNQTKEFIRMRDDHKAELKKIKQQILSFCLRQGYQYDGSGNWTAKHVKWLRSLKPAGLYKEILDEYLLTYTILTDKLNRLDQRIEELASKEEYKESVSKLTCFLGIKIHTALSVIVEVGDFQRFVSARKFAGYLGLVPGQHSSGDDRNGLGITKAGNTHVRRLLVESAQSYTRGKIGYKSRVLRSRQAGNSPQIINYADRANERLRRRYYQMVLKDGKKYNIAKIAVARELACFIWGMMTDNIY

SEQ ID NO: 516325 - protein, 368 aa, unidentified
MKKVSTAAAKASRNISRQTLTVGLDLGDRNSWYCVLDEAGQIQLEQRVGTNAKALREVFGAMPRSRIALETGTHSPWISRLLSELGHEGIVANARKLRLIGESRKKDDRLDAQTLARLARIDPQLLYPVKHRSAQGQADLAVIRARAGRVRARTAMVNTARGLAKSYGERLRGCNVRNLNPEKAEALSPELQAALQPLLAALESVSQQIREYNQQIETLAQERYPQTALLKQVKGVGTLIALTFLLTLEDPQRFGKSRDVGCYLGLQPGRRNSGKSQPQMHISKEGDPYLRTLLVQGAQHILGPFGVDCDLRCWGLKLAERGGRSGKKRAIVATARKLAVLLHHLWVSGEVYEPLHNSRRRTTVAAAA

SEQ ID NO: 516326 - protein, 507 aa, unidentified
MGTKSRKQVKRLMSGSSYSSEELSSLTMDDGTTVVYSVNGDIKRSICGSVDVHKKILMAAICITDPDSLKSTFFVRKFTTMTADIRPMAGWFPEHDVRDVCMASIGKYWIPVFNILEQNDIKPILTHPKYVKQAKGHKTDFRDAIHMASLFRMDLVVASFIPPAEIRDLRELCRYRLKLTYIRTSEKNRFQNSMTISKVRLDSVFTDPFGKSASAIMEYLMSTDPEQVNDDDILALISRRGNVKASIEGILDSIHGYEFIGVQRDKLQIIRMHITQIDECIDMIDSKLEYYRQKYANIIHHLTTMVGITSMSALYILGEIGTDMSVWRDDHSLACWAGLSPANNASAGKKKSTKVGNGGHYLKPLLVQCALAAVKSTKKDPYIHHKYETLKKRRVHKNAIIAIARKMLVAIYHMIRDDTNFHPIDQEEVTQKTKKTQGLNLKNVLIFLKEHGADRNMIRMVEEQCSENTEIKHAQEKQSNLAITDASQPIKEPVNGMSLSTSNRVAP

SEQ ID NO: 516327 - protein, 389 aa, unidentified
MYLIGIDISKYKHDCFIATEAGEIIKDSFSFGNNALGFSQLLDVLQALDSSQIKKIGLEATGHYGYNLKVFLDRHGFDYMEFNPFLVKKLSTALSLRKTKTDKADARFLSMILLSVDYRTYPVKSYHIQELKSLTRYYKSLVKKRSRELVELTNTLDLIFPEFKPFFQNRFSQTAYYILEHYHTPERISRMSYQNFEKLHSISKGHFSYAKFLHLKDLAKHTVGSSSELLVFEMKSCIRLLNDIKQEIKSLESLLIAWTHKIDSPVFSIKGIGFVSALSLIAEYGNFISFDSPAQMLSFAGLEPSIIQSGTSNKQGHMVKHGSGYLRDTLMNITIPFMMHNPVIYDYYLKKKTEGKPHLVALSHVAKKLIRIIFFLVKSNRQFNENKLV

SEQ ID NO: 516328 - protein, 388 aa, unidentified
MQDVADQSAAPTTIGADLCAIFVSLELSRSTWLATSLSPGRGEKMSKHSVSAGDIAALLARFSELRRKACARTGKSFPIVVIQEAGLDGFWIHRVLLSEGIESHVVDAASIATSRRRRRAKTDRIDGETLLRALLAHKRGEPRVCSMVRAPTPEDEDRRRICRERKVLIMERVQHVNRIKGLLFSQGASGYEPLRRDRRARLEALQTGDGRRLPQHLKAQVCRELDRLELLLEQIKAVEVERDALLNAEQTKVSAPPPMLLGVRGVGPEFASVLWSEGLSRHFDNRRQVAAYAGLAPTPWQSGSVNREQGISRSGNARLRTTMIQLAWLWLRHQPRSALTLWFKDRIDRNGGRRRKTTIVALARKLLVALWKYVSAGVVIEGATIRPA

SEQ ID NO: 516329 - protein, 351 aa, unidentified
MRFYDQRHQYTCGIDLHARTMYLCVLDRDSRIVFHRDLPARPEALIEAIGPYRQDLVVAAECMFAWYWLADLCQDQGIAFVLGHALYMKAIHGGKKKNDKLDAEKIARLTYGGNLPVAYAYPARMRATRDLMRRRCYFMRRRAELLAHIQMTAQQYNLDPFTKRLCHRRNRGDVGDHFGALDKSVQDMVQADLQTIDHLDEQIRHLELAITRRAKGHDAHTYHLLRTVPGIGKVLALVLLYEIHDIARFARVQDFVSYCRLVRGRKESAGKASGGPSGRKIGNAHLKWAFSEAVILLMRESEAAKRFVDRKARRHGKGKAISILAAKLGRAVYLMLRDRKPFEIDRFFAQG

SEQ ID NO: 516330 - protein, 368 aa, unidentified
MFERTHVGLDVHALTVAACAIDGQTGEILRSRLTPDHGQILAWIQGLPGPCKVVYEAGPTGFVLARFLRAAGIDCVVAAPSKLQRPPGDRVKTDRNDALHLARLLKLDQITEVTVPGPGQEAARDLVRAREDTRGDLMRARHRVSKLLLRQGIHYTGGDTWTQAHLRWLYRQRFDSAALQLAYDLALDAVTETLARRDRLDKAIVKLAYDSEYTPVVRALQCLRGISTLTAFGLAVEIGDWNRFTGRTIGAYLGLVPSENSSGQHRSQGSITKTGNSHARRLLIEAAWHHRRPYTHPSVLMRSRWEAATPAARARGQAGNLRLHDRWLVYLDHRKRPVVANVAIARELAGWCWSLASEAQTTAAQQRP

SEQ ID NO: 516331 - protein, 343 aa, unidentified
MQAITTIGLDIAKSVFQVHGVDANGQVVLRRQLKRRYVLAFFEKLAPCLVGIEACASSHHWARQLQALGHNVRLMPPAYVKPYVKRQKNDATDAEAICEAVSRANMRFVPAKTSEQQSGLVLHRTRHLFIRQQTSVINAIRAHCAEFGIVAPVGRRGVEELLNVIANAKDEQVPAIARACVAALGAQLHRIKQQIVEFDRMITAWHRCCETSRRLDEIPGVGPALATALVASVANPRAFRSGRDFSAWIGLVPKQNSSGGKPKLGSISKQGDRYLRGLFTAGALAVIRYAKIHGTRHRPWLTALLARRPTTVAAIALANKIARMAWAMMARGQHYIEPIALAA

SEQ ID NO: 516332 - protein, 282 aa, unidentified
MMKKVLKEVLGVDVAQKELVVTVGRMFDDLSIDLYAHKVFKNNEAGFVALLDWIKKLTSNELKVRFVMEATGIYHQKFAFYLYDHGREVTIVLPNKISNYIRTLENKTITDKSCSEAIAQFGLERNLDQWHRPKKIFHMLQQLTRERDQVVSERVIVKNQVHAEKSEVEPNERSLQRLNERILLLNKQEKEIKADLGMIVNGDADLNTEIKRICSITGIGKLTAIIILAETNGFELVRNKKQLTSYAGLDVKEKQSGTSVKGKPKISKKGNRHLERQCIYLP

SEQ ID NO: 516333 - protein, 380 aa, unidentified
MKSILDCCCGLDVHKDKIEACILKTAEQTAIRSTFGSKSSELDQLCKWLNENECYHVAMESTGVYWQPIYDRIEEKCPGILSLMVVNAHHMHNVPGRKTDVKDAEWIAELMQHGLLTNSFIPRKEIRTMREISRARRKYVQERATHLNRLEKYLQSHGFKLSSVISNILGASGEKILRKLAVQGSLSLSEVASCCNQRLRKSPEEIYEAITGKLEQLDCLFLQTELDWLDNLNSHIDRLSVLLKEITKDFREKVSILDTIPGIDEDSAIEVLAEISDSPKDSFATAANLSNWAGLAPRNDESAGDIKSRKILHGNPYVKSILVQCAWAAVKARNSRFSIWFWKHSGRLGRKKAIIAVARKLLVTIYTMLETGETYNPLAA

SEQ ID NO: 516334 - protein, 358 aa, unidentified
MNSPAKITIGMDLGDRRHAVCILNEAGDIVAEEYIANIRECLEAFAVRHPGATIAMETGTHSPWVSRLFAARGHRVLVANARKLRAIAQSQTKSDVEDARMIARLARADPKLLSPIEHRSERGQRELVKLKVREALVRARVNQMNSVRFLLKSLGVVVPGQVKATAFVRKLRAQVDAATCALVEPLLAMLDALSAQIKVLDEQLEKMAAQDYPATQRLRQIDGVGPLTALCFVLTLEDPKRFPHTRDVGAYLGLVPRSDQSGNTDKQLPITKAGNTHLRCLLVNCAHYILGPFGPPSHLREAGLRIAARGGKSAKKRAIIATAHKLAVTLLALWKSGADYHALPPAAPTLTAPAQQAA

SEQ ID NO: 516335 - protein, 403 aa, unidentified
MKYFAGLDWGGTTHAICVINQTGEVVLRTEVGNDARGLESIQKQLKRIAPASAIPIAIERPSGLIVDALVAFGHTVVPIHPNAVKACRPRYSATGRENDLGDAYLLADVLRTDGDRFRPLVPTSDAIKALRALVRTRDDLINQRLALSNQLQALLASFWPGPAALFYQIDSAIALAFLQRFPTPSSAAHLGEKRIAAFLQGKGYSGNRSANELLTRLRAAPVGLTGKLEEQASGELVLVLTRVIAPLQEQISILTARIESEIKQLDDGVLLMSLPYAGHLTAAKILAEVGNVRERFATAEQLAAEAGVAPVTKQSGKSRSVTFRWACNHRLRVAITLLADNSRRGSPWAAHIYKAARARGCRHPHAVRILARAWVRVLWKVWTTRVPYDIRYHTSARALVEAA

SEQ ID NO: 516336 - protein, 322 aa, unidentified
MAMLSFGGIDVSKDRLDVVVLPEEECSSVPNDAAGWAELVERLRGFSITAIGIEPSGGYERGAMRALLAAGMPVRQVNPFKLRQFARASGVLAKNDPLDARMIASFVTIMPTRPAQRQTPAAERLAEMLATRRQLSAEKVAAENASRLLEDAMLQRLSRRRIVRLAADIDLLDKRMVEIVATDDALVHRYRLLTSMPGVGAVLACTLIALLPELGRMSRKQVAALVGVAPYAFESGTLKGRRCIWGGRAHVRQVLYMAAMSASNWNPVLKAFHDRLTAAGKLPKVVIVAVMRKMITMLNAMVRDNVVWADRLSGRRVLPTAR

SEQ ID NO: 516337 - protein, 342 aa, unidentified
MRFYCGIDLHARDCFLCVIDDQDKIHLKSKVPNHLPSILDRLEAFSPRPSVVVESTLNWYWLVDGLQEAGFEVKLAHTMGLFMITGAKVKTDRRDAFSLARLLRLGAIPEAYIYPKEKRPIRDLLRRRNRLVSLRAAVYGDLRRTLLQHGLFGYSRDEIKGLSEAEIVHNFEHPTVRSSGQLQLERIGLYSRQIKDLEGMILATVDEEPLFELLQTIPGVGKILALTIYYEAGDIHRFLGPKKFCSYARVVPGLAQSGRITKRGRGSKQGNGYLKWAFSQAAALAVRFDPQVRRFRQKHLARRRSKARKLISLSIVAHKLATATYYVLKDQVPFDKELMFSP

SEQ ID NO: 516338 - protein, 409 aa, unidentified
MKKASSPQAGSATDNLVAEAATFIGIDFHKRYSVFHAVDAAGRDLGKGRIDHHSPQGFTQLVQRWPNPRVVFEASMNWHWLYEVLERVMPAGHITLANPFKTRIIAEAQVKTDKVDAKILAMLLRAGLVSPVHIPARETRDRKEVLRQRCFFVRQRTMLRNRIHRLLGAQHDLKLPQCSDLFGRKGMSFLEKLDLPAPAGLLLKQQLEMLKNIQARIKEDEAALAQMMSTTAAQSHLLSIPGMGPILAAVAVSEIDEIGRFSSAQKLCGYAGLCPSTSSSGGKTYNGKLMRHCNKWLRWAFVEAAWVAVGCCPYFGDLYRAKKANGKKSNTAILCVARRMCRITWQLLTDERDYETFPPEHEDGRRPRRGAKAQPKTRHPTASAKPRTRDAKGRAKAAKRLSPAAPIAH

SEQ ID NO: 516339 - protein, 511 aa, unidentified
MDLVVTRAGSLDVHKEQVTACVRTPAGSGAERRELVREFKATVRGLLALRDWLAEHHVTHVAMEATGVYWRPVWHILDGEFELLLCNAAHVKNVPGRKTDVADAVWLCRLLEYGLLRSSFVPPLAVRELRDLTRRRRTLVRERAQEANRVHKTLQDTGIKLDGVASDMLGVSGRSMLDALIAGQQDPKVLAQLAKGRLRVKIPALEEALEGRFTASHRLLIGGILRHIDFLEAEIVTLGEAIQAHLEADRELEGNARPFELAVRIACSMDGIQQRTAEMLIGEFGTDMSRFPSDAHFASWGAQCPGNHQSAGKRRSGRTRKGPRWLDGTLHDAAMGAIRVKDGHFARKYRRIKARSGHKIAIGAIKHAILIALYHMLKNGEMYRPPTPNPHAEAKRRERTTQRLTAQLERLGHHVTLTAGAPRLTNAIWWRRRLYDRTRGRPVRRAAGSSGRSKPCRRPEPVLRRSASRWPRSRARSPRSGHRERQGQSRGMDRSCPLSRSGDPPLAAQAS

SEQ ID NO: 516340 - protein, 357 aa, unidentified
MPTSLSSSPTRTIVVGIDTHKDVHVAVALDCLGRRLAELHVPTTTAGYSSVEQWAANLGTVDAFGIEGTSSYGAALARFLRQRNYRIIEVNRPDRATRHRLGKSDPIDAEMAARLVLAGIAKGTPKAGDGPVEMLRMLKLAKDSALKSRTQAMNQIRAIVVTTAAELRETLTDLPARQLVNQCAAFRPGPLTTATAVAKYTLRLLARRYLQLRGEIDALGLEIERLVSLAAPALVDVFGIKADGAARLLVTAGDNPERLRSEAAFAALCGSNPVPASSGKTERHRLNRGGDRQANAALHRIVVVRLRWHAPSQAYMQRRLAEGKSKPEIMRCLKRYVAREVFAILRPQASTPDRHDV

SEQ ID NO: 516341 - protein, 349 aa, unidentified
MTFYNRSHELYCGIDLHAKRMYACVIDQRGESLFHRNLNSRPEDLALLCERFAGRDLVVGVESTFNWYWLADCCDERGVPFILGHALAMKAIHGGKTKNDKQDSLKIAHLMRGGNFPTAYVYPKHLRAQRDLIRRRCYFTRQRAELQAHIRITAAQYNLPTPTGQLRWQSNQKGVAESFPNEAARCTIAADLAMINALTKQISQLEKKLVEMARFDDPSTFFRLKAVPGIGDILALVILYEIGELKRFRTAGQFLSYARLVPGQHTSAGKNYGSPGRKQGNPQLKWAFSEAVSLLKQQSPTVKSAFTKLEKRHGKGKALSILGARLGRAIYLILKRGDIFNEHQFLKLD

SEQ ID NO: 516342 - protein, 378 aa, unidentified
MPSENTVHVAIELSASSWLVAVRPPGAEKSRLYRIEGGETTALLALIAELRSRASTKLGRGVDVACCFEAGRDGFWLHRLLTAHGIAAYVLEPTSILVNRRARRAKTDRLDAEGILRVLAAWLAGDRQVCSMVRVPTPEEEDAKRPHREREHLVQEKLRIENRIEALLFTQGIRRRPSLRSWERDVAELRTGDGRALPPLLEAELDRLWRRLVLILELIREVEAERAAALAAAADDRIVQKITALQRIRGIGTNFSTVLVREVLYRSFANRRQLASYVGIAPMPYQSGGMDRDRSISRAGNPRARTTLIQLAWLWLRYQPGSALATWFRERVGRVQGRTRRIAIVAMARRLLIALWRYVETGVLPEGVEIRAEADATA

SEQ ID NO: 516343 - protein, 329 aa, unidentified
MIAMTATPERFVGIDVSKATLDVHVRPDGRDHQFANDDDGIAALLGCLKDVRPTMVVLEATGGYENPVLAALSLAGLPVVLVNPKRARDFAKGLGQLAKTDKIDARMLAEFADKARPPVRPLDAAATQKLQVLLTRRRQLVGMRTMEKNRLGTVADRAVRRSLEAVLRTLEKEIGKADRDLDAAIQESPVWKTKDELLQSLPGIGPVVSRTLLADMPELGTLTREKVAVLAGLAPIAWDSGTRKGKRFIRGGRTTVRNMLYLAAHAAKQGNALLRSFADRLAAAGKPPKVIRIAIARKLLIMANAVLRDQRPWELKPARDELTRSALAL

SEQ ID NO: 516344 - protein, 318 aa, unidentified
MKPDAECFVGIDVSKDTLDIAVLPASESWQTVRDEEGIQALVARLEQLNPTLIVLEATGGLETHLVTALATSPLPVLVVNPRQARSFAKALGKLAKTDSIDAYVLAEFAQKVRPEPRPIKDEQLQELAALNTRRQQLVAMLTAEKNRLATATKRLRKDIQAHIRWLEKRIKDLNAQLDQHIRQSPVWREKDQLLQSVPGVGPVLSRTLISQVPELGNLNRKAIAALVGVAPLNRDSGSLRGKRTIWGGRAPVRASLYMATLVASRFNPIIKSFYERLVAAGKPRKLALTACMRKLLTMLNAIVKSCTPWKFTLKPTAP

SEQ ID NO: 516345 - protein, 344 aa, unidentified
MDISVLGIDLGKNVCSVVGLDASGAVVMRRKVRRETLIALAEKLPPCVIGMEACCGAHHLGRVFAAHGHDVRLMSPEYVRPYVKAQKNDDRDAEGIAEAATRPTMRFVELKSQDRLDMQTLHRSRDRLVGEGTALINQLRAILLERGMVAPQGKRKLEQFLSVLMDEQDGAGLSPRMIVLVADARKQWAELDRRISAFDAEFVRWVKENEEAHRLITIPGIGAIVASALVAAVGQAESFDRGRDLAAWLGLVPRQFTTGGKPKLLGISKRGNKYLRRQLIHGARAALPYVVERDTPLGRWAKDLSSRAHRNVAVVAFANKLARIAWAVLRRKERFAAAGLPTAA

SEQ ID NO: 516346 - protein, 418 aa, unidentified
MKIIYERVAAIDVGKKVIAVAVRTPGERVGRRRQQVRKYNTFHQTLAEMVAWLICEGVTHVTMEATGIYWKPIFHALCEAEQPLEVLLVNAGHVKNVPGRKSDALDAVWLAELTECGLLRGSFIPPPHIAAIRELTRYRKKLIEARTSELQRLAKVLEDSGIKIDSVASALTTLSARDMIEALIAGQRDPAVLADLARGVMRKKIPALTMACAGRFSDQHALMCTLHLEHIDHLANMIIRLDTRIDEATVPFAQQTELLATIPGIGKRAAQVIISEIGVDMSRFPTAAHLASWAGLCPGNNESAGRHRSGKTRKGNTELCQILTECAWSAGRTSTYVGAQFRRFHRRFGKKGGPKAAVATAHTLIVIIWHVLAETTAYRDLGADYFTRRIDHPDTRKRQLIRELEALGHKVTIEPAVA

SEQ ID NO: 516347 - protein, 416 aa, unidentified
MWKQRNKACGADIHKNTIVATILSLAGTKNQAEFGTTLSELLRFKAWLIDNGCEVVAMESTGTYWIPIYSILEGHIEVLVANPYMIKHIPGKKTDLTDSEWLAELCLKDLMVPSRIFPKEDRVLRSLTRAREGLVKIRTQLKNRIHRDLSSSHIKLSSVVTDIFGKSGMHILRGLLDDRSIDEIIDGIPSGRVKKNAAKIKESIENNLDSSQIFLIESSLDLMRYVQDKIDMIDADLKRKISTRLNDLKIAMSVPGIEFTSAVTVLAEMGDYRNFRSPEKLASYFGIVPFVNQSADRLHTGCITKHGSKHLRWIMVQVAHAASKKIGSKLRKFYLRVRARGGANVAIVALARKILCILHHLLMNQEMYEEPGVAKRTRAVRVDQASSQRAITAQEMIDILRRSGYEVRKIDRGACG

SEQ ID NO: 516348 - protein, 403 aa, unidentified
MSNYFAGLDWASKTHALCVIDERGGVVERFDIDHDAGGLTELRRRLRRFGSPPVAIERPSGLLVDTLVDADFTVVPIHPNAVKASRPRYRSHGGKSDASDAYVLADLLRTDGHRFKALTPQSDEIRALRALVRGRDDLVATRVQLANQLRTLLESFWPGAAAVFADIDSPIALAFIERYPTPQSASRLGPKRMAAFCAQHAYCGRRSPDDLLARLQEAPISVSAETEMEAKGELARCVARTLTRLVEQLRLLSSRIEHLVASLDDGRILMSFPRAGRICAAQILAELGSVRERFATDAQLAAEAGVAPVTYESGKSKAVTFRWACNHRLRAAVTCLADNSRHVNAWAAHVYANARARGCDHPHAIRILARAWLRVIWRAWTDRKTYDPMQHRAAQVLLKTAGG

SEQ ID NO: 516349 - protein, 343 aa, unidentified
MNTQNLALTSLDLGKNCFHFHGQDSRGQYLFRSKISRSKVFSYIAQLPPCTLAMEACGGAHFMARFAASCGHQPKLIAAQHVRPYVKSNKNDYTDAEAIGEAASRSAMRFVAIKSEAQQALSMLNMTREAFIRDRTATVNRIHAFLLEWGVSLAPTFKSVRELPETLEKLHAPGSVIRLFEQFHAHFNYLDEQVKALTKELESQVAGDDLATRLMTIPCIGPITSSALAAELGDGKQFKRGRDYSASIGLVPKQLTTGGKPRLLGISKRGDRNQRRLLVQCSHTFINHLDKQSGRLADWVRVLLTRHHPNVVVCALANRLARIAWAIAHSHGIYEAGPSAQNA

SEQ ID NO: 516350 - protein, 404 aa, unidentified
MQQCTAGLDLASEEHRLVVVDGKGRRLEERRVSHSEDGIDALIRMLADLQVLRVAIEQPNGLVADRLLDSGIAVVAVHPNQLAAARDRYRTGGGKSDGFDGYVLAELARTDMHRLRLLAPDSDETKALRTLTRTREDLVEQKVALANQLRAQLDAFWPGARQIFFDVDSPIGLAFLERYPSPTDARGLGEKRLASFLARNGYSGRRSAAELLVRLRSAPQGRTGEAELEARRAVVLALVAALKPLVEQIRLLTSQIAGAVRAHDDGHIFLSLFRDPKSVVTAAELLAEIGDNRNRHPTSASLEAIAGQAPVAVQSGKKKVACFRWACNKNLRAAVSVLADSSRKHNPWAQKIYADAIARGHDHPHAIRILGRAWLRIIWRLWQDQNTYDTQRHGSLNRLLAAQG

SEQ ID NO: 516351 - protein, 350 aa, unidentified
MRHFIGCDAHKKYSLFVAVDEAGDTKPAVRVNHDRESYRTFLRGLTPRSSIAVETVGNWYWIVDEMQQAGHHPRLAHARKAKLMMGQLDKTDKLDARGLATMLRNGTLPEVWIPSREIRDQRELLRLRMTLVGMETRLKNRVHAILAKYAIRLDVQDVFSQKGRRLVLEHLENLPEETRQVVRQHLELLESTGRQKKVTEQRLQTIVKQRDDVDLLKTLPGVGWILATVIALEIGDIHRFNQAPELASYAGTVPRVHSSGGKTRYGRVHPDVNRYLKWALVEAGNLIVMQQQRLGDIHAVRLYRRLRRGKGHAKAVTAVARHLAEAAFWVLKRQEPYKEPQGCRVSSTHR

SEQ ID NO: 516352 - protein, 346 aa, unidentified
MYVGLDVHKRVCYATLTDEKGRVIKQGKFSNDEYGLNSFMQGIDEAQVAMEAGYCWQPLYDHLKEKGYDVKLAHPLKVKAIAEAKIKTDKVDSETLTHLLRANLLPESYVPPKDIRELRDLVRRRAFLVGMRTKLKNRIHAELVRRGIDLGVPLFTLAGQELLRSHGIEAVDQMLPLIEALNQQIKRVNVSLRRMSSDDERARLLTTIPGVGYYVAMLLVSEIGDVKRFSSSERLCSYAGLVPSVRNSGDTRRHGGITREGSKWMRWALTQAVHVHVRYESDLSRFYYRLAGRKTSQEAVMATARKMLKVVYWMLLDGVPYRAEMGVDSARRVNLDGGDPDPCPCG

SEQ ID NO: 516353 - protein, 339 aa, unidentified
MKQMTVGADIAKNVMQLHYIDAETGEIVNKPVKRAVFLEHFANRAPCLIGMEACGGSQYWARKLTAMGHEVKLMPGKFVKAFVMGNKNDAVDAKAIWLAVQHAERSVAVKTEAQQAVLGLHRMREQLVKFRTMQINGLRGLLTEYGEVMGKGRAALDKAIPTVLERLVDRLPAILIDTLREQWSGLAELDKQIAGIERRLQMWMREDKACKAIAAIPGVGLLTATAAVATMGDAKTFQSGREFAAWIGLVPKQTGSGGKVQLLGISKRGDTYLRKLLIHGARAVLCLTKEPGPWAEGIRKRRPLNVAIVAQANRIARTIWAILAHDRPYEKGYVSVKPG

SEQ ID NO: 516354 - protein, 387 aa, unidentified
MQKPHDDSKACLTAFIQDSTLTVVIEMSLASWLVAGMIPGVNREPLKKIAPNPEVLLQLLHRWRDEAIKAGKEITRIAVAYETGRDGFWLARWLRARGIDAHVIHATSVAISREHRRAKTDRIDTAMLRRGFLGWLRGEPGHCSMAIVPTVEEEDAKHPHRERETLIKQRTSTVNRMKSILIKFGVRDFNPALRKAPAKLASVRTPEGIPLPSNAVAALQRHMQRFSVIKEQIKAIERTRLQRLQRDPTEKFNAMVFLLVRIIGFGVETAQQLVHEMLSRSLRDRKAVARYAGLTGSPDESGSKRREKGLSRCGNRRVRNILIQLSWRLLKFQPKSDLVVWFKKRTANARGSRKPMIVAFARKLIIALWRYVNTGLVPEGFQLRSAA

SEQ ID NO: 516355 - protein, 417 aa, unidentified
MQSRKVGSQSEHTRTVVVAVDISKDTFTAYFRCLLTGKQRSVRSYPYHRKGVEQLYDEAQKFAAENGSMHMILGLESTGVYHLGMVEFFKDKPVEIQQVNTLHVKRMKDITDNTPTKTDWKDPRVIADLIELGRGLRMGVAEEVFLELRQLTHARERVIADYTAVGNKLSNLVHILFPEFHRFFTNIHGSTARKMLKMYPLPSQIGQLGENDLYDFLKKESRGRYNREFAEGLFEAAKASLGCVQGAQNYITEIHVLIDLCELMYKAKKSYEDRIYSLITELPLAKVLLSFKGVGPMTTATILGEYTGFEGFETIAEVLKYAGMNLTECSSGKLHGRRRLAKRGRPLIRKILYFAAMNMVRKGNEFHDKYQRYINAGKPKVAALMAIARKILRIMFAMSKSGQSFNKEYAQKYLKAA

SEQ ID NO: 516356 - protein, 413 aa, unidentified
MDRKTASAGIDWAKDENAICVLDADGRRLFEGRFAHDERGIAFLCAKLVEMGVERVAIERPEGVLVERVLEAGLVVLAVHPNQLKASRARFRAAGSRAKSDSFDAFCLAELSRTDHHRFGALSPDSDQTKALRAMTRARQELVRTRVSLANRLRAELEAFWAGAAVVFSEIDSAISLAFLERYPSPEDARRLGEKRLEGFLNRQGYCGRKDVGELLKRLRSAPEGRTGEAERRARREAVLGLVWILKALVERIKRLDDEIAKSVRAHPDGGIFLSLFRGKDTTLTAASLVAEMGDERERYPTEDALAADAGMSPVAVESGRRKVAAFRRACDKRLRKALATLAESTRHHNPWAEDVYLRARARGCDHAHAIRILGRAWVRVIYRMWQDRMPYDPAKHGNLRRLRTARGLTQGV

SEQ ID NO: 516357 - protein, 366 aa, unidentified
MQEISTMQASGSDNFKGPQVTIGLDLGDRTSNYCVLNATGEILLEDKLPTTSQAMKQLFGRMLRSRIAMETSTHSPWVSRLLKELGHEVIVAHAQKVGLIVKSRKKDDRIDARTLARLARIDPQLLSPVQHRSAQAQIHLTEIRARAELVRARTALVNSARGLAKSYGERLRKCGTQQVGRELAMGLSAELRAALEPLLREIESLNEHIKEYDRRIEKMAKDTYPEVKLLQQVKGVGDLIALAYVLTIEDPHRFKKSRDAGCFVGLQPGRRNSGESEPQMHITKEGDRYLRTLLVQGAHYILGPFGEDSDLRRWGKKLAERGGKKAKRRAVVAVARKLAVLLHRLWVSGEVYEPLRNSKKAMSTAA

SEQ ID NO: 516358 - protein, 347 aa, unidentified
MLHAGLDLSRKKLDVCLLSDDGEHLDQLAVPPDVDSLRTLARRIDEVHREPVCAVIESMTGARIVHDTLEACGWSVEIADAQKVKGLAPLACKTDKIDSMVLAVLSHRDLVPAIWLPDPRVREERELARFRLHLVKHKSALKCRIHSTLINFGRACPVTDLFGVEGRRLLERLEVPEPWRSNVTASVELIDDLEHQIAEINRRLREGHADHPYIPLLMSVPGIRWVLAFTIAGEIGEIERFSSPEKLAGYTGLCPRVNQSGEKDRRGPLTKHGPTYLRWALLEATMHALKHPAYSERYQRNKRRLGKQRGAKVAQIDIARRLAHAIWHMLTRNQPFAPRGAAFRLAA

SEQ ID NO: 516359 - protein, 343 aa, unidentified
MLTSNVIAIDLAKNVLQACHISIHGELLSNKPLSRQKMKEFLAKAKPSIVAMEGCCGCHYWGQLAEKFGHEVRIINPKKVKGYLEGHKTDHNDALAIANAAIQIGIKYSRPKPLEQQSMQSLESSRRFLSRSVVSLGQHIRGTILGYGIANPKGEKGLKTSVQTVLDGETSIPENVVSVLSMLWDQYKELKVKLIAFEKEKNALTRQIEPCQRLMEIEGVGETTAAMLYTTLGDGKQFKNGRQASAFVGLTPKQHSSGGKVFMIGIDKCGGVKELRSLLYLGAMSYVGRLPEKPKTQKDAWLRSIIDRIGFKKACIALANKVVRTAWAMLRYETEYKPVLLTN

SEQ ID NO: 516360 - protein, 404 aa, unidentified
MKGPIVSIDVSKGKSDYQAFKEMNVKYTGSRSIKHTKEGFDEIVSLVREMEKKLETEVCVVYEATGVYHRVLKKVLEDNNIKQFIINPLLSAKTRKNDSLRSPKTDKLDPKSIAKTYYSHSLHNSHKPETIYHELRELSRYYEDILVHLRKDKVAFRAQLDVVFPGYDTLYDDLYGPVALAVIEKYPHPEMLQKKKINTVSKVIQSKTCHRQAMSDTMADKVIEYSKTIYSGCDKDDIEVLILQRFIKKLKEDMAEAERTIGEMIKLAQELPDFSIIKSIPGIGDNLAARIIAELGDMTRFKKKNELVAFAGLDPRISESGQNDGDHMHITKKGNKRLRCLLYLAVTCSIRLKRDDNSIKDFYIKKKQQSNPMCSKAAKTACASKLVRIIYSMCKTGELYQYNK

SEQ ID NO: 516361 - protein, 399 aa, unidentified
MNYKQNEKINQVKESTLVVGIDIGSTTQYARAFEWRGIELGKVFPFSNSREGFEAFKAWIQHLQDNYKKSDAIVDIEPTGHYWFDFGAYLEDEGILLVMVNPYAVKQTKELDDNSQSTNDRKAPKVIAKLVTEGRYSAPYTPDGVYVDLRIMVVNRKRLLREMTQIKNRFARWFAIYFPEYTDVFGDYEAQSSMLLLKKACTPEPIVKLGAEKINQIWRDAKLRAVGMKRATTLCETAKRSIGLKKGSSAARYEMKLLLEDYEYKKAQLDSVMEEIERLCRKIPESGQMLAIKGIGMITVAGFLAEVGDVRRFESPRQIQKLAGLSLRENSSGKHKGQTTISKRGRSKLRAVLFNAAIPLIAKNPGFRSLHEYYTTRANNPLKKKQSAQEETIHDCHQM

SEQ ID NO: 516362 - protein, 342 aa, unidentified
MQVTTIGLDIAKNVFQVHGIDAAEKVVVRKQLRRSQVLEFFKALPPCLIGMEACATAHYWARELTKLGHKVRLMPAKDVKAYVKRNKNDAADAEAICEAVRRPTMRFVQVKSAEQQSLLMLHRTRDLLMRQRTQVINALRAHMAELGMTAAQGNAGLRELLAIIAGAADERLPSEAHASLIVLAAELQAMRTLIASIEKRIIAQHRSDEASKRLRSIPGIGLVGATAIVATITDPKAFRSGRDMAAWIGLVPREDSTGGKQKLGPISKQGDRYLRRILVVGAHAVLKLARQKPEKYPWLTQLLARKPFKVVAVALANKMARIAWALLVKGGPYRARALVAAA

SEQ ID NO: 516363 - protein, 364 aa, unidentified
MQESTHIGLDVHKETIAVAVLRPGTGECDERVIANTPAALRKLFARYPDRAALHACYEAGPTGYDTWRLLDSLGVPCEVIAPSLIPRRSGAHVKTDRTDARNLARLHRAGELTAVRVPSPSEEALRDLVRAREDLKDDRRVARQRVKSFLLRYGKRPPTGSGRWGVRYELWLQTLAFEEPAAQAAFDHLMGAASVRAAQLAAIEREIEAATLSGPLEGPVARLRTFRGIDTLTAVTVVTETCDFRRFPTASAYMAFTGLVPREHSSGATRRQGSITKAGNAHVRRVLIEAAWAYRHRPAVRGKLAVRQEGLPPELLAYSWKAQTRLHGTYRKLAARRGANKAAVAVARELSGFVWGAMTGRTGA

SEQ ID NO: 516364 - protein, 469 aa, unidentified
MATKKQKKAKIRSTERTKRQKTISMPVINPHAAGIDIGSRSHFVCVAQDNVNEFGVFTSDLHDIAHHLQFHKIKSVALESTGPYWKQLFVILQDYGFEVILVNARHLKNVKGHKTDVVDSKWIQLLHSMGILSNSFQPDNFTGELRTYTRQRQYLIRNAARYTSKMTKNLVLMNIRLDNVLRDVTGKSGTAVIKAIISGERDSKNLANLFDYRVKADKEDIEKALNGYWRNEYIFELRQSLDLYEFCWEKIRECDEQINVLLESYMVRKEKETGEKRLEYIPKKLQQKQKNNLCFDIYSYAYQMSDGIDISEIDGVKVSTILNVMSETGFDLSAAFPSSKHYISWLGFAPNNKISGGKILSSHIPKMKNASAKAYKDAANTLARSKCSLGDYFRRIAYKKGRAVAIIATARKIATIVYIMLTKKVGYCYEYSKKITEKIRKNRIKNIKKTIKELVISKEELFALQTATV

SEQ ID NO: 516365 - protein, 359 aa, unidentified
MREQRNEISFSGQKIYVGIDVHLKSWSVTVLSETSVLKKFSQNPNPEALHGFLTRSYPGAEYHSVYEAGFCGFWIHERLTALGIDNIVVNPADVPTKSSEKLRKTDAVDSGKLARSLRANELKGIYTPDSVSLEMRSLIRLKNSITKDTTRQKNRIKSQLRYLGIEIPQEFLEPFSNWSKRFFAWLKEVETLTPSGRQALDIQIRHLEELRRQKLEMTRAIRVLAKTDRFREPLRLIMTIPGFGQTTGMAFLSEICDITRFRNAERLAAYIGMIPMCHSSGEKDGTGNITVRKHAVMRCNLIEAAWVAVRQDPTMNLFFIEQCKRMPKSKAIVKVARKLVNRIYFVLKHQTEYVNRVVS

SEQ ID NO: 516366 - protein, 320 aa, unidentified
MMAQNDLIVVGIDVAKDKVDACIRAFALRQMFPSTAQGHRKLVGWLRKHQVNKAIMEASGGYERDWAKSLREAGIEVRIVDPKRVRSFAQSAGRLAKNDKIDAEMIGWFAETFSQAPGQMHDAMQEELAALVKARIGLVELKTRLQSQNEHAAPGPVQKAQARILKSLAAEIAKLEIAISAKIKATPHLAERAEIIESVPGLAKAASATLIAGMPELGQVSDEIAAALMGLAPYDDDSGKRRGERHIKGGRRWVRNAIYMPCLGAATQNNPVLKAFYQRLIAKGKPPKVALTACMRKLIIILNTMIARRQKWDPTRYAVV

SEQ ID NO: 516367 - protein, 437 aa, unidentified
MSQNKNHAKKSVCLQSLPLIHPHAAGIDVGAKEHVVAVPADRDPRPVRSFKAFTPDLYELAEWLQQCGVKTVALESTGIYWITLYEILEERGFEVRVVNARHVKNVPGRTKTDVLDCQWIQKLHSFGLLSGSFRPDQQIRTLRSLMRLRDNLVVQSTQSVHHMQKALFEMNVQLSNVISDIVGESGMRILEAILAGEHDPARLATLCSPRIKAARETVAKSLHGNWREELLFSLRVALDSFRFAQGKIAECDARITEHLAQFADRAVLETPPSSLKSELHRVCGVDLTKIPGIKEQAAQIIISEVGLDMTRWNTEKQFSSFLGLCPNNSISGGKVLRRSTRKVYNRAADALRLCSQSLTHSKTALGAKYRRLKGRLGAPKAIVAMAHHLARLVYRMLRYGRQYVEKGIAEYEIKFRLQRLKWLKHEAKSLDMQLLPA

SEQ ID NO: 516368 - protein, 406 aa, unidentified
MTITTGYIGIDAAKTFHKICIKNQHKRTLIPIFEIEDSADGFDALRSTMDALKEQHQLSMFMVGIESTGTYHVHLLDWLRQQADVIASLLNPLQTHHYLRSDMLRASTDSVSAELIAQFMVERTPKPTKFVGMDYETVKRLASHLHGLTKQKSATMNRLRELVSLQWPSFERTFHNFNAKQVLALLTVVQTPKEFLTYSPDSLKHVTVLGTSYTLRSNFLKTVTTLAEHERTTITSLQPAYIIRSLAEQVMFFLQQIDQVTEELKRTFANTTDQEVPLLATINGVGTVSAMVFTAAIGDPHRFSSTKQIVSYFGLSPRIKQSGTSVVGRGYVQKKGSPLIRFYLFNCVLSMIRNPKHPIGVFYKRLVDEGKEKMVAIIACMRKLAILMLAILQSNTPFHFQSQLTV

SEQ ID NO: 516369 - protein, 345 aa, unidentified
MNIIRVGVDIAKSVFHVHGVDRYGKTVWQAKYTRTKWLNALSRKVPVGCTVGIEACASAHHWGRELQKLGYHVRLVPAQFVKPYVKSNKNDKVDAEAICEAMSRPNMRFVALKTAEQQDIQAAHRIREELVGQRTAKANQIRGLVGEYGVISPVGIHQLRRALPKWLEDAENGLSNTFRTLLNSLAEDLRYLDDRIKSLDEKITENVQKDPVARRLMTLRGVGPLTASALSGALGDGKAFRKGRDFAASLGLTPRQHSTGGRERLLGISKRGDGYLRKLLVHGARSVLRHVDGKSDGLSHWLKCLVNRKHINVATVALANKTARIAWALVANETVYDETLAAASR

SEQ ID NO: 516370 - protein, 341 aa, unidentified
MKQNVSTVGIDLAKKLFHLVGTDTTGKIVWRKRLTRHALVPCMAQLPPVTIGMEACGGAHYWARQFQQHGHTVKLMAPQFVKPYVKSNKNDMRDAEAIAEAMTRPTMRFVPIKDVAQQDIQALHRVRERLIGARTALINDVHGLMLEYGIVLPTGVAKFRQAVVEKLEADKDKLTALSQELFWKLVQEFVALEDQIAFYQEKLETLATTHPESQRLMTIPGIGPITATALVAAVGDVGVFKNGRQFAAWLGLVPKQHSTGGQTLLLGISKRGDSYLRKLLIHGARATLRWVKLQTDRRSQWIRELLKRRGWNRTAVAVANKNARIVWALLSRGGVYGATPS

SEQ ID NO: 516371 - protein, 348 aa, unidentified
MTTLTRSVTGGVDTHLDFHVAAALDERGALLGVENFETTAKGYKKLLAWLDDFGSVAVVGVEGTSSYGAGLTRHLHAESITVVEVDRPNRQRRRRKGKSDPEDAISAARAAFGGDANGAAKTQNGNVEAIRVLRVGRTSARSARTQALNQMRSLVSTAPEPIRADLRGLSVARLLRRASTYRLSTGRDVVSLTKLTLRGLARRAIELGEEIKGYDTILKPLVEETAPELVATLGVGPDSAGALLVAAGDNPERLRNEAAFAHLCGVAPLDASSGKHQRHRLNRGGDRQANSALWHIVITRMSYDPRTNDYIERRMNQDQLTKKEAVRCAKRYVAREVFNLLPIDRLTS

SEQ ID NO: 516372 - protein, 348 aa, unidentified
MVTLGVDAHKRTHTVVAVDVTGAELGRLTVVASTPGHLAALQWAGQWSPRRWAVEDCRHVSRQLERELLAVGEHILRVQPRLTARERPTMRERGKSDPIDALAAARAALREPGLPAAHLDGPSRLLRLLVGHREDLVGERTRVQNRLRWLLHELMPEGEPRPRSLDIRCVLARLEAQLRDHPGTVARLARQQVSRCLELSIEIDGLEREIAHEVQDRAPVLLALHGCGALSAAKLIGEVAGISRFRSRAAFARYNGTAPIPAWSGCERFRLNRGGNRQINCVLHRIAVTQLQRCGPAQEYVTRRRAQGDTKREALRALRRRISDEVYRRLQVDEAALQADQNGLTNAA

SEQ ID NO: 516373 - protein, 354 aa, unidentified
MSDKSSLTVATMGIDIGKNSFHVVALDWRGAIVLRRRWSRGQVEARLANMPPCLIGMEACVGAHHLSRKLQSQGHDARLMPAKYVRPYSKGQKNDFRDAEAIAEAVQRPTMKFVATKTADQLDLQALHRIRERLVRQRTGIINQIRAFLLERGIAVRQGLRFLRAELPIILATRSDVLSPRMLRVIEELVADWRRLDERIEGLSEEIEALARQDPACERLMTVPGIGPIISSAMVAAIGNGAVFTKGRDFGAWLGLVPKQISTGDRTILGAISRRGNRYLRALFVQAAWVVLVRIKDWDRYGLKAWIDAAKKRLHHNVLAIALANKLARIAWAVLNKERAFECVRTLATSPQPA

SEQ ID NO: 516374 - protein, 423 aa, unidentified
MNTAENNTSLQSSPIVWIGLDWGDQEHAFALQEATGKSEMGTLPHSAENLHAWLKTLGERYGARPVALAIEASRGPVIHALLEYPWLRIYPINPITSARFRSAFTPSGAKDDLPDAKVLLELVRDHAAKLRVLESQDPATVKLDGLVEARRKLVDRRTQLILQVQSLLKSYYPQALEVAGDLKSEVALAFLNRWPDLISLKSAKPATIKRLYYLHQVRSQDLVKQRLALIAQATALTTDAARVEVAVLHLRALLDQLKVFRQHIPRLDDAINQAFAGHADRALFSNLPGAGRQLAPRLCVAFGTLRSLYPDPASLQKYAGVAPVREKSGNQVWTHWRWQASTFLRQTFVEWAGQTVHYSEWAKIYYQRMLKKGKKHAVVLRALAFKWIRVLWKCWQDRQPYDEARYLKQLLHRKSPNAVPAKS

SEQ ID NO: 516375 - protein, 370 aa, unidentified
MLDTTTFIGLDVHARSIKAVSLDVMTGEVRAATFGYDAGAVAEWVRSVDPRARCVYESGVTGFDLQKRLSGLGVDCVVGAVSKMIKPSADRRRKNDRNDAEFLARMLSVGNVVEVWVPDDECEAARDLTRALEDARDDLSRSKQRLSKFLLRHGLVFDERTPTGRRKGNWTRAHWSWIESIRFAEGADNDVLAYYVDAVRRAAEEKARLEGLVEAEARKPRWRKRVDSLRCLKGVDTASAADLVFEAGEFSRFGNARSFAAWVGLTPSEHSSGESDRRGAITKAGNKHLRKTLVEAAWHYLTCSGRPKDLAKGQAPDRGARRHAAKGVRRLVERREALLARGVHGNKANVATARELACWVWAVGLMAEEA

SEQ ID NO: 516376 - protein, 429 aa, unidentified
MNSTQNKKIEQVKETTMIVGIDVGSEKHYFRAFNWRGIELTRKPVAFSNSMEGFNSFYNTIVELMQKSELEEALVGIEPTGHYWFDLGQFMGEKSIKFVMVNPHHVHKSKELDDNSPSKNDRKDPRVIAGLVRDGRYFYSYMPTGVYAELRNASNRRFVLVEEQTRAKNRLQKWIAVYFPEYKGIYTHIDAKGGLLVLKQAPTPEEIVKFGEEGIIKIWKDAKLRGNGNKRALKILNAAMRSIGLRTGLTEARMEIQDLIEDYELQTKRLERVNDLIKELCQQIRYADKLLEIKGIGITTVAGFIAEVGDITRFDSAKELQKLAGLELVADSSGKHNGKTKISKRGRKRLRYLLFEAAISVVGKNEEFKEIHRHYTTREKNPLKKMQSLIAVACKLIRVFHVILTKGVSYDASKMLEDIRHPGEQLKAA

SEQ ID NO: 516377 - protein, 337 aa, unidentified
MSRFIGVDLHKTAFTVCFLEGKDKRLESYKIGEMERFRSELRRDDALALETTTNTRSFIKQIRDAVGSIHVINTMQFKVVSQSVKKTDANDAEAMAFFLSKGMLPEVRMKDEQYAELESLAQTRHKLVQLRTALKNKIHNILNAQGIVTKKESLSSRKGLEAVLNHPISAVAAIELEVIVEQIKGLDAGIARIDKELADKGKDLDGHANITSIKGVGDKGGAILLSVIGNIEDFDDEKKLAAYFGIVPRVSNSNETNRQGRITKRGSKLGRTTLVQCTLIAIRYSPYLKAFYERLKAKKGAGKAIIATAKKLLGIIYLTLKNKWVFEDFPNFVLKDA

SEQ ID NO: 516378 - protein, 333 aa, unidentified
MEKKHFIGIDISKKTLDVVIFASNKQHSDTSNYRRFPNDDEGFSEILSWLKENRISLQATVIGMENTGMYGFDLRLFLEKKKVDYCCFMPLHLKLSFGLARGKNDRVDAERIAYYTALHKDELVFSKLANSTILRLQELSVERKRFVVQRAGYEALLTDSKGREQTSTHLRARQMKEFLDNEIKSVEEEMEQLVKSNPEVERNYRLLVSIKGIGMANAISTLIHTDNFQAFETARQYACYIGIAPFEYSSGTSVRGRTKVSHIGAKGLKADLSQAANSAIVWDRELKEYYERKRKEGKAYGVVLNAVKFKLVCRMFAVVRRGTPFVALQTYKS

SEQ ID NO: 516379 - protein, 400 aa, unidentified
MAQPLWAGVDAGKSDHYCMVIDADGKRLLSRRVANDEAALEELISTVITLADDGELTWAIDLNAGGAALLITLLVAAEQRLLYIPGRTVHHASGGYRGEGKTDAKDAAVIADQARMRRDLAPLRADDDIAVELRILTARRTDLVADRTRAINRLRAQLLEYFPALERAFDYSKSKAALILLTGYQTPDGLRRAGAARLAAWLRKRKTRNADAVAATASEAANAQHTVVPGQQLAAAMVARLAKEVMTLDTEIGDTETMIEERFRRHRHAEIILSMPGFGVTLAAEFLAATGGDISAFGNTDRLAAVAGLAPVPRDSGRISGNLKRPRRYNRRLLRACYLAAHIATRTDPASRAYYNRKRAEGKRHTQAVLALARRRLNVLWAMLRDHKLYQPTAPNAAAA

SEQ ID NO: 516380 - protein, 320 aa, unidentified
MEFAAFIGLDVHKDSIAVAIAEEGRHGEVRFYGSIPNTPGALTKLVGKLVEKYGRIEFVYEAGPCGYAVHRHLTRIGQICRVTAPSVIPRKPGDRIKNDHRDAMTLARLLRAGELSFVWVPDETHEAVRDLVRARQAASFDVRKARQRIQSFLLKYDRRHSGRAWSGRYRSWLANQQFAHPAQQQTLQHHINTLDQAMARRNELDGQIREILPSWSLEPIVTALQALRGVALIIAVSTMAELGDMRRFTNPRQLMAYLGLVPGEHSSGSTIRSGGITKAGNPTLRALLFEAAWCYRGPAKIGEFMLRRLPDVPQPVKDIA

SEQ ID NO: 516381 - protein, 406 aa, unidentified
MRLFVGDDWAEDHHDVEVMDEAGKVLAKRRLPEGAAGIAQLHGLIGRFLGEDADDADVAVGIETDRGPWVAALTAAGYLVFPVNPLQAARFRQRHGVSGAKSDAGDAHALADMVRTDSHQLRPAAGDSPEAGGIKVLARTHKTMIWERTRETQRLRHQLREYFPAALEAFEDLDAPDALELLGKAADPARAARLTRAQVSAALKRAGRRDITGRATAILTALRSGQLGQPPVLTAAYAATVRSLIAVITVLNEQVRVLQGQVEEHFGQHPDAEIILSQPGLGMILGARVLAESGDDPRRYADGKARRNYAATSPITRASGKKKTVAARYVHNDRLVDALNAQAFAALSASPGARAFYDQQRASGHGHNDALRRLANRLVGILHGCLKTRTLYDEDTAWGHRQQQAA

SEQ ID NO: 516382 - protein, 340 aa, unidentified
MRIRKVTQITEKGKSANEYDHNVAIDWSMDVMALAHMSRRDDHPIVFERPSNLKDLKAYLGTLKGRTIITLEESGSAHWLYLELIDCVDRILICDPFHNKLLCHGPKTDKIDAAKLCELLRAGLLKEVYHSDSALYELRQLVSAYEDVVKAGVRAMNQKTALRLGHREEGKTAGFVEKILEENIDLYQRSKEQYEKRFDDVARRNKLVRFQKEISGIGPIGAVKIMAIVVDARRFPYAGKYLSYCGLVMHEKLSGGRSYGRRKARCNRVLKSVYKVATHAALRGNNPIREYYDHLLAHGVAAHNARNAVARYIARVSYGMLKSGTRYEPYRWREKAQKVS

SEQ ID NO: 516383 - protein, 408 aa, unidentified
MDHEGRVLARRVVKAKAHQLGGLLEWAAGKAAGAGFAGLTVACEPTGHRWKALMGLADAGGHGFCCVQSLAVARAREGDDYTRDKTDHRDAYLIGKLVIRLECYLPERADEAWARLRHLGARRFALVADAISCMQQVGDLLACAWPAALGVAARPLESTTWLAALGMVTDRCNGNPARLRKMGYEKFVAAVRRELPRWGAKNIYHKIVKGLWGALADAGGVAAQRRGALERVHLLMGDWRSLLARLADTGDRMTAVLGELGLTELVTSIDGLSAVGAAVILAETGELTRFASARSVVKHAGLNPAEHTSATLAGKTRISHRGRPGLRAAAWRAVWGGMRHNRVLHAKHAHLTGREGNRLSDGQARAACAATLLRWLYAVVTRRQMWDPRIAAGAILPAATPVTAPAAA

SEQ ID NO: 516384 - protein, 420 aa, unidentified
MTSANIIPADAVLVAIDIAKVRNEVLIEDPSHRRRRRLPVLNSRAEHDRLIEILQAYGRPVICAFEATGNYHRPIAWRLAEAGFEVRLVSSLALARTREALHNSWDKNDPKDAQVMLHMLRIQATQRYHDPLRAGINDVQELSKTHEAIARAKTEIQHRILTHYLPLYFPEIDRFRGNSRSDWFFAFLDAFPTPASITTLTKEEFVTAAWDVVGRKVSKTQILMDIYETARTSIGLPLPLDAPAICMFRMVIAEARSLIRQRNEIETQADELLRHSQDYQLLRQIPGIGPINALTIIAEAGDLRRFHHHRQFLKFCGLDLSTQQSGQYRGQTRLSKFGNARLRRTLWIAGQVAIRQRENGFRHKFERYIARDRDNPDLRRKAMTAITAKMARVVHAVVKGGSDYRPFVEGRVPGGRTSVS

SEQ ID NO: 516385 - protein, 363 aa, unidentified
MCQDRGRWLNATDEGAAHMQVTTIGLDIAKRVFQAHGVDETGKAVLRRKLQRPEVLAFFEGLSPCLVGIEACGTAHHWAREIQALGHEVRLMPASYVKPYVKRGKTDAADAEAICEAVTRPTMRFVPVKTPEQQAVLMLHRTRDLMVRQRTMLVNALRGHMAELGMVAPQGISRVADLVAVLLGEDETTMPKLARQALRGLAAELESLGERIEAIEAAILTWHRGNEASRRLASIPGVGPITASAIVASITDPTLFRSGRHLAAWIGLVPKQNSSGGKERQGGISKQGDRTLRRLLVLGATAVIRHTRTKAASEASWLKGLLERRPAKLAAVAQANKTARIVWALLVRGGAYRAPATAQAATA

SEQ ID NO: 516386 - protein, 366 aa, unidentified
MDYKIGCDAHKHYSQFAVLDQDGRLLAQHRVEHQPGAIQAFLENLPEGSPVALESVGNWYWIADEIEAAGCVPLLTHAAKAKLMMGNVNKTDKLDAKGLAKLLHLDSLPTVWLPPGEIRDERELHRTRMALSKLRTALKNRIHATLAKYGITTSEHSDIFVGAGRAWLETALSRLPPETGRCVAQELEALDALQHQIAQLEKRIRERVALTPSIQLLKSLPGIGDILAIVIEREIGSIERFGTAGRLASYAGVVPTVHASGGKTRFGHMRKPSNQYLKWAFIEAANVVVRHRHHPAWETKTSLASTTESASGRATPSPSVPSLATWRRLPSGSSTDNNPTGRLPSGRSLPSRCKGVPNMYPPRYVS

SEQ ID NO: 516387 - protein, 377 aa, unidentified
MKNVRFVGLDVHAETIAVAVAEPDGEVRSLGVIPNRAESVGRLVRKLGSAEQLRVCYEAGPTGYVLYWQLTQLGVKCEVVAPTLVPVKAGDRVKTDRRDAQKLARCYRAGDLTAVWVPDAAHEALRDLVRARWAAKRDQLRARHRLGKFLLRHGRRAPEGLNAWTDKHLQWIKSQVHFAQRAQEITLGDYLHEVDHVAERIGRLERSIDTAIETLPVKMRAVIEALQSLRGIAQLSAVSIMAEVGELSRFEHPRQLMGYSGAVSREHSSGACIRRGAISKAGNAHLRRIVVEAAWAYRHRPAVGKTLAARQRHSSAAVTELAWKAQQRLHQRYVQLMGRGKCKQQTITAVGRELLGFIWAIGVHVEREAKVPLRQAA

SEQ ID NO: 516388 - protein, 334 aa, unidentified
MWHVGIDLHRKALVMAAVNDAGESTAAVRIDCQDTAAIVEAVKALQPFRAVIEATGTYRWLYDLLRPYGTVLLAHPLRLRAMIQRRSKTDKLDAMLLANLLRINQIPLAYIPPQRYQQLRELMRLRTRLGRERAGAKIRLRALLARNNRQAPYRVPFGVRGLAWFRRQDFGLMENLVRDELLARLEHFGRQIDLVEQRVAAMRSCFPEVESLLELYGMGLFSALVVVAELGEVKRFAAAKQVGAYSGLTSRVHQSGGHCYYGSITRQGSPWLRWVLVEAAMKIVRRDDPLRNFYTRIRKRSGAKIARVAVARKLAEICWKRLRRWQRERASHAA

SEQ ID NO: 516389 - protein, 350 aa, unidentified
MKILALDLGKFNSVACLYNKASAEHEFQKIRTTPREVRALFVATKPDLVVFETCSFAGWIHDMTGDLGIPAQVANPNHEGWRWNHVKRKTDRDDALKLARLAAMNQLPTVYVPRRCVREWRSFIAYRHKLVARQTAIRNNIRSIFSRQGLTLPVGHRAWTAEGFRQTATEARALEALAHDELWRGMLDLELRALDAVGQLLVAADVRLNAIARADERVTRLRTIPGVGPRLAEIIVATIDDPKRFRNARQVACYAGLTPKQYESGMMRRSGRISRHGPALLRGLLVEVAWLVKRYNPWGEAVFQSIAKGQRSRRKQAIVALARRLLIRAWAMLRDGTSWRDPCLSPTSAT

SEQ ID NO: 516390 - protein, 387 aa, unidentified
MYFVGIDISKFKHDCAIIDELCDTVMPSWSFSNDREGFSHFKALLDSLEGEKKIGLESTGHYGQNLKQFLESNGFAFMEFNPLLVSRFVRSKSLRNTKTDSIDALSIAQYVMTVEYKPYPSSFYHLDKLKSLTRFRNSLVRQRSRQLVELTNVLDKLFPEFKPFFKDKFSVTALYILAHYQTPERIANMNARSYEALRKLSRGRFTLSNFTQLKALAKNTVGTQSDYLLDQMNILLELYSQLDSKVDEFDAQIKECVRGIDPPCLSIPGVGELSAAMILSEFGDFSKFQNPSKMLAFAGLEPGYFQSGQSEYTGHMVKHGSSRLRYALMNCCLPLISNEPVFAAYYTKKRSEGKPHRVALTHVAKKLLRVIYTLQTKNIRYDPTMIH

SEQ ID NO: 516391 - protein, 351 aa, unidentified
MMLIGCDFHPSWQQICWVDTETGQTEEHKLVHAPGEAEKFYRRFAAPARIGMEATGNCQWFVEMLAGLGHEVWIGDAAKIRASDVRQQKHDRRDAALVLRLLMENRFPRIWTPSSAEKDLRQLLIHRHKRVRLRAQTKNGLQHLAMNQGLQKKRRLWSKAGQEALRELTLGPWASRRREDLFSVLAMLDRQIESLDLAVKHAAEQNENARLLLTQPGVGPVTSLAFVLTMGDVSRFPRGKQVASYLGLIPREYSSGGKQRLGSISKQGNRFMRMLLVEAAQVAVRCDPHLRQEYLQRCHQDKPKGVAKVAAARKLAVRLYWMLRTQKPYPEIVHVESSSRVPLAAEARPKN

SEQ ID NO: 516392 - protein, 420 aa, unidentified
MAKRGTKVRIEDLQDIYEYCAGVDVHKGGVTVCAICGIGREIDAEVVEYGTTTGELRQLGEWLREKGVTHVVMESTGVYWRPVWQILEGSGFHLLLANAKQVRNVPGRKTDQSDSIWLATLLRKGLIRGSFIPPAAIRVLRDLCRSRASLVRDRTRVVQRLEKVLEEGNVKLDVVASDLVGVSGRRILGRLAEGETDTVAMAELALGRLRSKIPQLIQALEGSFRPHQLFLLRELLEQYDYLCKKVERFEIQIQEYARPFEEQIQRLDAIPGVNRLSATAILSEIGIDMSRFPTPQQLCKWATICPGNRESAGRKKPGKTGRGNRWLRGTLTQCSWAATHDKNTYLAVQYRRLLHRGKQRALVAVAHSVLNIIWHLLKQQIEYQDLGVDYFERQNLEGQKRAYVKKLEKLGFSVKLEPAA

SEQ ID NO: 516393 - protein, 318 aa, unidentified
MNYIGIDVASKKLNIHISEKDGGDYEIPNIREALQSFVGQHSISPDKFIIGAESTGKYHLITQKFFVEQGFEFRLLNPICTKQTTKATVRKKKTDQSDAVLIAFMLSQGAGDKITPEQLNTAKRNLLRTRNTLNKHMKAIGLLRDQLKMDTNRNEMKKAIKALETVIKTMKVTAKELEKEVLGQKQNQDEKIIQSIPGFAKLLSAAVSSEVGSFKRFPSARQFKAYVGIDPKVIQSGNSQRYGRITKRGKPHLRSAFYLAAQVARRYDPELKAFFEKKRSEGKPFRVAVCAVARKLCERVYAVVTKGVPYEIRQLTFS

SEQ ID NO: 516394 - protein, 344 aa, unidentified
MNAIKVIGIALAKSTFQVCVWMNDGSIAFNRKVSRAKLLDTIRQFPVGSIVTMEACATSHYWGRTFQSMGFLIRLLPTQYVKAFTHHQKNDANDALAICETALRPGIHFVAIKTVEQQDIKALRSARQLMVEQRTALANQARSLAAEQGIELPIGIHVLQRWLPDIIEDAEQLISPILRQLLHSILENIHSLNERILFTEHSIVALCQQQPKYKTLMTIPGIGPLIAAAFLSEVNAEQFTNGRQLSAWCGLVPRQHSSGGKSSLSSMTKNGNRGLRTLIIHGARSVMYWAHKRDDVLGIWLKRLTERLGKMKSTVALANKLTRIVWRLLIESTSFNINRAFAMN

SEQ ID NO: 516395 - protein, 411 aa, unidentified
MNPVVGLDVAKGESQVQAFLDKKEPYKRSFKVAHTIEGLESLHQYLREIENVTGIRPPVVLESTGHYHTPVVQYFEERGYLLIIVNPLISYRAKSSSLRKVKTDLIDARHLCELYYKEELEPYKKRGIQLLNLRNLSRQHANITGIYVQTKLQFQAVLDQVFPEYRGVFGDLYSVVSLLTLLEFPTSEDISAVDEETVANRINELCPSRSRKWANTQAEKLMAASARNPFQRTLYQSHILSLEMYIKMLLEYQKHLSKFEEEINALAKEIEEYKIIQSIPGIGEKIATTIISEIGEIDRFNHPKKLVAFAGIDPSIFESGKFKGSVNRITKRGSGRLRHALYMAVRCAIRDCRKKKTTDEIIPRNKRLREFYDKKREEGKPFKVAVIACANKLLQWIYALLQNNSTFQDLT

SEQ ID NO: 516396 - protein, 373 aa, unidentified
MANVNNYSAYVGLDVHKDTIAVAIASPERQGEVRFWGNISSSKDSVIRLMKKLMKLYPSFLVCYEAGPTGYGIYRLLLSSNIDCTVVAPSRIPKISTNKIKNDHRDAVALARLLRAGELVEVWVPDITHEAMRDLIRARSCSKKDEKVAKQRIQSILLRAGKRYDKKMWTVRHRIWLANQSFPLPSQQIAYEHYRQSLEQIENRITQLDQEIDRLLPDWSLYNLVNQLQALKGVGRTIAISVVAELGDFSRFSNPKQIMAFLGLIPGEYSSGTTVRKAGITKAGNVELRRLLYEAAWSYRTKAKVGNWLVTYRPDSVCQEAKDISWKAQQRLCFRYRSLLARGKRSQVAITAVARELLGFMWDIAVTIQPQKV

SEQ ID NO: 516397 - protein, 339 aa, unidentified
MKYTPVGVDIAKYLMQIHFVDEYTGEIIDKQLRRRDFLTFFSNRDPCLIGMEACGGAHYWARELKKLGHEVHLLQAKFVKAFRTGNKNDVMDARAIWMAVQQPGKPVAIKNEEQQTLLSVHRMRTQLVKFRTAQINALHGLLLEFGETVHKGRASLDKAIPEVLERLRITLSPFLISLIEEQYYRLSELDKEIDGLEKQLTEWANQHADCQRIMKIPGVGVLIATAAIATMGDPTAFRSGREFSACLGLVPRQTGTGGRVKLLGISKRGDAYLRTLFIHGARVATLCTKTPPQWVSELKKRRPVSVAIVGMANKLARTVWALIAHQREYEKDYVSVRPY

SEQ ID NO: 516398 - protein, 310 aa, unidentified
MFSYPAGIDVSSGSLEIRVDQLDVAMSCSNSQSDFPGLIGWLTLHRVGRVLLEATGGYERKVMKALQAAGFEVIRINPCRAKSFARAMGQQAKTDPIDARLLAQFAAVIKSPDSRVTSAEQDDLRALVQQREHFVQQRDDDKRRLKTASSDVVKPALQSHIDYLQKVLKELESLIRQSTERLDRKKVALLCSVKGIGLVTAASLMSYLPELGEVGRHQIAALSGTAPYNDDSGKHKGKRHISGGRFAARRSLYMACWSVIRFQPEFAARYKALREKGKCAKVALIACMRVLLVRLNAMIRDGSEWKEHAA

SEQ ID NO: 516399 - protein, 311 aa, unidentified
MPTPAATYVGLDVAKDRLDYTVDGLRCAPVPTTASGHARLLAALRPLGGVRVICEATGGYERAIVAALLLAKLEVCVVNPGRVRAFAHAEGLLAKTDRLDAHLLRRFGEKVRPRLHAPMDQAAVTLRELLDYRRQVSDQLVAVRNRLELAGPVLRARLDAQVAFLEKELTETDRLIQDHLDHDDTLRRKAARLRELKGAGPVLTATLLAYVPEPGAIESPQLSALIGVAPFARDSGHSQRARHVRGGRGVVRHVLYMAAVAATRHNPVLRAFYLRLVAAGKPKLVALIAVMRKMLHVLNRLLADPHFVLVR

SEQ ID NO: 516400 - protein, 317 aa, unidentified
MTKASTLTAGIDTSKAKLDIAIHGRPERWQVDNTLLGWRRLAADLATANVTRVGIEASGGYERGAVRYLRGKGFTVWLLQPIQVRAFARAHLRRAKNDALDAALIAAFAALTDQPGRELDERLAELAHHLTFVEQIEEDIARFKTRLEHIDDPRHKRLVMADIARLKARRAAEILRIVRKLRVHNDLALRLDLVLSVPGIGERTALALIIRMPELGRVSREEVAALAGLAPFDDDSGKHKGQRHIAGGRGRLRRSLFAAALPAAFRWNKALIALYARLTARGKAHNAALIACARKLLVYANTVVQRGSPWRETTAAI

SEQ ID NO: 516401 - protein, 402 aa, unidentified
MAGKTGGIDWASEAHEVCVSEEGEVLERFSAGHDEGGIAALAERLARVGVERVAIERPDGILVERLLAAGLEVLAIHPNQVKAARARFAVAHGKSDRFDAYVLAELARTDAHRFRALVPDTDETKALRALTRSREDLVAARVELANQLRAQLEAFWPGAMVFAEVDSPIGLAFIARYPSPQDARGLGEGRMAAFLDRNSYSGRTSPAELVARMRSAPKGTAGAAECEARRAVVLGLVGALRPIVEEIGELTAQIRERLAAHPDAAIFRALFRDPKTAICPATLIAELGDARGRYPTEAAMAADAGMSPVALESGKLRVATFRRACDKRLRLAVATLADSTRHWHPWAKEVYRRARARGQDHPHAIRTLGRAWIRVLWRCWRDRVPYDPARHGNFNRLQTAGG

SEQ ID NO: 516402 - protein, 433 aa, unidentified
MPTTHPYDLVIGLDRSDRKADLHLIDTRTGNVQKQTVAISPEALHDWLVQLRRDHPQARVALCLEQPAANLIVFLETYSWITLYPINPISLQKFREAFVTSRAKDDGKDAQYLAELLLSHPDKLKAWQPDDSQTRQLQQLVLHRRAVVDQRTGLTNRLKALLKQYFPQALDLCGEDLWRPLATAFLLKWPTLQSLKKARKESLKQFYYLQGSRSQTLIEQRLERIDKAVPLSDELALLQSYTLRVQLLCKELQLLLKTLQQFDQQIAKVFQQHTERPIFEAFPGAGPVLAPRLLASMGSERERFAQPENLQSFSGLAPVTKQSGGTCSIHRRYLCPKFLKQSFHEYAKESILHSRWAAAYYGQQPNKGCGHHTAVRALAYKWQRIIWKCWQTRTIYKEAIYEAALKKNKSPLIGLLDQIELGKSPVKSRAKKS

SEQ ID NO: 516403 - protein, 383 aa, unidentified
MENRPLRFGAKRIFGLDLSKKTLKACRLDEDSGFEKQNIFDEKMTDDGRHHLASRLRKGDYVAMEGGSSTSFLARYLMEKTEAEIFVLNPCKLHIIFESACKTDKQDCIKIAKYIRDTNPSNWCLIPVPTYEETSLRSLINSHISTKQERTRAINQLHAFFNLNGISFLKKSDLGDSDRRHDLVDHYFSQDDLRGMQARLMLQDIDNIELSEDGYGEMIRKALLSRPRESLIWMSIPGVGPLTALACVAYIGDGKRFSTPDQLRNYVGLVPRIDQSGIKEVIYGVNHYGCMPVRRNIVQAAWSVSNLSFDCRFRQRWRELKASGKKGQKIAVKVANDMLTMGWTLLKKGELYNGLGDFSYLKRKLRSYKMTAIDSSCFDECLK

SEQ ID NO: 516404 - protein, 415 aa, unidentified
MSTRKWFVGVDWATEEHAVCLIDDGGKVLGERVFAHKGTGIAELCTWLLETTGAEPSALYVAIEVPHGAVVETLLERGMVVHSVNPKQLDRFRDRFTVAGAKDDRRDAHVLADSLRTDTKCFRVLRIDEAKVIELREWSRMVDDLQHERVRLSNRIRQQLLRYYPQMLQLVDDVASTLFLELWSLIPTPGAAARVREKAVATLLVENRIRRFDAKHVLSTLREKPLTVAAGTTEAATAHIASVAERLRLLNRQLKDAHRRLDQLTNELAEKDDEPGQDREQHDVDILRSLPGVGRIVLATLLAEASQPLADRDYHALRNLGGVAPVTKNSGKRRGNRSIVVMRNACSVRLRNALYHWARVASVYEPKSAAAYKELRKRGHSHGRALRTVADRLLAVACAMLRDRTVFDASRRCAA

SEQ ID NO: 516405 - protein, 350 aa, unidentified
MVVVGADVHKRTHTFVAVDEAGRKLGQLTVKADSGGHDKAVRWAQAQFGTELTWGIEDCRHLSARLEIDLLDAGQRVVRVPPKLMAEQRRTARTRGKSDPIDALAVARAVLREPDLPAASHDEASRELKLLVDHRDDLVGHRTQVINRFRWHLHRIDPTVDPAPKSLDRAKTRAQLAEFLSGHDGIDARLARELLQDIAALTARANTLEKEITALVAAQAPQLLELPGCGTLTAAKIVGETAGITRFATDAKYAMHAGVAPIPVWSGRTHGRVRVNKSGNRQLNAALHRIAITQIRLGGLGRAYYDKRLAAGDSKTEAIRALKRRLARVVFQTLKNNPSTAHTNNLATAA

SEQ ID NO: 516406 - protein, 321 aa, unidentified
MKWIGIDIGKRKFDVALLDGGKIRSKVFENNPSGHQALTLWLLARGCEPGSTHVCMEATSQYYEAVAEFLWTAGYRVSVINPLQIKAFCESRLSRQKTDRADAVLIARFGEQQTPGLWQPAPPEIRELQRLVARLEAVQQMRVQEQTRRHEAQGEALESIERVMTLLNEEQAKLEQRIRDHIDRHPNLRQQRELLTSIPGIGERVSAYFLAWLQAERFDDARQVVAFVGLSPRHRQSGDSVRGKSRLCKLGHARLRKILYLPAMSAMRCNPAAHTFADRLKAHGKRGKLVIGAVMRKLVHWMFGVLKSGVPFNAQLAIARS

SEQ ID NO: 516407 - protein, 343 aa, unidentified
MQTITTIGLDIAKSVFQVHGVDAGSQVVIRRQLKRRYVLTFFQKLPPCLVGIEACASSHYWSRELQVLGHTVRLMPPAYVKPYVKRQKNDMADAEAICEAVTRANMRFVPTKTPGQQSGLMLHRTRHLFIRQQTAVINAIRAHLAEFGIVAPVGRRGVEELLHVVADRNDKRVPEVARACLAALGNQLLSLKEQILDFDRMILAWHRSNETSKRLHYIPGVGPLLATALVANVADPRTFRSGRNFSAWIGLVPKQHSSGGKDRLGSISKQGDRYLRSLFVAGALSVIRYAKIHGTKHRPWLTALLARRPTKVAAIALANKLARMAWAMMAKGERYRNPATLAA

SEQ ID NO: 516408 - protein, 343 aa, unidentified
MTQQTIIGIDLAKHVFQVCMVTPTGTLKTNTAVTRGKLLALIARQPAALIFMEACGGAHDWARRFCAMGHEVRLLAPQYVTPFRRGQKNDPNDALALTEAGQRPHIPTVPIKTVEQQDLQALHRVRERLVKHRTAVVNQVRGLLLEYGIVIPQGIARLRKRLPRVLEEADNGLSFLMRDLLQSLQSELSALDTRITDITGQLARLSHELEACQRLQEMEGIGPLSATALVAALGNGHNFHDGRQVAAWLGLVPRQHSSGGTTRLGGITKGGNSYVRRLLIHGARSVISHVRDKPDAKSAWIRQLVTRIGVNKACVAVANKMARVAWALLHTGEQYRKPVALST

SEQ ID NO: 516409 - protein, 343 aa, unidentified
MQAVRIGLDLAKYVFDVHGVDDHGKVVLRKTLRRAAVTAFFANLPPCLVGMEASNGAHYWARVLTDLGHEVRLISPQFVTPYVKSNKNDRNDAEAICEAVSRPSMRFVPPKSVDQLAVQAVHRIRRRLVADRVRLVNQIRGLLSEHGIVIARDITQLRRSLADIVGNIDDGLSDLVRSLMRDLQGEMAELDVRIKSFDQRIREIFRNSEQCQRLGKIEGIGPVTATALIAAVGDRTSFKNGRQFAAWLGLVPKQQSSGGRARLFGISKRGDRYLRTLLIHGARAALGRAGGKQDPRSLWLGKLRQRRHPNVAAVALANKNARIVWAMLSGDTLYEPALSVKAN

SEQ ID NO: 516410 - protein, 403 aa, unidentified
MALVAGIDWASEEHAVCLVDEEGRRRVERRFRHDEQGVGALCRLLIVRAVERVALERPDGLLVDRLLEAGIVVVAIHPNQVKAARERYAVAGGKSDGFDAYVLAELARTDMHRLRLLQPDGDETKALRALVRVREDLVDTRVALANQLRAQLDAFWPGAAAIFAEVDSPIGLAFLERYPSPSDARSLGEKRLAGFLARHRYCGRRPPRELLARLRTAPAGRASELELEARRTAVLALVAALRPLVEQVGLLTSQIAGALRTHPDGELFRSLFQDPKAVVTAASLLAEIGDCRARYPSPDALAADAGMSAVAVESGKRKNASFRRACDKRLRKAVATLADASRHRHPWAADVYQRARARGCDHPHALRILGRAWLRILWRMWQEQAPYDPARHGNLQRFLATTG

SEQ ID NO: 516411 - protein, 363 aa, unidentified
MVGLDVHKQRIVGAVLPWGSDRVTEKVVLENRPQEIERFVTRVAGKGPVEFVYEAGPCGYEVQRQIAGLGYRCVVVAPGMTPVRPGDRVKTDRRDAEKLARYYRAGELREIRVPSREEEAARDLPRVREDVLKDLLRAKNRLGKFLLRQGRVYAETRTWGVKHRSWLRTQRFEWTPLQQSFEAYLRAVEEAEFRLETLNHQLEELVQQDPYRVPVQYLRCFRGIDSLSALTLVVEAMEFKRFGTARKFMSYTGAVSSENSSANRVRRGSITKAGNAHIRRILVEAAWSYQHPHGESRVLAERRKECPREVVYLARKAQDRLSRKFRRMIHRNKRSQVAAVAVARELAGFVWAMAQHFPLPAAA

SEQ ID NO: 516412 - protein, 376 aa, unidentified
MSKDTLYVGLDTDKKHIDVALAEALPGGEVRSWGKIANEANSVGRLVKRLQAGGRRLEVCYEAGPCGYGLYRLLNSKPGVRCRVVAPSLTPRRSGDRVKTNRRDAVMLARLLRAEALTAVWVPDATHEAMRDLVRARGAATGDLVRCRQRIGGFLLRQGIGYAGKPWTRKHRAWLGQLVATLPLAAHRLMLGEALQALDEATARRDRLTDHIAELVPGWSLAWLVDALQALRGFALINAATLAVEIGDPRRFATPRQLMAYLGLVPSESSTGDKVRRGGLTKAGNGRTRKALIEAAWTYSRPARAPSDNRRHAPAVVAIATKARHRLSQRYRRLTARGKRPVIAVAAIARELSGFAWAIAQVAGPTATTPQPPTKR

SEQ ID NO: 516413 - protein, 377 aa, unidentified
MKKELYLGLDVHKDCIITAEAEEGRKGEVRQSGSLSNDLHAVEKWIGRLRKRHGKGTLLRACYEAGPCGFGLARRLGQLGVECQVVAPSLTPTRSGERVKTDKRDARKLARLLRAGELTAVYIPEPTDEAIRDLCRARSDAVDDRRRSRHRLKGFLLRHGYRYQGKSSWSAAHERYLRELVLAHPAMKVILEEYLQGIAAAGERIARCEAAMGDLLEQWRLKPAVHALMAMKGFRTVAAMILVSELGEVHRFAHPRQVMAYLGLVPTENTSSERRRQGHITKCGNAHARWLLVECAQHYALPPKVSQELSRRQQAQPAQVRTISWRAQNRLHNRYRRLLARRLQRNKAIVAIARELCGFIWELLRTQDCYQAQSTPV

SEQ ID NO: 516414 - protein, 390 aa, unidentified
MSQDFRFDPSRSLTTLEQDSTIIAVIEMSQTKRLVAAVVPGVERQPLKKLDADKESLLKLLQRWRNEANRAGREIKRIVVAYEAGRDGFWLARWLLGRDVETYVIHPTSVAVSREHRRAKTDRLDTELLMRAFLGWLRGERRHCSMAAIPTIEEEDARRPNRERKNLVTEQTRIVNQVKAIFARFGIRTLRPTERKVEERLESVRTAEGTPLPENTRAELRRHLARLRVVRDQVHAVEQERLRKLATAPAVDKGSHAMVRLIARVLGVGVETADVLVNEIFSRHWRDRRAVARYAGLTGSPDESGSRRRERGLARAGNARVRCGMIQLAWRFLRFQKNSGLAQWFAARTADGRSGTRKTMIVALARKLLIALWRLVTGGEIPQGVVRPAS

SEQ ID NO: 516415 - protein, 311 aa, unidentified
MKLIRVGVDLAKNVFQVHGVDRFEKTVWRRKLVRADWVKALLAQIEPGCEIGMEACSGAHHWARVLQAQGYAVKLIAPQFVKPYVKSNKNDANDAEAICEAMSRPHMRFVAVKTVEQQDIQAVHRVRANLIDQRKATANQIRGLTSEYGLIAPKELVHLRVAIPQWLEDLDNGLSERFRRLLRGLWQDLLVLDRRVTELEREIEQIARQDPVAVRLQQLRGIGPITATALVATVGDASQFANGRQMAASFGLTPKQNSSGGKERLLGISKRGDTYLRCLLIHGARSVIRTAQTKTDRLSVESRLIVNAFDE

SEQ ID NO: 516416 - protein, 285 aa, unidentified
MKNQAIQYLALDVHQATSVATVRDESGSVRMRATVATEAGAILGLVRGLGPRVHVVFEEGTQAQWLHDLLHPHAERVLVCNVRGRSETTNKSDRIDADWLSEQLRLGALHSVYHGSPGVATLKELVRCYLNLVEDSTRVMLRVKAIYRGRAIGTAGEAVYRPSQRRAWLAKLEARGARTRAESLLKQLDVLIELRTKARAAMLAEGRRQPGWKILKSIPFFGPVRVAILLAVIGTPFRFRGKRQLWPYVGLAVVTRSSSEQEIVDGEAASAKESTGTAPVPKATR

SEQ ID NO: 516417 - protein, 478 aa, unidentified
MEQKYRRCCGIDVHKKSVTVCVLAPSGKPETETKKRNFRTFTRDLKQLRAWLKSCKVTAIAMESTGQYWRPVWNILEGHFEKLLLVNPQHIKGLNGYKTDPKDAQWIAGLLDSDKLRGSWVPPREIRELRDLTRQRVHVLEDQNRVKNRIEQLCQSGNIKVSSVATDLFGVSGRKMLAAIVEGKHDAGWIADYARSSLRSKKRELELALEGSFSEDQRWLLDKELRHLEWLEMQIEVLERQIERRVAPFEEPMRRLMTIPGIDRKTAWTIVAEVGVDMKVYGDARHLASWAGLCPGNRESGGKRMSGRTRKANRYVRRAMCQAAWAATHTKDTYLSAFYRRMKVRKGAPKAVMALAHHLITVVYNVLARGEEYVELGGDYYDRRDKPKTVSRLVARLTRLGYYVNLKPVEPEASQQQESPEEALPVSSAIPPRAPSPEQRASSPQRKGRPCKCAARGIICKHDRTVYVNPMNLEGLHQ

SEQ ID NO: 516418 - protein, 349 aa, unidentified
MNEISTIGLDLAKNVFQVHGIDATGKVVVRRQLRRRQLEKFLAALPPGVVVGMEACSGAHHWGRVIEKLGHEARMMPAAYVKPYVKRNKNDGRDAEGICEAMTRPTMRFVAVKSLDSQAVAVLHCTRRLLVRQRTMSGNALRSALAEFGIVAAQGLKGLRSLMALLADKASAIPDKARMPLRVLARQWERLNADICKLEAQIVSAAKSDAVARRLMAIPGLGPIGASAILAAVADARVFKTARDFAAWLGLTPRQFGTGGKQRSGGISKQGDRTLRTLLTIGATSYLRYERARGAEHPWVRDLLARRPFKVAAVAYAAKMARMIWAMLVTGEGYRAPNRSRSVAAQAAA

SEQ ID NO: 516419 - protein, 348 aa, unidentified
MSQSNQYVGLDVSLKETSICVIDDADKIVWRGRADSTPEAIASAVKQHAPGAVRIGLESGQLSSWLFHGLKKVGLPVICVDARHAKAALSLKVNKTDANDALGLAQIMRVGWYREVTVKGLDCQAVRALLVARAQIVSQITTLKNCVRGILKTFGRVLPKGLRSQFPARVRAAIDGHPVLGAIIEPTLQVLEATRAQLLVYDRAVIQRARNDDTARQLMSAPGVGTVVALAYMTGVEDPARFKRSSSVAAYFGMTPRRYQSGEVDHAGRISKCGDGMVRGLLFEAAKVLLSRSARPSALKTWGEALGKRIGAKKATMAVARKLAVILHHMWTTGTTFQWNTEAASPAA

SEQ ID NO: 516420 - protein, 374 aa, unidentified
MADYSEVFVGIDTSKLRNAVAIAEGGRNGEVRYLGEIDNTEAATSKLVKKLAAQHRRLTFCYEAGPTGYGLHRLIKTLGHECVVVAPSLIPKKPGDRVKTNRRDALNLAKLLRAGELTAVWVPDARHEAMRDLVRAREAAVDDLKSKRQQVLSLLLRLGRHFTGKRTWTRAHMNWLVSQKLAHREQRIAFEEMLLAVRQADERVIRLERAIAAAVPDWSLAAVVTALMAVRGLDLISATIFLAEIGDLSRFASPRQLMAYLGLVPGEASTGDRVWRGGITKAGNHRARRILVECSWSYRHPPRVGKKKLAKVEAAPPAVQEIAWKAQARLTARYRALARRGKRPTLVVTAIARELSGFIWAVSRAVGQPATPAK

SEQ ID NO: 516421 - protein, 397 aa, unidentified
MTTIGIDIGGRTHVAARCRDDQARADREILRVSQDRAGFTALDAWLERQPDPVTLVTMESSGHYWMPLASHLRRHEVPVAVVNPLAAKYFARSRLARTKSDPADARSLAEMAMRDTPDATRDPLAGAELRQAARFAMTLVEEQAKVCQRLVRLVELGFPELGELFNDPTCRTAREVLRVAPTARAATRRRTATLANANGGPGHRRLGMAKAERLQTAAADSIAVPELDAEVAFEIDLLLDQHDLLERQIADADRRVAGLLDGELARRIQTIPGVGPSIAATLISEIGDIARFDDFDQLLAYAGVHPAERSSGRKGSNPETSWHMSKAGNSHLRAAAYRMALVGVAHNPVIAAHYARKRAAGKSKMNALGHCMRKALAIVWGVWRNGQDFDPNWGVEA

SEQ ID NO: 516422 - protein, 350 aa, unidentified
MKVEIVKQNVGIDVSKEKVDVAFSHLTADFNVVVVSTRKFSNTAKGFKELQELVNDKKRPDMPVHFTMEATGVYYEALAYFLHEQEGYVVHVVLPNKAYKYGQSLGLKSVTDKIDARMLSLMGLERKLRQWLPISPSLLELRQLTRERSALVKNKTKVSNQLHAYSHHGKPNKESIARSQQLVSFLDDQIGQIEKEIFNFVDNDKKLDSNVDFLLSIPGVGMITAATIFAETNGFAAIESIKQLSSYSGLDVRISESGKWRGKSTISKRGNSYIRSVLYMPTLSKITHDNATNQYYLRLKEKKGMGMIAVVACMRKMLALMYTLWKKQEMFKDASGKIISKEALKKKKKR

SEQ ID NO: 516423 - protein, 354 aa, unidentified
MAEKCKIAIAVMGIDIGKNSLHVVGLDARGAIALRQKWSRGQVASRLASMAPCLIGMEACVGAHHLSRKLKALGHDARLMPAKYVRPYSKGQKNDFRDAEAIAEAVQRPTMKFVATKTAEQLDLQALHRVRERLVSQRTGIINQIRAFMLERGIAVRQGLRFLRAELPGILASRGDVLSARMVRVIEELTADWRRLDERIEGLSTEIEALARKDTGCERLMSVPGIGPIISSATVAAIGTGDVFSKGRDFAAWLGLVPRQISTGDRTILGKISKRGNRYLRVLFVQAAWVVLIKPQSWERHGLKSWIEAAKKRLHRNVLAIALANKLARIAWAVLAKCRDFEIRRTDDALVRPA

SEQ ID NO: 516424 - protein, 416 aa, unidentified
MTDSAETAAAFVGIDWADTKHDIHLHPADGSAPSHQVIEAKGEAIQDWILKMRERFAHEGAKVFVCLEQSKGALIYQLMEHEFFVLYPINPKTLAKFREAFRPSGAKGDQSDADLLCELVRLHAHRLKAWKPDDVQTRKLAAFCEKRRQAVERATRLVQQLRAELKNYYPFVLAELDLQSVLACDFLQRWSSLEQLHAAKPQTIRKFFYAHNYRRGDKLEALLKKVATAATVTADSAIIEPAATHVRLLAAQLRTILVALPEFDEKITELFQSHPDAPIFESFPGAGPQLGPRLLTAFGTDRERLESAEQMSVMSGIAPIRIASNNTQATVKRWACPKFLRQSFHEFARCSVARCAWAKAFYEQQRARNKRHHTAIRALAFKWIRILFACWKNRQPYDDALYHRRLQKHRSALTCA

SEQ ID NO: 516425 - protein, 412 aa, unidentified
MRRVIGIDTHRTFGEVVIWEDGRLRHAGRVDMTRTALEGFGKSLLVTDEVVIEATGNCMAVSRVLSPFVKRVIIANPLQVKAIAHAHVKTDKVDAGTLASLYAAGYLPEIWTPDAATERMRRLVARRYQVVRHRTRIKNEVHSILYAYLIPHCPHADLFSGVGRAWLSRQPFPDDERIAIERHLSELDRLGEDLTVLDTAIADSALADPAINRLITITGINVTVAAGLVAAIGDIRRFASPQKLVSYVGLNPRVRQSGLGAAHHGRISKVGRSHARAMLVEAAWAAAKTPGPLHAFFVRIRAKRGHQIAAVALARKLTVLCWHLLTKDVDYLWARPALVANKVRSMELQAGRPQKKGNRRGPAYAYNVKQLRDQEMDVARRAEAAYEHFVGRWSPRPPKGTVRGRLKPAGLG

SEQ ID NO: 516426 - protein, 339 aa, unidentified
MNRQYAAVDLHLARSLIVREDQAGTELGVERIDNSPMNLAGALADAGPNPEVAIEATYGWYWAVDVLEELGAAVHLVNPSGLGQSWEGRRVKNDYKDCRELIDRMRLHKLPEAWIAPAELRELRELVRYRAKLVNIRTGLKAQVKAVLAKHCLRPPVNELWGVAGPRWLDEQELPDAYLIRSESLRDLVGAVDREVTMLERTIHRRLKDDAGYRAVQRLDGVGRVLAGVFCAEIGDASRFSGPDALCSWAGLTPRHRESDTKVHRGRSTKQGSRLLRWAAIEAISKMRGGPKLKIDYHRIAERRGINVARVAVARKLLTLVYYGLRDGEIRCLARAGAA

SEQ ID NO: 516427 - protein, 407 aa, unidentified
MDLLKTVFGIDVSSRKSNVCIMVNGQKVNDYAISNDMVGFNRLLGDLKQVTKPQIIFEATGVYSRRLQAFLDMHELRYVMMNPLEAKRKTKDDLHQNKTDKLDALYLAKLQSEHPQRLAYVQNKEYQELMANNRIYEQASHDLITNRNRLHKAIQLTFPEIEHLLANPRGKNYWSIALRFPHPDIVLETKEADIIDFLKGLSGIGKKRANDITQNLIRLAKVACPAVKKNSAHIRGLKMAINNILSAEEECQTALQEMAKLAPKRDLEILTSIPGIGENTALRIISELGDIRRFNNPSQLNAFVGVDPQVYESGNLTAHLSISKRGTAIGRKVLYLAINQIQSAKKAGNPCHIADYYEKRKRSSETASHKKAAIASIHKLLRTIFALIKNDQLYSYDVAKHNQRLLS

SEQ ID NO: 516428 - protein, 362 aa, unidentified
MGEDSEVFVGIDTSKLRHAVAIAQGGRGGEVRFLGEIEATDAAVTKLVRRLAAKHDKLFFCYEAGPTGYGLYRLIKELGRDCVVVAPSMTPKRPGDRVKTNRRDALSLARLLRAGELTSVWAPDERHEAMRDLVRARSTVVADLRSKRQQLSAFLLRLGRHFTGKKTWGRAHMKWLLGQKLAHREQRLAFEEMMLAIGEAQGRVARLEQAIGAAVPDWSLAEMVTALMAMRGIDLIAGTTILAEIGDLGRFSTPRELMAWLGLVPSEASTGDRVRRGSITKTGNSRARRMLIECAQSYRFPARVGLAKQARVAAAPRAVREIAWKAQTRLTARYRALIKRGKLRNVVVTAIAGLSGILCGGP

SEQ ID NO: 516429 - protein, 338 aa, unidentified
MIVIGVDVHKHSLTAVAVDEAGRMHEEKTVAAGDGELLAWASMLSDQRLWALEDCRQLTRWLERHLVEAGEELVRVPPKLMAPQRRAGRARGKSDPIDALAVARAALREPGLSQPRPDEQPFRELKLLVDHRDDLVDERRRAQQRLRWHLHQLDPSFAVPARRLDRLAQLDRVGRWLARREQDVQVRIARDLISWCRSLTRAIVELDRELEQRTEQLAPALLELPGCGALTAAKLLGEVGPIDRFRSDAQLARHSGVAPLEASSGRVQRHRLDRGGNRQLNAAFYRMAITQARYYPAARAYLERKQAEGKSRREAIRCLKRQLARVVFNTLKASPALT

SEQ ID NO: 516430 - protein, 343 aa, unidentified
MQIASIGIDLGKTTFHLVALGPAGQVLVRRKFSQKQLLTYLANMVSSLVGLEACSGAHFLGRALRSQGHDVRLIPAQFVKPFVKSNKNDFLDAEAIAEAVARQNMRFVPIKTDDQLDLQAIHRVRDRLIACRTAVINQLRAFLLERGMTFAKSPAKLKLAMPEILENADSNLTPRMRNLVADLWTEWKSLDQQIRASDLEVEQIATSDPACQRLRSIPGIGPLIATAIVAAIGNGAAFRKGREFAAFVGLVPRQYSTGGKARLMGISKRGNSYLRKLLIHGARAAVVRMKRERAPFGGWLNGLEQRAPRNVVVTATANKLARIAWAVLSSGDPYRPLTIAISA

SEQ ID NO: 516431-795141 - skipped (278711 entries)

SEQ ID NO: 795142 - protein, 90 aa, unidentified
  VARIANT 2: note = Any amino acid
  VARIANT 3: note = Any amino acid
  VARIANT 4: note = Any amino acid
  VARIANT 5: note = Any amino acid
  VARIANT 6: note = Any amino acid
  VARIANT 7: note = Any amino acid
  VARIANT 8: note = Any amino acid
  VARIANT 9: note = Any amino acid
  VARIANT 10: note = Any amino acid
  VARIANT 11: note = Any amino acid
  VARIANT 12: note = Any amino acid
  VARIANT 13: note = Any amino acid
  VARIANT 14: note = Any amino acid
  VARIANT 15: note = Any amino acid
  VARIANT 16: note = Any amino acid
  VARIANT 17: note = Any amino acid
  VARIANT 18: note = Any amino acid
  VARIANT 19: note = Any amino acid
  VARIANT 20: note = Any amino acid
  VARIANT 21: note = Any amino acid
  VARIANT 22: note = Any amino acid
  VARIANT 23: note = Any amino acid
  VARIANT 24: note = Any amino acid
  VARIANT 25: note = Any amino acid
  VARIANT 26: note = Any amino acid
  VARIANT 27: note = Any amino acid
  VARIANT 28: note = Any amino acid
  VARIANT 29: note = Any amino acid
  VARIANT 30: note = Any amino acid
  VARIANT 31: note = Any amino acid
  VARIANT 32: note = Any amino acid
  VARIANT 33: note = Any amino acid
  VARIANT 34: note = Any amino acid
  VARIANT 35: note = Any amino acid
  VARIANT 36: note = Any amino acid
  VARIANT 37: note = Any amino acid
  VARIANT 38: note = Any amino acid
  VARIANT 39: note = Any amino acid
  VARIANT 40: note = Any amino acid
  VARIANT 41: note = Any amino acid
  VARIANT 42: note = Any amino acid
  VARIANT 43: note = Any amino acid
  VARIANT 44: note = Any amino acid
  VARIANT 46: note = Any amino acid
  VARIANT 47: note = Any amino acid
  VARIANT 48: note = Any amino acid
  VARIANT 49: note = Any amino acid
  VARIANT 50: note = Any amino acid
  VARIANT 51: note = Any amino acid
  VARIANT 52: note = Any amino acid
  VARIANT 53: note = Any amino acid
  VARIANT 54: note = Any amino acid
  VARIANT 55: note = Any amino acid
  VARIANT 56: note = Any amino acid
  VARIANT 57: note = Any amino acid
  VARIANT 58: note = Any amino acid
  VARIANT 59: note = Any amino acid
  VARIANT 60: note = Any amino acid
  VARIANT 61: note = Any amino acid
  VARIANT 62: note = Any amino acid
  VARIANT 63: note = Any amino acid
  VARIANT 64: note = Any amino acid
  VARIANT 65: note = Any amino acid
  VARIANT 66: note = Any amino acid
  VARIANT 67: note = Any amino acid
  VARIANT 68: note = Any amino acid
  VARIANT 69: note = Any amino acid
  VARIANT 70: note = Any amino acid
  VARIANT 71: note = Any amino acid
  VARIANT 72: note = Any amino acid
  VARIANT 73: note = Any amino acid
  VARIANT 74: note = Any amino acid
  VARIANT 75: note = Any amino acid
  VARIANT 76: note = Any amino acid
  VARIANT 77: note = Any amino acid
  VARIANT 78: note = Any amino acid
  VARIANT 79: note = Any amino acid
  VARIANT 80: note = Any amino acid
  VARIANT 81: note = Any amino acid
  VARIANT 82: note = Any amino acid
  VARIANT 83: note = Any amino acid
  VARIANT 84: note = Any amino acid
  VARIANT 86: note = Any amino acid
  VARIANT 88: note = Any amino acid
  VARIANT 89: note = Any amino acid
DXXXXXXXXXXXXXXXXXXXXXXXXXXXXXXXXXXXXXXXXXXXEXXXXXXXXXXXXXXXXXXXXXXXXXXXXXXXXXXXXXXXKXDXXD

SEQ ID NO: 795143 - protein, 84 aa, unidentified
  VARIANT 2: note = Any amino acid
  VARIANT 3: note = Any amino acid
  VARIANT 4: note = Any amino acid
  VARIANT 5: note = Any amino acid
  VARIANT 6: note = Any amino acid
  VARIANT 7: note = Any amino acid
  VARIANT 8: note = Any amino acid
  VARIANT 9: note = Any amino acid
  VARIANT 10: note = Any amino acid
  VARIANT 11: note = Any amino acid
  VARIANT 12: note = Any amino acid
  VARIANT 13: note = Any amino acid
  VARIANT 14: note = Any amino acid
  VARIANT 15: note = Any amino acid
  VARIANT 16: note = Any amino acid
  VARIANT 17: note = Any amino acid
  VARIANT 18: note = Any amino acid
  VARIANT 19: note = Any amino acid
  VARIANT 20: note = Any amino acid
  VARIANT 21: note = Any amino acid
  VARIANT 22: note = Any amino acid
  VARIANT 23: note = Any amino acid
  VARIANT 24: note = Any amino acid
  VARIANT 25: note = Any amino acid
  VARIANT 26: note = Any amino acid
  VARIANT 27: note = Any amino acid
  VARIANT 28: note = Any amino acid
  VARIANT 29: note = Any amino acid
  VARIANT 30: note = Any amino acid
  VARIANT 31: note = Any amino acid
  VARIANT 32: note = Any amino acid
  VARIANT 33: note = Any amino acid
  VARIANT 34: note = Any amino acid
  VARIANT 35: note = Any amino acid
  VARIANT 36: note = Any amino acid
  VARIANT 37: note = Any amino acid
  VARIANT 38: note = Any amino acid
  VARIANT 39: note = Any amino acid
  VARIANT 40: note = Any amino acid
  VARIANT 41: note = Any amino acid
  VARIANT 42: note = Any amino acid
  VARIANT 43: note = Any amino acid
  VARIANT 45: note = Any amino acid
  VARIANT 46: note = Any amino acid
  VARIANT 47: note = Any amino acid
  VARIANT 48: note = Any amino acid
  VARIANT 49: note = Any amino acid
  VARIANT 50: note = Any amino acid
  VARIANT 51: note = Any amino acid
  VARIANT 52: note = Any amino acid
  VARIANT 53: note = Any amino acid
  VARIANT 54: note = Any amino acid
  VARIANT 55: note = Any amino acid
  VARIANT 56: note = Any amino acid
  VARIANT 57: note = Any amino acid
  VARIANT 58: note = Any amino acid
  VARIANT 59: note = Any amino acid
  VARIANT 60: note = Any amino acid
  VARIANT 61: note = Any amino acid
  VARIANT 62: note = Any amino acid
  VARIANT 63: note = Any amino acid
  VARIANT 64: note = Any amino acid
  VARIANT 65: note = Any amino acid
  VARIANT 66: note = Any amino acid
  VARIANT 67: note = Any amino acid
  VARIANT 68: note = Any amino acid
  VARIANT 69: note = Any amino acid
  VARIANT 70: note = Any amino acid
  VARIANT 71: note = Any amino acid
  VARIANT 72: note = Any amino acid
  VARIANT 73: note = Any amino acid
  VARIANT 74: note = Any amino acid
  VARIANT 75: note = Any amino acid
  VARIANT 76: note = Any amino acid
  VARIANT 77: note = Any amino acid
  VARIANT 78: note = Any amino acid
  VARIANT 80: note = Any amino acid
  VARIANT 82: note = Any amino acid
  VARIANT 83: note = Any amino acid
DXXXXXXXXXXXXXXXXXXXXXXXXXXXXXXXXXXXXXXXXXXEXXXXXXXXXXXXXXXXXXXXXXXXXXXXXXXXXXKXDXXD

SEQ ID NO: 795144 - protein, 5 aa, unidentified
GIDVS

SEQ ID NO: 795145 - protein, 5 aa, unidentified
GLDVH

SEQ ID NO: 795146 - protein, 5 aa, unidentified
MEATG

SEQ ID NO: 795147 - protein, 5 aa, unidentified
MEACG

SEQ ID NO: 795148 - protein, 5 aa, unidentified
DRIDA

SEQ ID NO: 795149 - protein, 5 aa, unidentified
DRRDA

SEQ ID NO: 795150 - protein, 50 aa, unidentified
  VARIANT 2: note = Any amino acid
  VARIANT 3: note = Any amino acid
  VARIANT 4: note = Any amino acid
  VARIANT 5: note = Any amino acid
  VARIANT 6: note = Any amino acid
  VARIANT 7: note = Any amino acid
  VARIANT 8: note = Any amino acid
  VARIANT 9: note = Any amino acid
  VARIANT 10: note = Any amino acid
  VARIANT 11: note = Any amino acid
  VARIANT 12: note = Any amino acid
  VARIANT 13: note = Any amino acid
  VARIANT 14: note = Any amino acid
  VARIANT 15: note = Any amino acid
  VARIANT 16: note = Any amino acid
  VARIANT 17: note = Any amino acid
  VARIANT 18: note = Any amino acid
  VARIANT 19: note = Any amino acid
  VARIANT 20: note = Any amino acid
  VARIANT 21: note = Any amino acid
  VARIANT 22: note = Any amino acid
  VARIANT 23: note = Any amino acid
  VARIANT 24: note = Any amino acid
  VARIANT 25: note = Any amino acid
  VARIANT 26: note = Any amino acid
  VARIANT 27: note = Any amino acid
  VARIANT 28: note = Any amino acid
  VARIANT 29: note = Any amino acid
  VARIANT 31: note = Any amino acid
  VARIANT 32: note = Any amino acid
  VARIANT 33: note = Any amino acid
  VARIANT 34: note = Any amino acid
  VARIANT 35: note = Any amino acid
  VARIANT 36: note = Any amino acid
  VARIANT 37: note = Any amino acid
  VARIANT 40: note = Any amino acid
  VARIANT 41: note = Any amino acid
  VARIANT 42: note = Any amino acid
  VARIANT 43: note = Any amino acid
  VARIANT 44: note = Any amino acid
  VARIANT 45: note = Any amino acid
  VARIANT 46: note = Any amino acid
  VARIANT 47: note = Any amino acid
  VARIANT 48: note = Any amino acid
  VARIANT 49: note = Any amino acid
GXXXXXXXXXXXXXXXXXXXXXXXXXXXXGXXXXXXXSGXXXXXXXXXXG

SEQ ID NO: 795151 - protein, 52 aa, unidentified
  VARIANT 2: note = Any amino acid
  VARIANT 3: note = Any amino acid
  VARIANT 4: note = Any amino acid
  VARIANT 5: note = Any amino acid
  VARIANT 6: note = Any amino acid
  VARIANT 7: note = Any amino acid
  VARIANT 8: note = Any amino acid
  VARIANT 9: note = Any amino acid
  VARIANT 10: note = Any amino acid
  VARIANT 11: note = Any amino acid
  VARIANT 12: note = Any amino acid
  VARIANT 13: note = Any amino acid
  VARIANT 14: note = Any amino acid
  VARIANT 15: note = Any amino acid
  VARIANT 16: note = Any amino acid
  VARIANT 17: note = Any amino acid
  VARIANT 18: note = Any amino acid
  VARIANT 19: note = Any amino acid
  VARIANT 20: note = Any amino acid
  VARIANT 21: note = Any amino acid
  VARIANT 22: note = Any amino acid
  VARIANT 23: note = Any amino acid
  VARIANT 24: note = Any amino acid
  VARIANT 25: note = Any amino acid
  VARIANT 26: note = Any amino acid
  VARIANT 27: note = Any amino acid
  VARIANT 28: note = Any amino acid
  VARIANT 29: note = Any amino acid
  VARIANT 30: note = Any amino acid
  VARIANT 32: note = Any amino acid
  VARIANT 33: note = Any amino acid
  VARIANT 34: note = Any amino acid
  VARIANT 35: note = Any amino acid
  VARIANT 36: note = Any amino acid
  VARIANT 37: note = Any amino acid
  VARIANT 38: note = Any amino acid
  VARIANT 41: note = Any amino acid
  VARIANT 42: note = Any amino acid
  VARIANT 43: note = Any amino acid
  VARIANT 44: note = Any amino acid
  VARIANT 45: note = Any amino acid
  VARIANT 46: note = Any amino acid
  VARIANT 47: note = Any amino acid
  VARIANT 48: note = Any amino acid
  VARIANT 49: note = Any amino acid
  VARIANT 50: note = Any amino acid
  VARIANT 51: note = Any amino acid
GXXXXXXXXXXXXXXXXXXXXXXXXXXXXXGXXXXXXXSGXXXXXXXXXXXG

SEQ ID NO: 795152 - protein, 5 aa, unidentified
IPGIG

SEQ ID NO: 795153 - protein, 5 aa, unidentified
IPGVG

SEQ ID NO: 795154 - protein, 5 aa, unidentified
AGLAP

SEQ ID NO: 795155 - protein, 5 aa, unidentified
LGLVP

SEQ ID NO: 795156 - RNA, 176 nt, unidentified
  source 1..176: mol_type = unassigned RNA; note = IS621
  misc_difference 1: note = a, c, u, g, unknown, or other
  misc_difference 2: note = a, c, u, g, unknown, or other
  misc_difference 3: note = a, c, u, g, unknown, or other
  misc_difference 4: note = a, c, u, g, unknown, or other
  misc_difference 5: note = a, c, u, g, unknown, or other
  misc_difference 6: note = a, c, u, g, unknown, or other
  misc_difference 7: note = a, c, u, g, unknown, or other
  misc_difference 8: note = a, c, u, g, unknown, or other
  misc_difference 11: note = a, c, u, g, unknown, or other
  misc_difference 14: note = a, c, u, g, unknown, or other
  misc_difference 15: note = a, c, u, g, unknown, or other
  misc_difference 16: note = a, c, u, g, unknown, or other
  misc_difference 17: note = a, c, u, g, unknown, or other
  misc_difference 21: note = a, c, u, g, unknown, or other
  misc_difference 22: note = a, c, u, g, unknown, or other
  misc_difference 23: note = a, c, u, g, unknown, or other
  misc_difference 25: note = a, c, u, g, unknown, or other
  misc_difference 26: note = a, c, u, g, unknown, or other
  misc_difference 27: note = a, c, u, g, unknown, or other
  misc_difference 28: note = a, c, u, g, unknown, or other
  misc_difference 31: note = a, c, u, g, unknown, or other
  misc_difference 32: note = a, c, u, g, unknown, or other
  misc_difference 33: note = a, c, u, g, unknown, or other
  misc_difference 34: note = a, c, u, g, unknown, or other
  misc_difference 46: note = a, c, u, g, unknown, or other
  misc_difference 49: note = a, c, u, g, unknown, or other
  misc_difference 51: note = a, c, u, g, unknown, or other
  misc_difference 55: note = a, c, u, g, unknown, or other
  misc_difference 56: note = a, c, u, g, unknown, or other
  misc_difference 60: note = a, c, u, g, unknown, or other
  misc_difference 61: note = a, c, u, g, unknown, or other
  misc_difference 62: note = a, c, u, g, unknown, or other
  misc_difference 70: note = a, c, u, g, unknown, or other
  misc_difference 71: note = a, c, u, g, unknown, or other
  misc_difference 79: note = a, c, u, g, unknown, or other
  misc_difference 80: note = a, c, u, g, unknown, or other
  misc_difference 81: note = a, c, u, g, unknown, or other
  misc_difference 86: note = a, c, u, g, unknown, or other
  misc_difference 90: note = a, c, u, g, unknown, or other
  misc_difference 95: note = a, c, u, g, unknown, or other
  misc_difference 96: note = a, c, u, g, unknown, or other
  misc_difference 97: note = a, c, u, g, unknown, or other
  misc_difference 98: note = a, c, u, g, unknown, or other
  misc_difference 99: note = a, c, u, g, unknown, or other
  misc_difference 100: note = a, c, u, g, unknown, or other
  misc_difference 101: note = a, c, u, g, unknown, or other
  misc_difference 102: note = a, c, u, g, unknown, or other
  misc_difference 104: note = a, c, u, g, unknown, or other
  misc_difference 105: note = a, c, u, g, unknown, or other
  misc_difference 108: note = a, c, u, g, unknown, or other
  misc_difference 109: note = a, c, u, g, unknown, or other
  misc_difference 110: note = a, c, u, g, unknown, or other
  misc_difference 120: note = a, c, u, g, unknown, or other
  misc_difference 122: note = a, c, u, g, unknown, or other
  misc_difference 126: note = a, c, u, g, unknown, or other
  misc_difference 128: note = a, c, u, g, unknown, or other
  misc_difference 136: note = a, c, u, g, unknown, or other
  misc_difference 137: note = a, c, u, g, unknown, or other
  misc_difference 138: note = a, c, u, g, unknown, or other
  misc_difference 143: note = a, c, u, g, unknown, or other
  misc_difference 162: note = a, c, u, g, unknown, or other
  misc_difference 166: note = a, c, u, g, unknown, or other
  misc_difference 173: note = a, c, u, g, unknown, or other
  misc_difference 174: note = a, c, u, g, unknown, or other
  misc_difference 175: note = a, c, u, g, unknown, or other
  misc_difference 176: note = a, c, u, g, unknown, or other
nnnnnnnnyynrrnnnnyyynnnynnnnrrnnnnyyggaygccgynyynrncctnnrrynnnaryyygynnygtagatnnnygcrncrrnyryynnnnnnnnynngynnnrrrycgracngnatcnynggcyggynnnycgrnarycygcattyacaaggtngrtnrcryrannnn

SEQ ID NO: 795157 - DNA, 32 bp, unidentified
  source 1..32: mol_type = unassigned DNA
accatcaggccttgtattatccctccagtgca

SEQ ID NO: 795158 - DNA, 28 bp, unidentified
  source 1..28: mol_type = unassigned DNA
caggccataacagtatctacagatgagc

SEQ ID NO: 795159 - DNA, 32 bp, unidentified
  source 1..32: mol_type = unassigned DNA
aaccgtagcccaatgaaatggacccacccctt

SEQ ID NO: 795160 - DNA, 28 bp, unidentified
  source 1..28: mol_type = unassigned DNA
aagggtgggtccatatacgtatgcagcc

SEQ ID NO: 795161 - DNA, 19 bp, unidentified
  source 1..19: mol_type = unassigned DNA
atcaggccttgtattatcc

SEQ ID NO: 795162 - DNA, 19 bp, unidentified
  source 1..19: mol_type = unassigned DNA
ataacagtatctacagatg

SEQ ID NO: 795163 - DNA, 16 bp, unidentified
  source 1..16: mol_type = unassigned DNA
atcaggcctacagatg

SEQ ID NO: 795164 - DNA, 22 bp, unidentified
  source 1..22: mol_type = unassigned DNA
ataacagtatcttgtattatcc

SEQ ID NO: 795165 - DNA, 43 bp, unidentified
  source 1..43: mol_type = unassigned DNA
aaacttgcaggccataacagtatcttgtattatccctccagtg

SEQ ID NO: 795166 - RNA, 174 nt, unidentified
  source 1..174: mol_type = unassigned RNA
  misc_difference 1: note = a, c, u, g, unknown, or other
  misc_difference 2: note = a, c, u, g, unknown, or other
  misc_difference 3: note = a, c, u, g, unknown, or other
  misc_difference 4: note = a, c, u, g, unknown, or other
  misc_difference 5: note = a, c, u, g, unknown, or other
  misc_difference 6: note = a, c, u, g, unknown, or other
  misc_difference 7: note = a, c, u, g, unknown, or other
  misc_difference 8: note = a, c, u, g, unknown, or other
  misc_difference 11: note = a, c, u, g, unknown, or other
  misc_difference 14: note = a, c, u, g, unknown, or other
  misc_difference 15: note = a, c, u, g, unknown, or other
  misc_difference 16: note = a, c, u, g, unknown, or other
  misc_difference 17: note = a, c, u, g, unknown, or other
  misc_difference 21: note = a, c, u, g, unknown, or other
  misc_difference 22: note = a, c, u, g, unknown, or other
  misc_difference 23: note = a, c, u, g, unknown, or other
  misc_difference 25: note = a, c, u, g, unknown, or other
  misc_difference 26: note = a, c, u, g, unknown, or other
  misc_difference 27: note = a, c, u, g, unknown, or other
  misc_difference 28: note = a, c, u, g, unknown, or other
  misc_difference 31: note = a, c, u, g, unknown, or other
  misc_difference 32: note = a, c, u, g, unknown, or other
  misc_difference 33: note = a, c, u, g, unknown, or other
  misc_difference 34: note = a, c, u, g, unknown, or other
  misc_difference 46: note = a, c, u, g, unknown, or other
  misc_difference 49: note = a, c, u, g, unknown, or other
  misc_difference 51: note = a, c, u, g, unknown, or other
  misc_difference 55: note = a, c, u, g, unknown, or other
  misc_difference 56: note = a, c, u, g, unknown, or other
  misc_difference 60: note = a, c, u, g, unknown, or other
  misc_difference 61: note = a, c, u, g, unknown, or other
  misc_difference 62: note = a, c, u, g, unknown, or other
  misc_difference 70: note = a, c, u, g, unknown, or other
  misc_difference 71: note = a, c, u, g, unknown, or other
  misc_difference 79: note = a, c, u, g, unknown, or other
  misc_difference 80: note = a, c, u, g, unknown, or other
  misc_difference 81: note = a, c, u, g, unknown, or other
  misc_difference 86: note = a, c, u, g, unknown, or other
  misc_difference 90: note = a, c, u, g, unknown, or other
  misc_difference 95: note = a, c, u, g, unknown, or other
  misc_difference 96: note = a, c, u, g, unknown, or other
  misc_difference 97: note = a, c, u, g, unknown, or other
  misc_difference 98: note = a, c, u, g, unknown, or other
  misc_difference 99: note = a, c, u, g, unknown, or other
  misc_difference 100: note = a, c, u, g, unknown, or other
  misc_difference 101: note = a, c, u, g, unknown, or other
  misc_difference 102: note = a, c, u, g, unknown, or other
  misc_difference 104: note = a, c, u, g, unknown, or other
  misc_difference 105: note = a, c, u, g, unknown, or other
  misc_difference 108: note = a, c, u, g, unknown, or other
  misc_difference 109: note = a, c, u, g, unknown, or other
  misc_difference 110: note = a, c, u, g, unknown, or other
  misc_difference 120: note = a, c, u, g, unknown, or other
  misc_difference 122: note = a, c, u, g, unknown, or other
  misc_difference 126: note = a, c, u, g, unknown, or other
  misc_difference 128: note = a, c, u, g, unknown, or other
  misc_difference 136: note = a, c, u, g, unknown, or other
  misc_difference 137: note = a, c, u, g, unknown, or other
  misc_difference 138: note = a, c, u, g, unknown, or other
  misc_difference 143: note = a, c, u, g, unknown, or other
  misc_difference 160: note = a, c, u, g, unknown, or other
  misc_difference 164: note = a, c, u, g, unknown, or other
  misc_difference 171: note = a, c, u, g, unknown, or other
  misc_difference 172: note = a, c, u, g, unknown, or other
  misc_difference 173: note = a, c, u, g, unknown, or other
  misc_difference 174: note = a, c, u, g, unknown, or other
nnnnnnnnyynrrnnnnyyynnnynnnnrrnnnnyyggaygccgynyynrncctnnrrynnnaryyygynnygtagatnnnygcrncrrnyryynnnnnnnnynngynnnrrrycgracngnatcnynggcyggynnnycgrnarycygcatyacaagtngrtnrcryrannnn

SEQ ID NO: 795167 - DNA, 12 bp, unidentified
  source 1..12: mol_type = unassigned DNA
tccctctggtac

SEQ ID NO: 795168 - RNA, 12 nt, unidentified
  source 1..12: mol_type = unassigned RNA
acccttataccc

SEQ ID NO: 795169 - RNA, 177 nt, unidentified
  source 1..177: mol_type = unassigned RNA
agtgcagagaaaatcggccagttttctctgcctgcagtccgcatgccgtatcgggccttgggttctaacctgttgcgtagatttatgcagcggactgcctttctcccaaagtgataaaccggacagtatcatggaccggttttcccggtaatccgtatttgcaaggttggtttcact

SEQ ID NO: 795170 - DNA, 20 bp, unidentified
  source 1..20: mol_type = unassigned DNA
accatcaggcctacagatga

SEQ ID NO: 795171 - DNA, 20 bp, unidentified
  source 1..20: mol_type = unassigned DNA
ataacagtatcttgtattat

SEQ ID NO: 795172 - DNA, 22 bp, unidentified
  source 1..22: mol_type = unassigned DNA
accatcaggcctacagatgagc

SEQ ID NO: 795173 - DNA, 11 bp, unidentified
  source 1..11: mol_type = unassigned DNA
atcaggcctac

SEQ ID NO: 795174 - DNA, 17 bp, unidentified
  source 1..17: mol_type = unassigned DNA
acagtatcttgtattat

SEQ ID NO: 795175 - RNA, 177 nt, unidentified
  source 1..177: mol_type = unassigned RNA
agtgcagagaaaatcggccagttttctctgcctgcagtccgcatgccgtgggaccccttgggttctaacctgttgcctagatttatgcagcggactgcctttctcccaaagtgataaaccggacagtatcatggaccggttttcccggtaatccgtatttgcaaggttggtttcact

SEQ ID NO: 795176 - DNA, 11 bp, unidentified
  source 1..11: mol_type = unassigned DNA
gggacccctag

SEQ ID NO: 795177 - DNA, 14 bp, unidentified
  source 1..14: mol_type = unassigned DNA
acagtatcttgtat

SEQ ID NO: 795178 - DNA, 20 bp, unidentified
  source 1..20: mol_type = unassigned DNA
  misc_difference 1: note = a, c, t, g, unknown, or other
  misc_difference 2: note = a, c, t, g, unknown, or other
  misc_difference 3: note = a, c, t, g, unknown, or other
  misc_difference 15: note = a, c, t, g, unknown, or other
  misc_difference 16: note = a, c, t, g, unknown, or other
  misc_difference 17: note = a, c, t, g, unknown, or other
  misc_difference 18: note = a, c, t, g, unknown, or other
  misc_difference 19: note = a, c, t, g, unknown, or other
  misc_difference 20: note = a, c, t, g, unknown, or other
nnngggacccctagnnnnnn

SEQ ID NO: 795179 - RNA, 177 nt, unidentified
  source 1..177: mol_type = unassigned RNA
agtgcagagaaaatcggccagttttctctgcctgcagtccgcatgccgtgggaccccttgggttctaacctgttgcctagatttatgcagcggactgcctttctcccaaagtgataaaccggctagtatcatggaccggttttcccggtaatccgtcgttgacaggttggtttcact

SEQ ID NO: 795180 - DNA, 20 bp, unidentified
  source 1..20: mol_type = unassigned DNA
  misc_difference 15: note = a, c, t, g, unknown, or other
atactagtatctgtncgtat

SEQ ID NO: 795181 - RNA, 177 nt, unidentified
  source 1..177: mol_type = unassigned RNA
agtgcagagaaaatcggccagttttctctgcctgcagtccgcatgccgtcagaacttatgggttctaacctgttgccgtaatttatgcagcggactgcctttctcccaaagtgataaaccggtcagatgtatggaccggttttcccggtaatccgttcttggttagttggtttcact

SEQ ID NO: 795182 - DNA, 11 bp, unidentified
  source 1..11: mol_type = unassigned DNA
cagaacttacg

SEQ ID NO: 795183 - DNA, 20 bp, unidentified
  source 1..20: mol_type = unassigned DNA
  misc_difference 15: note = a, c, t, g, unknown, or other
  misc_difference 18: note = a, c, t, g, unknown, or other
  misc_difference 19: note = a, c, t, g, unknown, or other
  misc_difference 20: note = a, c, t, g, unknown, or other
atatcagatgtaacngannn

SEQ ID NO: 795184 - DNA, 20 bp, unidentified
  source 1..20: mol_type = unassigned DNA
  misc_difference 1: note = a, c, t, g, unknown, or other
  misc_difference 2: note = a, c, t, g, unknown, or other
  misc_difference 3: note = a, c, t, g, unknown, or other
  misc_difference 15: note = a, c, t, g, unknown, or other
  misc_difference 16: note = a, c, t, g, unknown, or other
  misc_difference 17: note = a, c, t, g, unknown, or other
  misc_difference 18: note = a, c, t, g, unknown, or other
  misc_difference 19: note = a, c, t, g, unknown, or other
  misc_difference 20: note = a, c, t, g, unknown, or other
nnncagaacttacgnnnnnn

SEQ ID NO: 795185 - RNA, 177 nt, unidentified
  source 1..177: mol_type = unassigned RNA
agtgcagagaaaatcggccagttttctctgcctgcagtccgcatgccgtgtcttgaattgggttctaacctgttgcgcatatttatgcagcggactgcctttctcccaaagtgataaaccggagtctacaatggaccggttttcccggtaatccgtccttggcatgttggtttcact

SEQ ID NO: 795186 - DNA, 11 bp, unidentified
  source 1..11: mol_type = unassigned DNA
gtcttgaatgc

SEQ ID NO: 795187 - DNA, 20 bp, unidentified
  source 1..20: mol_type = unassigned DNA
  misc_difference 1: note = a, c, t, g, unknown, or other
  misc_difference 2: note = a, c, t, g, unknown, or other
  misc_difference 3: note = a, c, t, g, unknown, or other
  misc_difference 15: note = a, c, t, g, unknown, or other
  misc_difference 18: note = a, c, t, g, unknown, or other
  misc_difference 19: note = a, c, t, g, unknown, or other
  misc_difference 20: note = a, c, t, g, unknown, or other
nnnagtctacatgcnggnnn

SEQ ID NO: 795188 - DNA, 20 bp, unidentified
  source 1..20: mol_type = unassigned DNA
  misc_difference 1: note = a, c, t, g, unknown, or other
  misc_difference 2: note = a, c, t, g, unknown, or other
  misc_difference 3: note = a, c, t, g, unknown, or other
  misc_difference 15: note = a, c, t, g, unknown, or other
  misc_difference 16: note = a, c, t, g, unknown, or other
  misc_difference 17: note = a, c, t, g, unknown, or other
  misc_difference 18: note = a, c, t, g, unknown, or other
  misc_difference 19: note = a, c, t, g, unknown, or other
  misc_difference 20: note = a, c, t, g, unknown, or other
nnngtcttgaatgcnnnnnn

SEQ ID NO: 795189 - DNA, 11 bp, unidentified
  source 1..11: mol_type = unassigned DNA
ctagtgtctta

SEQ ID NO: 795190 - DNA, 11 bp, unidentified
  source 1..11: mol_type = unassigned DNA
tacccttctac

SEQ ID NO: 795191 - DNA, 11 bp, unidentified
  source 1..11: mol_type = unassigned DNA
cacgggactct

SEQ ID NO: 795192 - DNA, 11 bp, unidentified
  source 1..11: mol_type = unassigned DNA
actagggctcc

SEQ ID NO: 795193 - DNA, 11 bp, unidentified
  source 1..11: mol_type = unassigned DNA
gtgtaccctgc

SEQ ID NO: 795194 - DNA, 11 bp, unidentified
  source 1..11: mol_type = unassigned DNA
tcctcagcttg

SEQ ID NO: 795195 - DNA, 22 bp, unidentified
  source 1..22: mol_type = unassigned DNA
tatacagtatcttgtattatcc

SEQ ID NO: 795196 - DNA, 11 bp, unidentified
  source 1..11: mol_type = unassigned DNA
acagtatcttg

SEQ ID NO: 795197 - DNA, 11 bp, unidentified
  source 1..11: mol_type = unassigned DNA
  misc_difference 1: note = a, c, t, g, unknown, or other
ngagggtctaa

SEQ ID NO: 795198 - DNA, 11 bp, unidentified
  source 1..11: mol_type = unassigned DNA
  misc_difference 2: note = a, c, t, g, unknown, or other
anattaactag

SEQ ID NO: 795199 - DNA, 11 bp, unidentified
  source 1..11: mol_type = unassigned DNA
  misc_difference 3: note = a, c, t, g, unknown, or other
tanagagctcc

SEQ ID NO: 795200 - DNA, 11 bp, unidentified
  source 1..11: mol_type = unassigned DNA
  misc_difference 10: note = a, c, t, g, unknown, or other
gcctagtctna

SEQ ID NO: 795201 - DNA, 11 bp, unidentified
  source 1..11: mol_type = unassigned DNA
  misc_difference 11: note = a, c, t, g, unknown, or other
ctacgtgctan

SEQ ID NO: 795202 - DNA, 11 bp, unidentified
  source 1..11: mol_type = unassigned DNA
aggggatctag

SEQ ID NO: 795203 - DNA, 11 bp, unidentified
  source 1..11: mol_type = unassigned DNA
agtggagctag

SEQ ID NO: 795204 - DNA, 11 bp, unidentified
  source 1..11: mol_type = unassigned DNA
ctagcatcttc

SEQ ID NO: 795205 - DNA, 11 bp, unidentified
  source 1..11: mol_type = unassigned DNA
tggcattctgg

SEQ ID NO: 795206 - DNA, 11 bp, unidentified
  source 1..11: mol_type = unassigned DNA
  misc_difference 1: note = a, c, t, g, unknown, or other
ncagtatcttg

SEQ ID NO: 795207 - DNA, 11 bp, unidentified
  source 1..11: mol_type = unassigned DNA
  misc_difference 2: note = a, c, t, g, unknown, or other
anagtatcttg

SEQ ID NO: 795208 - DNA, 11 bp, unidentified
  source 1..11: mol_type = unassigned DNA
  misc_difference 3: note = a, c, t, g, unknown, or other
acngtatcttg

SEQ ID NO: 795209 - DNA, 11 bp, unidentified
  source 1..11: mol_type = unassigned DNA
  misc_difference 10: note = a, c, t, g, unknown, or other
acagtatctng

SEQ ID NO: 795210 - DNA, 11 bp, unidentified
  source 1..11: mol_type = unassigned DNA
  misc_difference 11: note = a, c, t, g, unknown, or other
acagtatcttn

SEQ ID NO: 795211 - DNA, 11 bp, unidentified
  source 1..11: mol_type = unassigned DNA
cggaatcctaa

SEQ ID NO: 795212 - DNA, 11 bp, unidentified
  source 1..11: mol_type = unassigned DNA
cgaaatcctga

SEQ ID NO: 795213 - DNA, 11 bp, unidentified
  source 1..11: mol_type = unassigned DNA
acagtaacttg

SEQ ID NO: 795214 - DNA, 11 bp, unidentified
  source 1..11: mol_type = unassigned DNA
acagtctcttc

SEQ ID NO: 795215 - DNA, 11 bp, unidentified
  source 1..11: mol_type = unassigned DNA
agagtatctca

SEQ ID NO: 795216 - DNA, 11 bp, unidentified
  source 1..11: mol_type = unassigned DNA
ctagtatctgt

SEQ ID NO: 795217 - DNA, 11 bp, unidentified
  source 1..11: mol_type = unassigned DNA
ctactgtctta

SEQ ID NO: 795218 - DNA, 11 bp, unidentified
  source 1..11: mol_type = unassigned DNA
agacagtctat

SEQ ID NO: 795219 - DNA, 11 bp, unidentified
  source 1..11: mol_type = unassigned DNA
caaagggctta

SEQ ID NO: 795220 - DNA, 11 bp, unidentified
  source 1..11: mol_type = unassigned DNA
atgtggactgt

SEQ ID NO: 795221 - DNA, 11 bp, unidentified
  source 1..11: mol_type = unassigned DNA
cggcaggctat

SEQ ID NO: 795222 - DNA, 22 bp, unidentified
  source 1..22: mol_type = unassigned DNA
accgggacccctagagatgagc

SEQ ID NO: 795223 - DNA, 22 bp, unidentified
  source 1..22: mol_type = unassigned DNA
accgggaccccttgtattatcc

SEQ ID NO: 795224 - DNA, 22 bp, unidentified
  source 1..22: mol_type = unassigned DNA
ataacagtatctagagatgagc

SEQ ID NO: 795225 - DNA, 22 bp, unidentified
  source 1..22: mol_type = unassigned DNA
taagggacccctagatagttag

SEQ ID NO: 795226 - DNA, 22 bp, unidentified
  source 1..22: mol_type = unassigned DNA
ataacagtatctagatagttag

SEQ ID NO: 795227 - DNA, 22 bp, unidentified
  source 1..22: mol_type = unassigned DNA
ctaactatctaggggtccctta

SEQ ID NO: 795228 - DNA, 22 bp, unidentified
  source 1..22: mol_type = unassigned DNA
ggataatacaaggggtccctta

SEQ ID NO: 795229 - DNA, 11 bp, unidentified
  source 1..11: mol_type = unassigned DNA
caacactctta

SEQ ID NO: 795230 - DNA, 11 bp, unidentified
  source 1..11: mol_type = unassigned DNA
gaagtgcctct

SEQ ID NO: 795231 - DNA, 11 bp, unidentified
  source 1..11: mol_type = unassigned DNA
gaagtgtctct

SEQ ID NO: 795232 - DNA, 11 bp, unidentified
  source 1..11: mol_type = unassigned DNA
taagtgtctct

SEQ ID NO: 795233 - DNA, 11 bp, unidentified
  source 1..11: mol_type = unassigned DNA
ctaccccctat

SEQ ID NO: 795234 - DNA, 11 bp, unidentified
  source 1..11: mol_type = unassigned DNA
accccctctat

SEQ ID NO: 795235 - DNA, 11 bp, unidentified
  source 1..11: mol_type = unassigned DNA
cttcagcctcc

SEQ ID NO: 795236 - RNA, 194 nt, unidentified
  source 1..194: mol_type = unassigned RNA
  misc_difference 1: note = a, c, u, g, unknown, or other
  misc_difference 2: note = a, c, u, g, unknown, or other
  misc_difference 3: note = a, c, u, g, unknown, or other
  misc_difference 4: note = a, c, u, g, unknown, or other
  misc_difference 5: note = a, c, u, g, unknown, or other
  misc_difference 7: note = a, c, u, g, unknown, or other
  misc_difference 10: note = a, c, u, g, unknown, or other
  misc_difference 15: note = a, c, u, g, unknown, or other
  misc_difference 18: note = a, c, u, g, unknown, or other
  misc_difference 32: note = a, c, u, g, unknown, or other
  misc_difference 33: note = a, c, u, g, unknown, or other
  misc_difference 34: note = a, c, u, g, unknown, or other
  misc_difference 35: note = a, c, u, g, unknown, or other
  misc_difference 37: note = a, c, u, g, unknown, or other
  misc_difference 45: note = a, c, u, g, unknown, or other
  misc_difference 48: note = a, c, u, g, unknown, or other
  misc_difference 49: note = a, c, u, g, unknown, or other
  misc_difference 50: note = a, c, u, g, unknown, or other
  misc_difference 51: note = a, c, u, g, unknown, or other
  misc_difference 55: note = a, c, u, g, unknown, or other
  misc_difference 56: note = a, c, u, g, unknown, or other
  misc_difference 57: note = a, c, u, g, unknown, or other
  misc_difference 59: note = a, c, u, g, unknown, or other
  misc_difference 63: note = a, c, u, g, unknown, or other
  misc_difference 65: note = a, c, u, g, unknown, or other
  misc_difference 66: note = a, c, u, g, unknown, or other
  misc_difference 67: note = a, c, u, g, unknown, or other
  misc_difference 69: note = a, c, u, g, unknown, or other
  misc_difference 75: note = a, c, u, g, unknown, or other
  misc_difference 78: note = a, c, u, g, unknown, or other
  misc_difference 79: note = a, c, u, g, unknown, or other
  misc_difference 80: note = a, c, u, g, unknown, or other
  misc_difference 86: note = a, c, u, g, unknown, or other
  misc_difference 87: note = a, c, u, g, unknown, or other
  misc_difference 89: note = a, c, u, g, unknown, or other
  misc_difference 97: note = a, c, u, g, unknown, or other
  misc_difference 99: note = a, c, u, g, unknown, or other
  misc_difference 101: note = a, c, u, g, unknown, or other
  misc_difference 102: note = a, c, u, g, unknown, or other
  misc_difference 109: note = a, c, u, g, unknown, or other
  misc_difference 110: note = a, c, u, g, unknown, or other
  misc_difference 112: note = a, c, u, g, unknown, or other
  misc_difference 113: note = a, c, u, g, unknown, or other
  misc_difference 117: note = a, c, u, g, unknown, or other
  misc_difference 118: note = a, c, u, g, unknown, or other
  misc_difference 125: note = a, c, u, g, unknown, or other
  misc_difference 145: note = a, c, u, g, unknown, or other
  misc_difference 146: note = a, c, u, g, unknown, or other
  misc_difference 151: note = a, c, u, g, unknown, or other
  misc_difference 159: note = a, c, u, g, unknown, or other
  misc_difference 160: note = a, c, u, g, unknown, or other
  misc_difference 161: note = a, c, u, g, unknown, or other
  misc_difference 162: note = a, c, u, g, unknown, or other
  misc_difference 163: note = a, c, u, g, unknown, or other
  misc_difference 164: note = a, c, u, g, unknown, or other
  misc_difference 168: note = a, c, u, g, unknown, or other
  misc_difference 172: note = a, c, u, g, unknown, or other
  misc_difference 177: note = a, c, u, g, unknown, or other
  misc_difference 179: note = a, c, u, g, unknown, or other
  misc_difference 180: note = a, c, u, g, unknown, or other
  misc_difference 185: note = a, c, u, g, unknown, or other
  misc_difference 186: note = a, c, u, g, unknown, or other
  misc_difference 188: note = a, c, u, g, unknown, or other
  misc_difference 190: note = a, c, u, g, unknown, or other
  misc_difference 191: note = a, c, u, g, unknown, or other
  misc_difference 192: note = a, c, u, g, unknown, or other
  misc_difference 193: note = a, c, u, g, unknown, or other
  misc_difference 194: note = a, c, u, g, unknown, or other
nnnnngnyynyygrnrgngrcgyrgcccggynnnngngyaayccncgnnnnyrynnngnrrcnrnnnynrayyyncgnnnyyaganngnggcaggcncnynngrcggannynngyrnngyggtanccaryccrcgratrtcagcnngatynrccgtcgnnnnnnrcyngcyncgycncnnyyrrnnrnynnnnn

SEQ ID NO: 795237 - protein, 134 aa, unidentified
CGIDLHARQMYACVMDTGKKLHTNIGNDFEYFLKRVPYRHDLTVVSECTFNWYWLADACFDADIEFVLAHALYLKHIHGKNKNDRIDSEKLAHLLRANLIPPSYVYPSERRPVRALLRQRMSYVWDRATLRTHL

SEQ ID NO: 795238 - protein, 139 aa, unidentified
IGIDLHTNKFTCCYRDSVEDIKGRVIKTFEKAEGLTAFQLTKDTYVLVEATTTTFSFVRLFKDMVKEVLIANTYELKQISRCNTDKIDSDKLCRIMKAGEVSPVTLPPKEIQDLRGLFTTYRLLQKQNVQLKNRIHSVL

SEQ ID NO: 795239 - protein, 139 aa, unidentified
AGLDVHRDSVSACARVRREVVHKRYATTTAGLAELGDWLSEAVTVVGMEATGVYWKPCFYALEDRFEVWLCNAHHVKNVPGRKTDMSDAAWLADVVAHGMVRPSFVPPPPIRELRDLTRYRKRQTDTRAAEVQRLEKVL

SEQ ID NO: 795240 - protein, 122 aa, unidentified
MNAGEKLTTRVANGVCAIAAAAAGPEPEVVLEATDGWYWVVDELQALGARVHLANPQGLDWGRRVKNDERDAVDVADMLRLGRLPEAWIAPPAIRELRELVRDRAKLVVVRAGLEAQVHAVM

SEQ ID NO: 795241 - protein, 137 aa, unidentified
VGIDISKAKLDCCWLRAEKNKKKVFRNTLMDHDALVHWGSAEGIQIVMEATGVYHEPLAYALHERGFLVCVVNPARVREFANTHKTDAKDSQILALYGHRMQPEQWQPEAPEVRELKALISRLEALEADLQRESNRH

SEQ ID NO: 795242 - protein, 138 aa, unidentified
LGIDWGTRRASWCAIDHGAREGAIPADHDGLSRLALTDSGEVRGCIEMMSGAVWVRDRLATAGWDIRLADARKVKAIALACKTDRVDARVLADLARRDLVPEVWVPSLEERADRERLRRRAHLIRLRTSAINRTFGLL

SEQ ID NO: 795243 - protein, 141 aa, unidentified
VGIDTSRYGHYAAFLRDLQPAAEQFAESAAGYAHLRQRARHGPVSFVIDAAGQYADNLLHFVHRLNATVIISCGERNKNYRGSKKSDPIEARAAARYALSERPRSVMPMSPQQRILRQVAGRLQAVVRQRTRLVNQLHHLL

SEQ ID NO: 795244 - protein, 134 aa, unidentified
IGIDLGKRWFHVVGKDSGHVTRSKFNRAQLIEFMQHPKCLVGMETCCGSQSFARRFVAAGHDVRLLPAQYVKPFKSQKNDFNDALAIAEAVVLPTMRFVPIRSEEQMDVQALHRARERLLQQRLALTNQIRGLL

SEQ ID NO: 795245 - protein, 134 aa, unidentified
VGLDLAKHVFYVHAVDADQPVAKMLRRRDVVPFFSLPRYLVGLEACCSAHHWARELAALGHDVRLIPPAYVKPYKRQKNDAADAAAICEAVTRPSMRFVKPRSIANQAVLMQHKVREMLVGQRTQALNGLRGHL

SEQ ID NO: 795246 - protein, 141 aa, unidentified
AGVDIGKEHHHCVVINDGERLSRRVQNDETVLLELIADLVNPDVLWAIDLNCGGAALLIGLLVNHAQPLVYITGLKVHRAAGEGKTDAKDAFVIADQARRRDLGPLRPGDEIAVDLRTLTTRRTDLVCDRTRAINRIRNQL

SEQ ID NO: 795247 - protein, 140 aa, unidentified
AGIDIGSGTHFVAAPTDGLEIIREFSSFTPDLEALADWLDCKVTSVAMESTGVYWIPVYELLESRGFEVYLVDARHVKNVTGRKTDVEDCQWIQKLHSCGLLSPAFRPNDKILPLRSYTRQRDMLVASNATCIQHMQKAL

SEQ ID NO: 795248 - protein, 135 aa, unidentified
VGIDVSKAMLDIAVLPGNETQVEREEQAIAALASKLQLIPRLIVLEATGGLESPVTAALAAAGLPVVVINPRQARDFARLAKTDTLDARMLAQFGLKPTVRPLRDEETQALEALLTRRRQLIEMLTMEKNRLQSA

SEQ ID NO: 795249 - protein, 135 aa, unidentified
IGIDVSKSHLDVFIRRPSHAKFNNNEAGFKKMIAWEAVEEVLFAFEHTGLYSLPLSLFLNEHQYDFTLIPGLELKKSSRGKNDKQDAKRIAEYAYQEKIRLYQMPSDTILKLKRLLSYRERLVKERAAFKGRLKE

SEQ ID NO: 795250 - protein, 138 aa, unidentified
AGLDWARSHHDLVIIDHGEIKALRFPHTAEGWQTVKTLSRYPKLPVAVETSQGTVVEHLFAAGLHVYPINPKAAERYRSGVKDDQRDAWSLADALRGHIWRALAPQDALATELQLLCRDEIALIEQRTALINQLQQCL

SEQ ID NO: 795251 - protein, 134 aa, unidentified
VAVDIAKKVFQLHWVEDSGSIRLKLKRNQMLEWFSRQPALVVMEACGGAHEWGRELMKLGHDVRLVPPKMVRPFHRNKTDAADAQAIWTAARQPGMRFVALKSEAQQGVLALHRVRSQLMKTRIMQTNELRGLL

SEQ ID NO: 795252 - protein, 141 aa, unidentified
VGIDISKYKHDVCIINFGEVIDASFTNDAAGFAELLNISSQDEMRIGFEATAHYALNLKLFLEKNGYSFMELNPLLVNKFIRRTSTDKLCANAIARYMLQVEYKPYPASFYHNYSLKSLTRLRDRLVRQRSGYLVRLTNVL

SEQ ID NO: 795253 - protein, 134 aa, unidentified
IGIDLHRRTVVLAAVHSGQVNARTFSCQATDQIIEHVHLKPFRAVIEATSTYRWLYDLLSLEGTVLLAHPARLRRRAKTDKLDCQLLANLLRINQIPLAYVPPISYQQLRDVTRHRARLVRGQSQAKIGLRVLL

SEQ ID NO: 795254 - protein, 127 aa, unidentified
IGIDVSKAQLDVASCPACPQRFANNQAGRRRLVRWLRRQPPLIALEASGGYEQALLRQAARAALPVVLLNPRQVRDYARLAKTDRLDAQVLADFAAQPPLRPLPSEALLELRALGRRRDQLVAAHSA

SEQ ID NO: 795255 - protein, 134 aa, unidentified
SIDLAKEVFQIAVFNAGKNQNKEVKAKRMCQIIAQYPGASIFMEACGSAHYWARRFTQQGHKVGLVPAHISAKYTGNKNDKNDAIAIYEASKSSQLHCVQIRTLEQQDIATLHKYRQGYKKERNQIANRLRGFA

SEQ ID NO: 795256 - protein, 138 aa, unidentified
VGIDLHRRSTTIYRMADGEVLIERIASQAYELTQAMAAAGPEPEVVLESTYGWYWAADVLQDLGAHVHLAHALNNWGYRRVKNDVNDARDLAAMLRIGRLAEGWIAPPAVRELRELVRYRYSLTRHRTSAKAQIHAVM

SEQ ID NO: 795257 - protein, 141 aa, unidentified
IGLDVHKDSITIAIAGKGELRFGTLTNDLHALEQALKRRAHGALLEVAYEAGPCGFGIARRLKQLKVPCLVAAPSLIPKQPSPFKTDQRDARAIARLLRAGELIGVYVPEPTDEAIRDLCRARTDAIDDLRRSRFRRKAFL

SEQ ID NO: 795258 - protein, 135 aa, unidentified
IGVDVAKASLDAAWAESRRFANNKSGLSALTKWKSPFAVHLICEASGGYERGLLDAAEQNGIKVTLVQANRVRQYAILAKTDKVDARVLCAFGSAMQPKPTPPLSAQQKRLRELETQRQHLSRMMVAEQNRLAQL

SEQ ID NO: 795259 - protein, 140 aa, unidentified
AGVDTHARTHTLAVLESGRQVAATFPATAAGNARAATWTRSGALLVAMEGTGSYGAKLREHLATHAFRVVEAPAPSRAQRSKGKSDPLDAVRAAAAALPVDRLTEPKSGELIPALRVLSGAREIMSRQRTAAINALTALL

SEQ ID NO: 795260 - protein, 138 aa, unidentified
VGIDQHKRHLTICVRNQGQIVRRQVSTQWAAIEKFLTSQRSGPGYVAILEVCGFHGWLVDHLSRWGCHRSYVISAPPAIRTKTDRRDAARLSELLWRDRLRVVYMPNAQEQVDRQLTHLRHRLGRALTRSKNSIQGIL

SEQ ID NO: 795261 - protein, 116 aa, unidentified
GLDIHRRQITFDTLDISGETRGQSPATRLELRAWLGRAGQPAAFALEATTGWRYVVEELRRAGIDAHLAEPADTSALRRRAKTDRTDARHLRELLRAGTLPQSWPPPAHIADARTQ

SEQ ID NO: 795262 - protein, 76 aa, unidentified
VKLLAIKGVGLSTVTGFIAEVGDIGRFTDPKQIQKLAGLEITKTSSGKKKGPGISKRGRSKLRRTMYESARALMNP

SEQ ID NO: 795263 - protein, 76 aa, unidentified
SRLLDLFGVGPAGAARILADVGDVARFADRNRFASWTGTAPIDASSGEQIRHRLSRAGNRRLNHVLYIAAIVQIRT

SEQ ID NO: 795264 - protein, 76 aa, unidentified
PVLRSRFGVGSDSAAALLIAAGDNARLRSDSSFSMLCGSSPLPASSGQTKRHRLNRGGDRQANAALHRIVMTRLRE

SEQ ID NO: 795265 - protein, 76 aa, unidentified
ARLLTIPGVGPQATLALLAAIGDVSRFGSARQLVAYLGLDPRVRQSGSGEAGRISKQGPAQARAALVEAAQQAMRG

SEQ ID NO: 795266 - protein, 76 aa, unidentified
SRLETIPGIGVIGASAIAATVTDAMEFRSGRDFAAWIGLVPRQDSTGGKHKGPISKQGDRYLRRILVVGAISVLRM

SEQ ID NO: 795267 - protein, 75 aa, unidentified
ALLIKLKGIGPEFASLLWLEALFRGFANRRQVAAYAGLAPSPWQSGGTDRQGISKAGNRRLRHTMIELAWFWLRP

SEQ ID NO: 795268 - protein, 74 aa, unidentified
WLTLPGLGPLTATVLMAAVADARVWKNGRPFAAWVGLVPTQYATGGQPRLGISKRGDSYRRPLRIHGARATLRT

SEQ ID NO: 795269 - protein, 76 aa, unidentified
EHILTIKGIGILTLAVLLAETNGFELFTSASQLVSFSGYDVIENQSGKHRGTRMSKKGNSRIRRILHMPAFSVVRP

SEQ ID NO: 795270 - protein, 76 aa, unidentified
YIMKSVPGIGPLIALTILAEAGDLRRFRYERQFLKYCGLNLSTEQSGVSRGSRISKRGNPRLRRVFWQAARGAITN

SEQ ID NO: 795271 - protein, 76 aa, unidentified
LLLKTIPGIGKVLGLTILYEIHTINRFPRVQDFSSYCRLVKPAHTSAGKRVSGGSKIGSAHLKWAFSEAAVSFLHP

SEQ ID NO: 795272 - protein, 75 aa, unidentified
QLVQLPGIGIVVAMTVLSAIGDVSRFESTRKLVGYSGLGAGVHDSGKEHIKRITKSGRKELRWAMVEAAWRAVRP

SEQ ID NO: 795273 - protein, 76 aa, unidentified
VILRSIPGVGRVFTATVFSEATAPLLERDYHGLRALAGIAPVTQQSGKTKIVSMRRACNGRLRNAVLHAANIHVQA

SEQ ID NO: 795274 - protein, 75 aa, unidentified
AAFSSIKGVAGRTIATLMAELPEIGLISNKAAAKLAGLAPLADDSGKRKGQRHIRGGRERVRTILYVISHHAARD

SEQ ID NO: 795275 - protein, 74 aa, unidentified
YLFRALPGAGAALAPRLLVAFGERERFPTAAALQKYAGLAPVTERSGNKSWWRWACPKFVRQSFIEWVGQTVPF

SEQ ID NO: 795276 - protein, 76 aa, unidentified
HVITSMPGPGVILGAEFLAATGDMTVFGTADRLAGFGGVAPVPRDSGKISGLRRPQRYNRRLQRVFCTSALSSIRD

SEQ ID NO: 795277 - protein, 76 aa, unidentified
KSLLTVPGIGRILALTIMLETGDITRFDKAGNFASYAPCVDSNRLSNGKKKENNRKNGNKYLSWAFVEAAHFSIRD

SEQ ID NO: 795278 - protein, 76 aa, unidentified
HNLKSIKGVGHLGATVLLSVIGDIKDFAHPGKLASYFGIVPRVHNSNETERGRITKRGSKLARTTLVQCAMVAMRP

SEQ ID NO: 795279 - protein, 74 aa, unidentified
ADSVCGIGEVIATKLVIYTHGFTRLTDYKKMATYCGVAPFEHTSGTSVKSRTHHMANMDLKSTLSMGAKSAINP

SEQ ID NO: 795280 - protein, 76 aa, unidentified
VLLQSIDGVGPITALAFKAEMDNPARFKDSKDAGAYVGLTPTQYSSGETQRGGISKRGSRRTRCLLVEAATALLRK

SEQ ID NO: 795281 - protein, 75 aa, unidentified
WLQTVPGIGEVLGLVVLLETGEVRRFAAAGNFSSYCRCVASQRLSNGKRKKGNVKNGNRYLAWAFVEAAHFAIRP

SEQ ID NO: 795282 - protein, 76 aa, unidentified
GILQSIKGVSELGAARLIAECRNFEGVTHYGQIEKFAGLNVRVSDSGRSRGRHINGIGNKRLNHLLNQIVSQVVRP

SEQ ID NO: 795283 - protein, 75 aa, unidentified
AITDFAGVGLLTAMVLLSELGDLSRFANRRRLAAYVGLAPRSAESGEATDGRITRQGSSRLRAVLCQCAWSRLRP

SEQ ID NO: 795284 - protein, 74 aa, unidentified
DLTQIDGIAPHTALKLISEITDMSRWATEKHFTSWLTLAPRNKISGGRLLSQTQRSANRAAAALRMAAMTLART

SEQ ID NO: 795285 - protein, 76 aa, unidentified
YCVLSMFGVGEITAAQLMAELGDVRNFANRGSIVAFAGIDPEVNQSGNQNRNSSSKRGSPHLRKTLFQVVSSHLKP

SEQ ID NO: 795286 - protein, 75 aa, unidentified
MQLEKLPGIASRSAQVILSEILDMERFPTAAHLCAWAGLAPGNNESAAKRYGKTRKGNPALKTTLIQSAKVAKGS

SEQ ID NO: 795287 - RNA, 229 nt, unidentified
  source 1..229: mol_type = unassigned RNA; note = ISPa11
  misc_difference 1: note = a, c, u, g, unknown, or other
  misc_difference 2: note = a, c, u, g, unknown, or other
  misc_difference 4: note = a, c, u, g, unknown, or other
  misc_difference 8: note = a, c, u, g, unknown, or other
  misc_difference 16: note = a, c, u, g, unknown, or other
  misc_difference 22: note = a, c, u, g, unknown, or other
  misc_difference 23: note = a, c, u, g, unknown, or other
  misc_difference 24: note = a, c, u, g, unknown, or other
  misc_difference 25: note = a, c, u, g, unknown, or other
  misc_difference 26: note = a, c, u, g, unknown, or other
  misc_difference 28: note = a, c, u, g, unknown, or other
  misc_difference 29: note = a, c, u, g, unknown, or other
  misc_difference 30: note = a, c, u, g, unknown, or other
  misc_difference 38: note = a, c, u, g, unknown, or other
  misc_difference 43: note = a, c, u, g, unknown, or other
  misc_difference 54: note = a, c, u, g, unknown, or other
  misc_difference 55: note = a, c, u, g, unknown, or other
  misc_difference 58: note = a, c, u, g, unknown, or other
  misc_difference 59: note = a, c, u, g, unknown, or other
  misc_difference 61: note = a, c, u, g, unknown, or other
  misc_difference 62: note = a, c, u, g, unknown, or other
  misc_difference 63: note = a, c, u, g, unknown, or other
  misc_difference 70: note = a, c, u, g, unknown, or other
  misc_difference 71: note = a, c, u, g, unknown, or other
  misc_difference 72: note = a, c, u, g, unknown, or other
  misc_difference 73: note = a, c, u, g, unknown, or other
  misc_difference 74: note = a, c, u, g, unknown, or other
  misc_difference 75: note = a, c, u, g, unknown, or other
  misc_difference 76: note = a, c, u, g, unknown, or other
  misc_difference 78: note = a, c, u, g, unknown, or other
  misc_difference 79: note = a, c, u, g, unknown, or other
  misc_difference 80: note = a, c, u, g, unknown, or other
  misc_difference 82: note = a, c, u, g, unknown, or other
  misc_difference 83: note = a, c, u, g, unknown, or other
  misc_difference 85: note = a, c, u, g, unknown, or other
  misc_difference 86: note = a, c, u, g, unknown, or other
  misc_difference 91: note = a, c, u, g, unknown, or other
  misc_difference 92: note = a, c, u, g, unknown, or other
  misc_difference 95: note = a, c, u, g, unknown, or other
  misc_difference 96: note = a, c, u, g, unknown, or other
  misc_difference 97: note = a, c, u, g, unknown, or other
  misc_difference 98: note = a, c, u, g, unknown, or other
  misc_difference 99: note = a, c, u, g, unknown, or other
  misc_difference 100: note = a, c, u, g, unknown, or other
  misc_difference 105: note = a, c, u, g, unknown, or other
  misc_difference 109: note = a, c, u, g, unknown, or other
  misc_difference 110: note = a, c, u, g, unknown, or other
  misc_difference 112: note = a, c, u, g, unknown, or other
  misc_difference 113: note = a, c, u, g, unknown, or other
  misc_difference 116: note = a, c, u, g, unknown, or other
  misc_difference 117: note = a, c, u, g, unknown, or other
  misc_difference 123: note = a, c, u, g, unknown, or other
  misc_difference 131: note = a, c, u, g, unknown, or other
  misc_difference 134: note = a, c, u, g, unknown, or other
  misc_difference 136: note = a, c, u, g, unknown, or other
  misc_difference 138: note = a, c, u, g, unknown, or other
  misc_difference 140: note = a, c, u, g, unknown, or other
  misc_difference 142: note = a, c, u, g, unknown, or other
  misc_difference 143: note = a, c, u, g, unknown, or other
  misc_difference 144: note = a, c, u, g, unknown, or other
  misc_difference 145: note = a, c, u, g, unknown, or other
  misc_difference 146: note = a, c, u, g, unknown, or other
  misc_difference 148: note = a, c, u, g, unknown, or other
  misc_difference 150: note = a, c, u, g, unknown, or other
  misc_difference 153: note = a, c, u, g, unknown, or other
  misc_difference 154: note = a, c, u, g, unknown, or other
  misc_difference 155: note = a, c, u, g, unknown, or other
  misc_difference 157: note = a, c, u, g, unknown, or other
  misc_difference 160: note = a, c, u, g, unknown, or other
  misc_difference 172: note = a, c, u, g, unknown, or other
  misc_difference 173: note = a, c, u, g, unknown, or other
  misc_difference 174: note = a, c, u, g, unknown, or other
  misc_difference 181: note = a, c, u, g, unknown, or other
  misc_difference 183: note = a, c, u, g, unknown, or other
  misc_difference 184: note = a, c, u, g, unknown, or other
  misc_difference 187: note = a, c, u, g, unknown, or other
  misc_difference 188: note = a, c, u, g, unknown, or other
  misc_difference 189: note = a, c, u, g, unknown, or other
  misc_difference 190: note = a, c, u, g, unknown, or other
  misc_difference 191: note = a, c, u, g, unknown, or other
  misc_difference 196: note = a, c, u, g, unknown, or other
  misc_difference 197: note = a, c, u, g, unknown, or other
  misc_difference 199: note = a, c, u, g, unknown, or other
  misc_difference 200: note = a, c, u, g, unknown, or other
  misc_difference 201: note = a, c, u, g, unknown, or other
  misc_difference 202: note = a, c, u, g, unknown, or other
  misc_difference 203: note = a, c, u, g, unknown, or other
  misc_difference 204: note = a, c, u, g, unknown, or other
  misc_difference 205: note = a, c, u, g, unknown, or other
  misc_difference 206: note = a, c, u, g, unknown, or other
  misc_difference 207: note = a, c, u, g, unknown, or other
  misc_difference 208: note = a, c, u, g, unknown, or other
  misc_difference 212: note = a, c, u, g, unknown, or other
  misc_difference 217: note = a, c, u, g, unknown, or other
  misc_difference 218: note = a, c, u, g, unknown, or other
  misc_difference 219: note = a, c, u, g, unknown, or other
  misc_difference 225: note = a, c, u, g, unknown, or other
nnynyyrnygattgcnrrgyrnnnnnrnnntgatggcnrraynggtyrraccgnnrynnrnnnarccygnnnnnnnynnngnncnnyragnncgnnnnnnygrtnrgrnnynnrynngcrranyccatcanggnyngnrnynnnnnrnyncrnnnrnarnccgratrtaygnnngcartcnynncynnnnnryyrnnrnnnnnnnnnnrctngcaannnggrggngycc

SEQ ID NO: 795288 - RNA, 233 nt, unidentified
  source 1..233: mol_type = unassigned RNA; note = ISPa29
  misc_difference 1: note = a, c, u, g, unknown, or other
  misc_difference 2: note = a, c, u, g, unknown, or other
  misc_difference 3: note = a, c, u, g, unknown, or other
  misc_difference 4: note = a, c, u, g, unknown, or other
  misc_difference 5: note = a, c, u, g, unknown, or other
  misc_difference 21: note = a, c, u, g, unknown, or other
  misc_difference 22: note = a, c, u, g, unknown, or other
  misc_difference 32: note = a, c, u, g, unknown, or other
  misc_difference 35: note = a, c, u, g, unknown, or other
  misc_difference 36: note = a, c, u, g, unknown, or other
  misc_difference 56: note = a, c, u, g, unknown, or other
  misc_difference 60: note = a, c, u, g, unknown, or other
  misc_difference 64: note = a, c, u, g, unknown, or other
  misc_difference 68: note = a, c, u, g, unknown, or other
  misc_difference 69: note = a, c, u, g, unknown, or other
  misc_difference 72: note = a, c, u, g, unknown, or other
  misc_difference 73: note = a, c, u, g, unknown, or other
  misc_difference 78: note = a, c, u, g, unknown, or other
  misc_difference 80: note = a, c, u, g, unknown, or other
  misc_difference 81: note = a, c, u, g, unknown, or other
  misc_difference 82: note = a, c, u, g, unknown, or other
  misc_difference 83: note = a, c, u, g, unknown, or other
  misc_difference 84: note = a, c, u, g, unknown, or other
  misc_difference 85: note = a, c, u, g, unknown, or other
  misc_difference 86: note = a, c, u, g, unknown, or other
  misc_difference 87: note = a, c, u, g, unknown, or other
  misc_difference 88: note = a, c, u, g, unknown, or other
  misc_difference 89: note = a, c, u, g, unknown, or other
  misc_difference 90: note = a, c, u, g, unknown, or other
  misc_difference 91: note = a, c, u, g, unknown, or other
  misc_difference 92: note = a, c, u, g, unknown, or other
  misc_difference 93: note = a, c, u, g, unknown, or other
  misc_difference 111: note = a, c, u, g, unknown, or other
  misc_difference 116: note = a, c, u, g, unknown, or other
  misc_difference 145: note = a, c, u, g, unknown, or other
  misc_difference 146: note = a, c, u, g, unknown, or other
  misc_difference 147: note = a, c, u, g, unknown, or other
  misc_difference 148: note = a, c, u, g, unknown, or other
  misc_difference 150: note = a, c, u, g, unknown, or other
  misc_difference 151: note = a, c, u, g, unknown, or other
  misc_difference 152: note = a, c, u, g, unknown, or other
  misc_difference 159: note = a, c, u, g, unknown, or other
  misc_difference 160: note = a, c, u, g, unknown, or other
  misc_difference 169: note = a, c, u, g, unknown, or other
  misc_difference 179: note = a, c, u, g, unknown, or other
  misc_difference 180: note = a, c, u, g, unknown, or other
  misc_difference 183: note = a, c, u, g, unknown, or other
  misc_difference 195: note = a, c, u, g, unknown, or other
  misc_difference 196: note = a, c, u, g, unknown, or other
  misc_difference 197: note = a, c, u, g, unknown, or other
  misc_difference 199: note = a, c, u, g, unknown, or other
  misc_difference 200: note = a, c, u, g, unknown, or other
  misc_difference 201: note = a, c, u, g, unknown, or other
  misc_difference 202: note = a, c, u, g, unknown, or other
  misc_difference 203: note = a, c, u, g, unknown, or other
  misc_difference 204: note = a, c, u, g, unknown, or other
  misc_difference 207: note = a, c, u, g, unknown, or other
  misc_difference 210: note = a, c, u, g, unknown, or other
  misc_difference 211: note = a, c, u, g, unknown, or other
  misc_difference 212: note = a, c, u, g, unknown, or other
  misc_difference 213: note = a, c, u, g, unknown, or other
  misc_difference 214: note = a, c, u, g, unknown, or other
  misc_difference 215: note = a, c, u, g, unknown, or other
  misc_difference 216: note = a, c, u, g, unknown, or other
  misc_difference 217: note = a, c, u, g, unknown, or other
  misc_difference 218: note = a, c, u, g, unknown, or other
  misc_difference 219: note = a, c, u, g, unknown, or other
  misc_difference 225: note = a, c, u, g, unknown, or other
  misc_difference 229: note = a, c, u, g, unknown, or other
  misc_difference 230: note = a, c, u, g, unknown, or other
  misc_difference 231: note = a, c, u, g, unknown, or other
  misc_difference 232: note = a, c, u, g, unknown, or other
  misc_difference 233: note = a, c, u, g, unknown, or other
nnnnnycrccgcgtgaygrcnngcgttgatgngynnaggttggacctgcgcggggnrtgnyygnyyanntcnnggrrnynnnnnnnnnnnnnncycgrctaacgaatgrrnccccngcgygcgtcttycatcagggtccgcrgcnnnnrnnngcygcrnnratgaccgnttgtagtyynncyngtccgcaccyynnnynnnnnncrncgnnnnnnnnnnryryrnyrrnnnnn

SEQ ID NO: 795289 - RNA, 240 nt, unidentified
  source 1..240: mol_type = unassigned RNA; note = ISMmg1
  misc_difference 1: note = a, c, u, g, unknown, or other
  misc_difference 2: note = a, c, u, g, unknown, or other
  misc_difference 12: note = a, c, u, g, unknown, or other
  misc_difference 17: note = a, c, u, g, unknown, or other
  misc_difference 18: note = a, c, u, g, unknown, or other
  misc_difference 19: note = a, c, u, g, unknown, or other
  misc_difference 20: note = a, c, u, g, unknown, or other
  misc_difference 21: note = a, c, u, g, unknown, or other
  misc_difference 22: note = a, c, u, g, unknown, or other
  misc_difference 23: note = a, c, u, g, unknown, or other
  misc_difference 27: note = a, c, u, g, unknown, or other
  misc_difference 28: note = a, c, u, g, unknown, or other
  misc_difference 29: note = a, c, u, g, unknown, or other
  misc_difference 34: note = a, c, u, g, unknown, or other
  misc_difference 35: note = a, c, u, g, unknown, or other
  misc_difference 39: note = a, c, u, g, unknown, or other
  misc_difference 58: note = a, c, u, g, unknown, or other
  misc_difference 92: note = a, c, u, g, unknown, or other
  misc_difference 96: note = a, c, u, g, unknown, or other
  misc_difference 97: note = a, c, u, g, unknown, or other
  misc_difference 98: note = a, c, u, g, unknown, or other
  misc_difference 99: note = a, c, u, g, unknown, or other
  misc_difference 102: note = a, c, u, g, unknown, or other
  misc_difference 122: note = a, c, u, g, unknown, or other
  misc_difference 123: note = a, c, u, g, unknown, or other
  misc_difference 124: note = a, c, u, g, unknown, or other
  misc_difference 125: note = a, c, u, g, unknown, or other
  misc_difference 126: note = a, c, u, g, unknown, or other
  misc_difference 166: note = a, c, u, g, unknown, or other
  misc_difference 170: note = a, c, u, g, unknown, or other
  misc_difference 171: note = a, c, u, g, unknown, or other
  misc_difference 172: note = a, c, u, g, unknown, or other
  misc_difference 176: note = a, c, u, g, unknown, or other
  misc_difference 177: note = a, c, u, g, unknown, or other
  misc_difference 178: note = a, c, u, g, unknown, or other
  misc_difference 180: note = a, c, u, g, unknown, or other
  misc_difference 193: note = a, c, u, g, unknown, or other
  misc_difference 204: note = a, c, u, g, unknown, or other
  misc_difference 208: note = a, c, u, g, unknown, or other
  misc_difference 213: note = a, c, u, g, unknown, or other
  misc_difference 214: note = a, c, u, g, unknown, or other
  misc_difference 215: note = a, c, u, g, unknown, or other
  misc_difference 216: note = a, c, u, g, unknown, or other
  misc_difference 217: note = a, c, u, g, unknown, or other
  misc_difference 218: note = a, c, u, g, unknown, or other
  misc_difference 219: note = a, c, u, g, unknown, or other
  misc_difference 220: note = a, c, u, g, unknown, or other
  misc_difference 221: note = a, c, u, g, unknown, or other
  misc_difference 222: note = a, c, u, g, unknown, or other
  misc_difference 232: note = a, c, u, g, unknown, or other
nnrryygryygnyryrnnnnnnnygynnngryynnygrngtctgcgrgyggtgrrarnragatggcctgacagtcgaycggygyycygraancctnnnnyrnraaatggcrcyygaygccgnnnnnyttatgaggaycrgrrcgcgcggatctccatcttggccrnggynnngcynnnanrccggatacgttnrygcagacygnycrnryyrnnnnnnnnnnrycrcttgcngrcggggc

SEQ ID NO: 795290 - RNA, 228 nt, unidentified
  source 1..228: mol_type = unassigned RNA; note = ISPfl1
  misc_difference 1: note = a, c, u, g, unknown, or other
  misc_difference 2: note = a, c, u, g, unknown, or other
  misc_difference 3: note = a, c, u, g, unknown, or other
  misc_difference 4: note = a, c, u, g, unknown, or other
  misc_difference 5: note = a, c, u, g, unknown, or other
  misc_difference 6: note = a, c, u, g, unknown, or other
  misc_difference 7: note = a, c, u, g, unknown, or other
  misc_difference 9: note = a, c, u, g, unknown, or other
  misc_difference 12: note = a, c, u, g, unknown, or other
  misc_difference 14: note = a, c, u, g, unknown, or other
  misc_difference 24: note = a, c, u, g, unknown, or other
  misc_difference 25: note = a, c, u, g, unknown, or other
  misc_difference 27: note = a, c, u, g, unknown, or other
  misc_difference 30: note = a, c, u, g, unknown, or other
  misc_difference 31: note = a, c, u, g, unknown, or other
  misc_difference 32: note = a, c, u, g, unknown, or other
  misc_difference 33: note = a, c, u, g, unknown, or other
  misc_difference 34: note = a, c, u, g, unknown, or other
  misc_difference 50: note = a, c, u, g, unknown, or other
  misc_difference 53: note = a, c, u, g, unknown, or other
  misc_difference 66: note = a, c, u, g, unknown, or other
  misc_difference 68: note = a, c, u, g, unknown, or other
  misc_difference 74: note = a, c, u, g, unknown, or other
  misc_difference 75: note = a, c, u, g, unknown, or other
  misc_difference 76: note = a, c, u, g, unknown, or other
  misc_difference 77: note = a, c, u, g, unknown, or other
  misc_difference 78: note = a, c, u, g, unknown, or other
  misc_difference 82: note = a, c, u, g, unknown, or other
  misc_difference 88: note = a, c, u, g, unknown, or other
  misc_difference 89: note = a, c, u, g, unknown, or other
  misc_difference 90: note = a, c, u, g, unknown, or other
  misc_difference 91: note = a, c, u, g, unknown, or other
  misc_difference 98: note = a, c, u, g, unknown, or other
  misc_difference 99: note = a, c, u, g, unknown, or other
  misc_difference 100: note = a, c, u, g, unknown, or other
  misc_difference 101: note = a, c, u, g, unknown, or other
  misc_difference 102: note = a, c, u, g, unknown, or other
  misc_difference 108: note = a, c, u, g, unknown, or other
  misc_difference 135: note = a, c, u, g, unknown, or other
  misc_difference 138: note = a, c, u, g, unknown, or other
  misc_difference 139: note = a, c, u, g, unknown, or other
  misc_difference 144: note = a, c, u, g, unknown, or other
  misc_difference 145: note = a, c, u, g, unknown, or other
  misc_difference 146: note = a, c, u, g, unknown, or other
  misc_difference 147: note = a, c, u, g, unknown, or other
  misc_difference 148: note = a, c, u, g, unknown, or other
  misc_difference 149: note = a, c, u, g, unknown, or other
  misc_difference 151: note = a, c, u, g, unknown, or other
  misc_difference 156: note = a, c, u, g, unknown, or other
  misc_difference 157: note = a, c, u, g, unknown, or other
  misc_difference 158: note = a, c, u, g, unknown, or other
  misc_difference 159: note = a, c, u, g, unknown, or other
  misc_difference 162: note = a, c, u, g, unknown, or other
  misc_difference 163: note = a, c, u, g, unknown, or other
  misc_difference 171: note = a, c, u, g, unknown, or other
  misc_difference 175: note = a, c, u, g, unknown, or other
  misc_difference 177: note = a, c, u, g, unknown, or other
  misc_difference 185: note = a, c, u, g, unknown, or other
  misc_difference 186: note = a, c, u, g, unknown, or other
  misc_difference 191: note = a, c, u, g, unknown, or other
  misc_difference 192: note = a, c, u, g, unknown, or other
  misc_difference 195: note = a, c, u, g, unknown, or other
  misc_difference 197: note = a, c, u, g, unknown, or other
  misc_difference 198: note = a, c, u, g, unknown, or other
  misc_difference 199: note = a, c, u, g, unknown, or other
  misc_difference 200: note = a, c, u, g, unknown, or other
  misc_difference 201: note = a, c, u, g, unknown, or other
  misc_difference 204: note = a, c, u, g, unknown, or other
  misc_difference 206: note = a, c, u, g, unknown, or other
  misc_difference 207: note = a, c, u, g, unknown, or other
  misc_difference 217: note = a, c, u, g, unknown, or other
  misc_difference 218: note = a, c, u, g, unknown, or other
  misc_difference 222: note = a, c, u, g, unknown, or other
nnnnnnnynycngnttttgcgaynnyngrnnnnngatgacryraacggcnyancggccygrcrrrnancctgrnnnnnraanyrgcynnnnargcygnnnnnyttytnaggryyrycrggcgcgrytctcatcrnggnncgrgnnnnnnynyycannnngannccgratanattnrngcaagccnnyyaynncrncnnnnnyynrnnttgcaaarrnnrggnygacca

SEQ ID NO: 795291 - RNA, 146 nt, unidentified
  source 1..146: mol_type = unassigned RNA; note = ISMae40
  misc_difference 1: note = a, c, u, g, unknown, or other
  misc_difference 2: note = a, c, u, g, unknown, or other
  misc_difference 3: note = a, c, u, g, unknown, or other
  misc_difference 4: note = a, c, u, g, unknown, or other
  misc_difference 5: note = a, c, u, g, unknown, or other
  misc_difference 21: note = a, c, u, g, unknown, or other
  misc_difference 23: note = a, c, u, g, unknown, or other
  misc_difference 24: note = a, c, u, g, unknown, or other
  misc_difference 25: note = a, c, u, g, unknown, or other
  misc_difference 26: note = a, c, u, g, unknown, or other
  misc_difference 30: note = a, c, u, g, unknown, or other
  misc_difference 35: note = a, c, u, g, unknown, or other
  misc_difference 36: note = a, c, u, g, unknown, or other
  misc_difference 37: note = a, c, u, g, unknown, or other
  misc_difference 38: note = a, c, u, g, unknown, or other
  misc_difference 47: note = a, c, u, g, unknown, or other
  misc_difference 48: note = a, c, u, g, unknown, or other
  misc_difference 49: note = a, c, u, g, unknown, or other
  misc_difference 50: note = a, c, u, g, unknown, or other
  misc_difference 51: note = a, c, u, g, unknown, or other
  misc_difference 55: note = a, c, u, g, unknown, or other
  misc_difference 56: note = a, c, u, g, unknown, or other
  misc_difference 57: note = a, c, u, g, unknown, or other
  misc_difference 70: note = a, c, u, g, unknown, or other
  misc_difference 71: note = a, c, u, g, unknown, or other
  misc_difference 72: note = a, c, u, g, unknown, or other
  misc_difference 73: note = a, c, u, g, unknown, or other
  misc_difference 74: note = a, c, u, g, unknown, or other
  misc_difference 76: note = a, c, u, g, unknown, or other
  misc_difference 77: note = a, c, u, g, unknown, or other
  misc_difference 78: note = a, c, u, g, unknown, or other
  misc_difference 79: note = a, c, u, g, unknown, or other
  misc_difference 80: note = a, c, u, g, unknown, or other
  misc_difference 81: note = a, c, u, g, unknown, or other
  misc_difference 98: note = a, c, u, g, unknown, or other
  misc_difference 104: note = a, c, u, g, unknown, or other
  misc_difference 105: note = a, c, u, g, unknown, or other
  misc_difference 106: note = a, c, u, g, unknown, or other
  misc_difference 117: note = a, c, u, g, unknown, or other
  misc_difference 118: note = a, c, u, g, unknown, or other
  misc_difference 119: note = a, c, u, g, unknown, or other
  misc_difference 126: note = a, c, u, g, unknown, or other
  misc_difference 131: note = a, c, u, g, unknown, or other
  misc_difference 132: note = a, c, u, g, unknown, or other
  misc_difference 133: note = a, c, u, g, unknown, or other
  misc_difference 134: note = a, c, u, g, unknown, or other
  misc_difference 135: note = a, c, u, g, unknown, or other
  misc_difference 137: note = a, c, u, g, unknown, or other
  misc_difference 138: note = a, c, u, g, unknown, or other
  misc_difference 142: note = a, c, u, g, unknown, or other
  misc_difference 144: note = a, c, u, g, unknown, or other
  misc_difference 145: note = a, c, u, g, unknown, or other
nnnnnrgryrygryagrycgnynnnnyyynggtynnnnrarrccgynnnnnagcnnnggtcgycryryynnnnnynnnnnnarcycgaacagtygyyngggyynnnragyccgyatnnngcaagrnygrgnnnnnrnnragnrnnr

SEQ ID NO: 795292 - RNA, 157 nt, unidentified
  source 1..157: mol_type = unassigned RNA; note = ISStma6
  misc_difference 1: note = a, c, u, g, unknown, or other
  misc_difference 2: note = a, c, u, g, unknown, or other
  misc_difference 3: note = a, c, u, g, unknown, or other
  misc_difference 4: note = a, c, u, g, unknown, or other
  misc_difference 5: note = a, c, u, g, unknown, or other
  misc_difference 6: note = a, c, u, g, unknown, or other
  misc_difference 7: note = a, c, u, g, unknown, or other
  misc_difference 8: note = a, c, u, g, unknown, or other
  misc_difference 10: note = a, c, u, g, unknown, or other
  misc_difference 11: note = a, c, u, g, unknown, or other
  misc_difference 12: note = a, c, u, g, unknown, or other
  misc_difference 13: note = a, c, u, g, unknown, or other
  misc_difference 14: note = a, c, u, g, unknown, or other
  misc_difference 15: note = a, c, u, g, unknown, or other
  misc_difference 20: note = a, c, u, g, unknown, or other
  misc_difference 23: note = a, c, u, g, unknown, or other
  misc_difference 30: note = a, c, u, g, unknown, or other
  misc_difference 31: note = a, c, u, g, unknown, or other
  misc_difference 32: note = a, c, u, g, unknown, or other
  misc_difference 33: note = a, c, u, g, unknown, or other
  misc_difference 34: note = a, c, u, g, unknown, or other
  misc_difference 35: note = a, c, u, g, unknown, or other
  misc_difference 39: note = a, c, u, g, unknown, or other
  misc_difference 44: note = a, c, u, g, unknown, or other
  misc_difference 45: note = a, c, u, g, unknown, or other
  misc_difference 46: note = a, c, u, g, unknown, or other
  misc_difference 55: note = a, c, u, g, unknown, or other
  misc_difference 56: note = a, c, u, g, unknown, or other
  misc_difference 57: note = a, c, u, g, unknown, or other
  misc_difference 58: note = a, c, u, g, unknown, or other
  misc_difference 59: note = a, c, u, g, unknown, or other
  misc_difference 63: note = a, c, u, g, unknown, or other
  misc_difference 64: note = a, c, u, g, unknown, or other
  misc_difference 69: note = a, c, u, g, unknown, or other
  misc_difference 77: note = a, c, u, g, unknown, or other
  misc_difference 78: note = a, c, u, g, unknown, or other
  misc_difference 79: note = a, c, u, g, unknown, or other
  misc_difference 80: note = a, c, u, g, unknown, or other
  misc_difference 81: note = a, c, u, g, unknown, or other
  misc_difference 84: note = a, c, u, g, unknown, or other
  misc_difference 85: note = a, c, u, g, unknown, or other
  misc_difference 86: note = a, c, u, g, unknown, or other
  misc_difference 87: note = a, c, u, g, unknown, or other
  misc_difference 88: note = a, c, u, g, unknown, or other
  misc_difference 89: note = a, c, u, g, unknown, or other
  misc_difference 106: note = a, c, u, g, unknown, or other
  misc_difference 111: note = a, c, u, g, unknown, or other
  misc_difference 112: note = a, c, u, g, unknown, or other
  misc_difference 113: note = a, c, u, g, unknown, or other
  misc_difference 115: note = a, c, u, g, unknown, or other
  misc_difference 121: note = a, c, u, g, unknown, or other
  misc_difference 124: note = a, c, u, g, unknown, or other
  misc_difference 125: note = a, c, u, g, unknown, or other
  misc_difference 138: note = a, c, u, g, unknown, or other
  misc_difference 139: note = a, c, u, g, unknown, or other
  misc_difference 141: note = a, c, u, g, unknown, or other
  misc_difference 142: note = a, c, u, g, unknown, or other
  misc_difference 143: note = a, c, u, g, unknown, or other
  misc_difference 145: note = a, c, u, g, unknown, or other
  misc_difference 146: note = a, c, u, g, unknown, or other
  misc_difference 147: note = a, c, u, g, unknown, or other
  misc_difference 148: note = a, c, u, g, unknown, or other
  misc_difference 151: note = a, c, u, g, unknown, or other
  misc_difference 154: note = a, c, u, g, unknown, or other
  misc_difference 155: note = a, c, u, g, unknown, or other
  misc_difference 156: note = a, c, u, g, unknown, or other
  misc_difference 157: note = a, c, u, g, unknown, or other
nnnnnnnnrnnnnnnrryrngrnrgrccgnnnnnncyynggyynnnrrgrccgynnnnnagcnnggycnycrcryynnnnnyynnnnnnagcccgracagttgcyngrgynnnrnryycgnaynnryaaggyygggcnnrnnnrnnnnrrnagnnnn

SEQ ID NO: 795293 - RNA, 197 nt, unidentified
  source 1..197: mol_type = unassigned RNA; note = ISAzs32
  misc_difference 1: note = a, c, u, g, unknown, or other
  misc_difference 2: note = a, c, u, g, unknown, or other
  misc_difference 3: note = a, c, u, g, unknown, or other
  misc_difference 4: note = a, c, u, g, unknown, or other
  misc_difference 7: note = a, c, u, g, unknown, or other
  misc_difference 9: note = a, c, u, g, unknown, or other
  misc_difference 10: note = a, c, u, g, unknown, or other
  misc_difference 12: note = a, c, u, g, unknown, or other
  misc_difference 14: note = a, c, u, g, unknown, or other
  misc_difference 15: note = a, c, u, g, unknown, or other
  misc_difference 16: note = a, c, u, g, unknown, or other
  misc_difference 17: note = a, c, u, g, unknown, or other
  misc_difference 18: note = a, c, u, g, unknown, or other
  misc_difference 22: note = a, c, u, g, unknown, or other
  misc_difference 24: note = a, c, u, g, unknown, or other
  misc_difference 25: note = a, c, u, g, unknown, or other
  misc_difference 26: note = a, c, u, g, unknown, or other
  misc_difference 27: note = a, c, u, g, unknown, or other
  misc_difference 29: note = a, c, u, g, unknown, or other
  misc_difference 31: note = a, c, u, g, unknown, or other
  misc_difference 33: note = a, c, u, g, unknown, or other
  misc_difference 36: note = a, c, u, g, unknown, or other
  misc_difference 41: note = a, c, u, g, unknown, or other
  misc_difference 48: note = a, c, u, g, unknown, or other
  misc_difference 49: note = a, c, u, g, unknown, or other
  misc_difference 54: note = a, c, u, g, unknown, or other
  misc_difference 55: note = a, c, u, g, unknown, or other
  misc_difference 61: note = a, c, u, g, unknown, or other
  misc_difference 62: note = a, c, u, g, unknown, or other
  misc_difference 67: note = a, c, u, g, unknown, or other
  misc_difference 68: note = a, c, u, g, unknown, or other
  misc_difference 69: note = a, c, u, g, unknown, or other
  misc_difference 70: note = a, c, u, g, unknown, or other
  misc_difference 72: note = a, c, u, g, unknown, or other
  misc_difference 73: note = a, c, u, g, unknown, or other
  misc_difference 74: note = a, c, u, g, unknown, or other
  misc_difference 76: note = a, c, u, g, unknown, or other
  misc_difference 78: note = a, c, u, g, unknown, or other
  misc_difference 79: note = a, c, u, g, unknown, or other
  misc_difference 80: note = a, c, u, g, unknown, or other
  misc_difference 81: note = a, c, u, g, unknown, or other
  misc_difference 82: note = a, c, u, g, unknown, or other
  misc_difference 83: note = a, c, u, g, unknown, or other
  misc_difference 84: note = a, c, u, g, unknown, or other
  misc_difference 85: note = a, c, u, g, unknown, or other
  misc_difference 87: note = a, c, u, g, unknown, or other
  misc_difference 88: note = a, c, u, g, unknown, or other
  misc_difference 89: note = a, c, u, g, unknown, or other
  misc_difference 90: note = a, c, u, g, unknown, or other
  misc_difference 91: note = a, c, u, g, unknown, or other
  misc_difference 92: note = a, c, u, g, unknown, or other
  misc_difference 93: note = a, c, u, g, unknown, or other
  misc_difference 94: note = a, c, u, g, unknown, or other
  misc_difference 95: note = a, c, u, g, unknown, or other
  misc_difference 98: note = a, c, u, g, unknown, or other
  misc_difference 99: note = a, c, u, g, unknown, or other
  misc_difference 100: note = a, c, u, g, unknown, or other
  misc_difference 104: note = a, c, u, g, unknown, or other
  misc_difference 105: note = a, c, u, g, unknown, or other
  misc_difference 106: note = a, c, u, g, unknown, or other
  misc_difference 107: note = a, c, u, g, unknown, or other
  misc_difference 116: note = a, c, u, g, unknown, or other
  misc_difference 117: note = a, c, u, g, unknown, or other
  misc_difference 122: note = a, c, u, g, unknown, or other
  misc_difference 128: note = a, c, u, g, unknown, or other
  misc_difference 135: note = a, c, u, g, unknown, or other
  misc_difference 136: note = a, c, u, g, unknown, or other
  misc_difference 140: note = a, c, u, g, unknown, or other
  misc_difference 152: note = a, c, u, g, unknown, or other
  misc_difference 153: note = a, c, u, g, unknown, or other
  misc_difference 168: note = a, c, u, g, unknown, or other
  misc_difference 176: note = a, c, u, g, unknown, or other
  misc_difference 178: note = a, c, u, g, unknown, or other
  misc_difference 180: note = a, c, u, g, unknown, or other
  misc_difference 183: note = a, c, u, g, unknown, or other
  misc_difference 188: note = a, c, u, g, unknown, or other
  misc_difference 190: note = a, c, u, g, unknown, or other
  misc_difference 192: note = a, c, u, g, unknown, or other
  misc_difference 194: note = a, c, u, g, unknown, or other
  misc_difference 195: note = a, c, u, g, unknown, or other
  misc_difference 196: note = a, c, u, g, unknown, or other
  misc_difference 197: note = a, c, u, g, unknown, or other
nnnnrrnynngnynnnnnrgynrnnnnrnrnynyynycgyngggacgnnggrynnggygannycgynnnnrnnnyngnnnnnnnnrnnnnnnnnnrannncgynnnnyagatygrnncgccnyryyynycygaynncatnrtgyggcggcynnrygccgaccrcgranrgaagcrngnrnycnrcgrnrngnynnnn

SEQ ID NO: 795294 - RNA, 199 nt, unidentified
  source 1..199: mol_type = unassigned RNA; note = ISMex9
  misc_difference 12: note = a, c, u, g, unknown, or other
  misc_difference 21: note = a, c, u, g, unknown, or other
  misc_difference 24: note = a, c, u, g, unknown, or other
  misc_difference 33: note = a, c, u, g, unknown, or other
  misc_difference 54: note = a, c, u, g, unknown, or other
  misc_difference 59: note = a, c, u, g, unknown, or other
  misc_difference 60: note = a, c, u, g, unknown, or other
  misc_difference 61: note = a, c, u, g, unknown, or other
  misc_difference 63: note = a, c, u, g, unknown, or other
  misc_difference 65: note = a, c, u, g, unknown, or other
  misc_difference 66: note = a, c, u, g, unknown, or other
  misc_difference 68: note = a, c, u, g, unknown, or other
  misc_difference 70: note = a, c, u, g, unknown, or other
  misc_difference 71: note = a, c, u, g, unknown, or other
  misc_difference 74: note = a, c, u, g, unknown, or other
  misc_difference 77: note = a, c, u, g, unknown, or other
  misc_difference 78: note = a, c, u, g, unknown, or other
  misc_difference 79: note = a, c, u, g, unknown, or other
  misc_difference 80: note = a, c, u, g, unknown, or other
  misc_difference 81: note = a, c, u, g, unknown, or other
  misc_difference 82: note = a, c, u, g, unknown, or other
  misc_difference 83: note = a, c, u, g, unknown, or other
  misc_difference 85: note = a, c, u, g, unknown, or other
  misc_difference 94: note = a, c, u, g, unknown, or other
  misc_difference 95: note = a, c, u, g, unknown, or other
  misc_difference 99: note = a, c, u, g, unknown, or other
  misc_difference 100: note = a, c, u, g, unknown, or other
  misc_difference 101: note = a, c, u, g, unknown, or other
  misc_difference 102: note = a, c, u, g, unknown, or other
  misc_difference 103: note = a, c, u, g, unknown, or other
  misc_difference 110: note = a, c, u, g, unknown, or other
  misc_difference 111: note = a, c, u, g, unknown, or other
  misc_difference 119: note = a, c, u, g, unknown, or other
  misc_difference 126: note = a, c, u, g, unknown, or other
  misc_difference 127: note = a, c, u, g, unknown, or other
  misc_difference 135: note = a, c, u, g, unknown, or other
  misc_difference 142: note = a, c, u, g, unknown, or other
  misc_difference 147: note = a, c, u, g, unknown, or other
  misc_difference 148: note = a, c, u, g, unknown, or other
  misc_difference 149: note = a, c, u, g, unknown, or other
  misc_difference 171: note = a, c, u, g, unknown, or other
  misc_difference 185: note = a, c, u, g, unknown, or other
  misc_difference 187: note = a, c, u, g, unknown, or other
  misc_difference 191: note = a, c, u, g, unknown, or other
  misc_difference 194: note = a, c, u, g, unknown, or other
  misc_difference 195: note = a, c, u, g, unknown, or other
  misc_difference 196: note = a, c, u, g, unknown, or other
  misc_difference 198: note = a, c, u, g, unknown, or other
  misc_difference 199: note = a, c, u, g, unknown, or other
yrrrytcyrcyncggyrgrrnrangtccycrcngggacgayggryrrggygagnycgynnnrncnnyngnnycngynnnnnnnynrcrryragnncgcnnnnnagatygnnccrccyyntccyycnnaycccatnatgrgrnggcynnnygccgayyycgragagaagcrngarcycygygrgrnynycrnyynnnrnn

SEQ ID NO: 795295 - RNA, 203 nt, unidentified
  source 1..203: mol_type = unassigned RNA; note = ISCARN28
  misc_difference 1: note = a, c, u, g, unknown, or other
  misc_difference 3: note = a, c, u, g, unknown, or other
  misc_difference 4: note = a, c, u, g, unknown, or other
  misc_difference 5: note = a, c, u, g, unknown, or other
  misc_difference 6: note = a, c, u, g, unknown, or other
  misc_difference 7: note = a, c, u, g, unknown, or other
  misc_difference 14: note = a, c, u, g, unknown, or other
  misc_difference 15: note = a, c, u, g, unknown, or other
  misc_difference 27: note = a, c, u, g, unknown, or other
  misc_difference 33: note = a, c, u, g, unknown, or other
  misc_difference 34: note = a, c, u, g, unknown, or other
  misc_difference 39: note = a, c, u, g, unknown, or other
  misc_difference 41: note = a, c, u, g, unknown, or other
  misc_difference 44: note = a, c, u, g, unknown, or other
  misc_difference 53: note = a, c, u, g, unknown, or other
  misc_difference 54: note = a, c, u, g, unknown, or other
  misc_difference 55: note = a, c, u, g, unknown, or other
  misc_difference 56: note = a, c, u, g, unknown, or other
  misc_difference 57: note = a, c, u, g, unknown, or other
  misc_difference 58: note = a, c, u, g, unknown, or other
  misc_difference 63: note = a, c, u, g, unknown, or other
  misc_difference 64: note = a, c, u, g, unknown, or other
  misc_difference 65: note = a, c, u, g, unknown, or other
  misc_difference 70: note = a, c, u, g, unknown, or other
  misc_difference 73: note = a, c, u, g, unknown, or other
  misc_difference 74: note = a, c, u, g, unknown, or other
  misc_difference 75: note = a, c, u, g, unknown, or other
  misc_difference 76: note = a, c, u, g, unknown, or other
  misc_difference 86: note = a, c, u, g, unknown, or other
  misc_difference 91: note = a, c, u, g, unknown, or other
  misc_difference 106: note = a, c, u, g, unknown, or other
  misc_difference 108: note = a, c, u, g, unknown, or other
  misc_difference 109: note = a, c, u, g, unknown, or other
  misc_difference 125: note = a, c, u, g, unknown, or other
  misc_difference 127: note = a, c, u, g, unknown, or other
  misc_difference 128: note = a, c, u, g, unknown, or other
  misc_difference 135: note = a, c, u, g, unknown, or other
  misc_difference 151: note = a, c, u, g, unknown, or other
  misc_difference 155: note = a, c, u, g, unknown, or other
  misc_difference 166: note = a, c, u, g, unknown, or other
  misc_difference 170: note = a, c, u, g, unknown, or other
  misc_difference 171: note = a, c, u, g, unknown, or other
  misc_difference 172: note = a, c, u, g, unknown, or other
  misc_difference 173: note = a, c, u, g, unknown, or other
  misc_difference 174: note = a, c, u, g, unknown, or other
  misc_difference 175: note = a, c, u, g, unknown, or other
  misc_difference 176: note = a, c, u, g, unknown, or other
  misc_difference 177: note = a, c, u, g, unknown, or other
  misc_difference 179: note = a, c, u, g, unknown, or other
  misc_difference 180: note = a, c, u, g, unknown, or other
  misc_difference 181: note = a, c, u, g, unknown, or other
  misc_difference 182: note = a, c, u, g, unknown, or other
  misc_difference 184: note = a, c, u, g, unknown, or other
  misc_difference 185: note = a, c, u, g, unknown, or other
  misc_difference 186: note = a, c, u, g, unknown, or other
  misc_difference 187: note = a, c, u, g, unknown, or other
  misc_difference 188: note = a, c, u, g, unknown, or other
  misc_difference 189: note = a, c, u, g, unknown, or other
  misc_difference 190: note = a, c, u, g, unknown, or other
  misc_difference 191: note = a, c, u, g, unknown, or other
  misc_difference 192: note = a, c, u, g, unknown, or other
  misc_difference 193: note = a, c, u, g, unknown, or other
  misc_difference 194: note = a, c, u, g, unknown, or other
  misc_difference 195: note = a, c, u, g, unknown, or other
  misc_difference 196: note = a, c, u, g, unknown, or other
  misc_difference 197: note = a, c, u, g, unknown, or other
  misc_difference 198: note = a, c, u, g, unknown, or other
  misc_difference 199: note = a, c, u, g, unknown, or other
  misc_difference 200: note = a, c, u, g, unknown, or other
  misc_difference 201: note = a, c, u, g, unknown, or other
  misc_difference 202: note = a, c, u, g, unknown, or other
  misc_difference 203: note = a, c, u, g, unknown, or other
nynnnnnryygaynnggygaygcgrynygrrynncgaynrnrrnaaycctcgnnnnnnctaynnnggcrncynnnnrgryraycyncgrynytagarcgaggcagnynncrcgacgrayygatgnanngyggtanccaayccrcgrataynagyntgatycatcgnygynnnnnnnnynnnnynnnnnnnnnnnnnnnnnnnn

SEQ ID NO: 795296 - RNA, 282 nt, unidentified
  source 1..282: mol_type = unassigned RNA; note = ISAar16
  misc_difference 2: note = a, c, u, g, unknown, or other
  misc_difference 3: note = a, c, u, g, unknown, or other
  misc_difference 6: note = a, c, u, g, unknown, or other
  misc_difference 7: note = a, c, u, g, unknown, or other
  misc_difference 8: note = a, c, u, g, unknown, or other
  misc_difference 38: note = a, c, u, g, unknown, or other
  misc_difference 58: note = a, c, u, g, unknown, or other
  misc_difference 61: note = a, c, u, g, unknown, or other
  misc_difference 70: note = a, c, u, g, unknown, or other
  misc_difference 71: note = a, c, u, g, unknown, or other
  misc_difference 72: note = a, c, u, g, unknown, or other
  misc_difference 73: note = a, c, u, g, unknown, or other
  misc_difference 74: note = a, c, u, g, unknown, or other
  misc_difference 75: note = a, c, u, g, unknown, or other
  misc_difference 76: note = a, c, u, g, unknown, or other
  misc_difference 77: note = a, c, u, g, unknown, or other
  misc_difference 78: note = a, c, u, g, unknown, or other
  misc_difference 86: note = a, c, u, g, unknown, or other
  misc_difference 87: note = a, c, u, g, unknown, or other
  misc_difference 88: note = a, c, u, g, unknown, or other
  misc_difference 89: note = a, c, u, g, unknown, or other
  misc_difference 98: note = a, c, u, g, unknown, or other
  misc_difference 99: note = a, c, u, g, unknown, or other
  misc_difference 100: note = a, c, u, g, unknown, or other
  misc_difference 101: note = a, c, u, g, unknown, or other
  misc_difference 102: note = a, c, u, g, unknown, or other
  misc_difference 103: note = a, c, u, g, unknown, or other
  misc_difference 106: note = a, c, u, g, unknown, or other
  misc_difference 114: note = a, c, u, g, unknown, or other
  misc_difference 115: note = a, c, u, g, unknown, or other
  misc_difference 117: note = a, c, u, g, unknown, or other
  misc_difference 121: note = a, c, u, g, unknown, or other
  misc_difference 122: note = a, c, u, g, unknown, or other
  misc_difference 125: note = a, c, u, g, unknown, or other
  misc_difference 137: note = a, c, u, g, unknown, or other
  misc_difference 138: note = a, c, u, g, unknown, or other
  misc_difference 177: note = a, c, u, g, unknown, or other
  misc_difference 181: note = a, c, u, g, unknown, or other
  misc_difference 182: note = a, c, u, g, unknown, or other
  misc_difference 183: note = a, c, u, g, unknown, or other
  misc_difference 184: note = a, c, u, g, unknown, or other
  misc_difference 185: note = a, c, u, g, unknown, or other
  misc_difference 189: note = a, c, u, g, unknown, or other
  misc_difference 205: note = a, c, u, g, unknown, or other
  misc_difference 206: note = a, c, u, g, unknown, or other
  misc_difference 216: note = a, c, u, g, unknown, or other
  misc_difference 226: note = a, c, u, g, unknown, or other
  misc_difference 246: note = a, c, u, g, unknown, or other
  misc_difference 247: note = a, c, u, g, unknown, or other
  misc_difference 248: note = a, c, u, g, unknown, or other
  misc_difference 256: note = a, c, u, g, unknown, or other
  misc_difference 260: note = a, c, u, g, unknown, or other
  misc_difference 266: note = a, c, u, g, unknown, or other
  misc_difference 268: note = a, c, u, g, unknown, or other
  misc_difference 269: note = a, c, u, g, unknown, or other
  misc_difference 270: note = a, c, u, g, unknown, or other
  misc_difference 271: note = a, c, u, g, unknown, or other
  misc_difference 272: note = a, c, u, g, unknown, or other
  misc_difference 279: note = a, c, u, g, unknown, or other
  misc_difference 280: note = a, c, u, g, unknown, or other
  misc_difference 281: note = a, c, u, g, unknown, or other
  misc_difference 282: note = a, c, u, g, unknown, or other
gnntynnnryrgctggtcygggayyggctgrcrrgryngryryyggycgyyyyryyynrrnygtgactcnnnnnnnnnytgrccynnnnrgtgycytnnnnnnganytgtccgnnyngrgnnggnyggccggyrccnnycyggcccacyycggtrrcytgatyagaagrytgyccrncyynnnnnrggnygtgrcycrtcacagnnytgyyccgangtgayyyyyncccrgrcyggyrccggccgnnnrcggccrnrycnyryycnynnnnngrraggnnnn

SEQ ID NO: 795297 - RNA, 167 nt, unidentified
  source 1..167: mol_type = unassigned RNA; note = ISCps7
  misc_difference 1: note = a, c, u, g, unknown, or other
  misc_difference 2: note = a, c, u, g, unknown, or other
  misc_difference 3: note = a, c, u, g, unknown, or other
  misc_difference 4: note = a, c, u, g, unknown, or other
  misc_difference 5: note = a, c, u, g, unknown, or other
  misc_difference 6: note = a, c, u, g, unknown, or other
  misc_difference 13: note = a, c, u, g, unknown, or other
  misc_difference 14: note = a, c, u, g, unknown, or other
  misc_difference 23: note = a, c, u, g, unknown, or other
  misc_difference 25: note = a, c, u, g, unknown, or other
  misc_difference 33: note = a, c, u, g, unknown, or other
  misc_difference 36: note = a, c, u, g, unknown, or other
  misc_difference 44: note = a, c, u, g, unknown, or other
  misc_difference 50: note = a, c, u, g, unknown, or other
  misc_difference 65: note = a, c, u, g, unknown, or other
  misc_difference 66: note = a, c, u, g, unknown, or other
  misc_difference 67: note = a, c, u, g, unknown, or other
  misc_difference 68: note = a, c, u, g, unknown, or other
  misc_difference 69: note = a, c, u, g, unknown, or other
  misc_difference 70: note = a, c, u, g, unknown, or other
  misc_difference 71: note = a, c, u, g, unknown, or other
  misc_difference 81: note = a, c, u, g, unknown, or other
  misc_difference 82: note = a, c, u, g, unknown, or other
  misc_difference 94: note = a, c, u, g, unknown, or other
  misc_difference 104: note = a, c, u, g, unknown, or other
  misc_difference 115: note = a, c, u, g, unknown, or other
  misc_difference 117: note = a, c, u, g, unknown, or other
  misc_difference 118: note = a, c, u, g, unknown, or other
  misc_difference 127: note = a, c, u, g, unknown, or other
  misc_difference 128: note = a, c, u, g, unknown, or other
  misc_difference 129: note = a, c, u, g, unknown, or other
  misc_difference 130: note = a, c, u, g, unknown, or other
  misc_difference 145: note = a, c, u, g, unknown, or other
  misc_difference 146: note = a, c, u, g, unknown, or other
  misc_difference 148: note = a, c, u, g, unknown, or other
  misc_difference 163: note = a, c, u, g, unknown, or other
  misc_difference 166: note = a, c, u, g, unknown, or other
  misc_difference 167: note = a, c, u, g, unknown, or other
nnnnnnrggtaanntgagrcccnrncttyrgyngcnacyraagnyyyytntryrryagytcgaynnnnnnnyggytcctcnnyygagagaccgntaacaaryrngarcrcyryanannactcyaagnnnnaractcgrayagtcnnyngggyctcgarcccgnatnn

SEQ ID NO: 795298 - RNA, 174 nt, unidentified
  source 1..174: mol_type = unassigned RNA; note = ISPpu9
  misc_difference 4: note = a, c, u, g, unknown, or other
  misc_difference 5: note = a, c, u, g, unknown, or other
  misc_difference 6: note = a, c, u, g, unknown, or other
  misc_difference 8: note = a, c, u, g, unknown, or other
  misc_difference 10: note = a, c, u, g, unknown, or other
  misc_difference 12: note = a, c, u, g, unknown, or other
  misc_difference 14: note = a, c, u, g, unknown, or other
  misc_difference 15: note = a, c, u, g, unknown, or other
  misc_difference 23: note = a, c, u, g, unknown, or other
  misc_difference 24: note = a, c, u, g, unknown, or other
  misc_difference 33: note = a, c, u, g, unknown, or other
  misc_difference 34: note = a, c, u, g, unknown, or other
  misc_difference 35: note = a, c, u, g, unknown, or other
  misc_difference 36: note = a, c, u, g, unknown, or other
  misc_difference 37: note = a, c, u, g, unknown, or other
  misc_difference 40: note = a, c, u, g, unknown, or other
  misc_difference 47: note = a, c, u, g, unknown, or other
  misc_difference 49: note = a, c, u, g, unknown, or other
  misc_difference 50: note = a, c, u, g, unknown, or other
  misc_difference 58: note = a, c, u, g, unknown, or other
  misc_difference 59: note = a, c, u, g, unknown, or other
  misc_difference 61: note = a, c, u, g, unknown, or other
  misc_difference 62: note = a, c, u, g, unknown, or other
  misc_difference 72: note = a, c, u, g, unknown, or other
  misc_difference 78: note = a, c, u, g, unknown, or other
  misc_difference 82: note = a, c, u, g, unknown, or other
  misc_difference 85: note = a, c, u, g, unknown, or other
  misc_difference 88: note = a, c, u, g, unknown, or other
  misc_difference 98: note = a, c, u, g, unknown, or other
  misc_difference 99: note = a, c, u, g, unknown, or other
  misc_difference 103: note = a, c, u, g, unknown, or other
  misc_difference 104: note = a, c, u, g, unknown, or other
  misc_difference 105: note = a, c, u, g, unknown, or other
  misc_difference 106: note = a, c, u, g, unknown, or other
  misc_difference 107: note = a, c, u, g, unknown, or other
  misc_difference 109: note = a, c, u, g, unknown, or other
  misc_difference 110: note = a, c, u, g, unknown, or other
  misc_difference 111: note = a, c, u, g, unknown, or other
  misc_difference 112: note = a, c, u, g, unknown, or other
  misc_difference 116: note = a, c, u, g, unknown, or other
  misc_difference 117: note = a, c, u, g, unknown, or other
  misc_difference 133: note = a, c, u, g, unknown, or other
  misc_difference 137: note = a, c, u, g, unknown, or other
  misc_difference 139: note = a, c, u, g, unknown, or other
  misc_difference 140: note = a, c, u, g, unknown, or other
  misc_difference 141: note = a, c, u, g, unknown, or other
  misc_difference 142: note = a, c, u, g, unknown, or other
  misc_difference 145: note = a, c, u, g, unknown, or other
  misc_difference 149: note = a, c, u, g, unknown, or other
  misc_difference 153: note = a, c, u, g, unknown, or other
  misc_difference 154: note = a, c, u, g, unknown, or other
  misc_difference 155: note = a, c, u, g, unknown, or other
  misc_difference 156: note = a, c, u, g, unknown, or other
  misc_difference 163: note = a, c, u, g, unknown, or other
  misc_difference 164: note = a, c, u, g, unknown, or other
  misc_difference 165: note = a, c, u, g, unknown, or other
  misc_difference 166: note = a, c, u, g, unknown, or other
  misc_difference 169: note = a, c, u, g, unknown, or other
  misc_difference 170: note = a, c, u, g, unknown, or other
  misc_difference 171: note = a, c, u, g, unknown, or other
  misc_difference 172: note = a, c, u, g, unknown, or other
  misc_difference 173: note = a, c, u, g, unknown, or other
  misc_difference 174: note = a, c, u, g, unknown, or other
ryannnynrnrnrnngyrcygrnnragrccgrnnnnncantggtgcnynnyrcccgynnrnnagyrtggycnygrrynrcgncrnygncrytgrygrnnyrrnnnnnrnnnnyyrnnaycycgtytragagantgrnynnnnygncgynyyynnnncrgyrcnnnnyynnnnnn

SEQ ID NO: 795299 - RNA, 213 nt, unidentified
  source 1..213: mol_type = unassigned RNA; note = ISRel9
  misc_difference 3: note = a, c, u, g, unknown, or other
  misc_difference 4: note = a, c, u, g, unknown, or other
  misc_difference 5: note = a, c, u, g, unknown, or other
  misc_difference 10: note = a, c, u, g, unknown, or other
  misc_difference 18: note = a, c, u, g, unknown, or other
  misc_difference 53: note = a, c, u, g, unknown, or other
  misc_difference 54: note = a, c, u, g, unknown, or other
  misc_difference 55: note = a, c, u, g, unknown, or other
  misc_difference 56: note = a, c, u, g, unknown, or other
  misc_difference 57: note = a, c, u, g, unknown, or other
  misc_difference 58: note = a, c, u, g, unknown, or other
  misc_difference 59: note = a, c, u, g, unknown, or other
  misc_difference 60: note = a, c, u, g, unknown, or other
  misc_difference 62: note = a, c, u, g, unknown, or other
  misc_difference 69: note = a, c, u, g, unknown, or other
  misc_difference 72: note = a, c, u, g, unknown, or other
  misc_difference 73: note = a, c, u, g, unknown, or other
  misc_difference 78: note = a, c, u, g, unknown, or other
  misc_difference 79: note = a, c, u, g, unknown, or other
  misc_difference 80: note = a, c, u, g, unknown, or other
  misc_difference 81: note = a, c, u, g, unknown, or other
  misc_difference 82: note = a, c, u, g, unknown, or other
  misc_difference 83: note = a, c, u, g, unknown, or other
  misc_difference 111: note = a, c, u, g, unknown, or other
  misc_difference 128: note = a, c, u, g, unknown, or other
  misc_difference 142: note = a, c, u, g, unknown, or other
  misc_difference 143: note = a, c, u, g, unknown, or other
  misc_difference 146: note = a, c, u, g, unknown, or other
  misc_difference 157: note = a, c, u, g, unknown, or other
  misc_difference 165: note = a, c, u, g, unknown, or other
  misc_difference 172: note = a, c, u, g, unknown, or other
  misc_difference 176: note = a, c, u, g, unknown, or other
  misc_difference 177: note = a, c, u, g, unknown, or other
  misc_difference 180: note = a, c, u, g, unknown, or other
  misc_difference 185: note = a, c, u, g, unknown, or other
  misc_difference 190: note = a, c, u, g, unknown, or other
  misc_difference 197: note = a, c, u, g, unknown, or other
  misc_difference 200: note = a, c, u, g, unknown, or other
  misc_difference 213: note = a, c, u, g, unknown, or other
yynnnatcynccrggrcnygatcagtccyggcggatccaggyggrcgaaccgnnnnnnnnyntggcytnaanngccgnnnnnnagaatggtyycgycytcctgagccyyrnccgccgcaagcgggatnytggtgcrgccgynnyrnrcggcgaccgnatgtgagnttgaycnrgynnggnracrnrccrngtcrygnarnyrggctcagrccn

SEQ ID NO: 795300 - RNA, 212 nt, unidentified
  source 1..212: mol_type = unassigned RNA; note = ISEsa2
  misc_difference 5: note = a, c, u, g, unknown, or other
  misc_difference 7: note = a, c, u, g, unknown, or other
  misc_difference 12: note = a, c, u, g, unknown, or other
  misc_difference 13: note = a, c, u, g, unknown, or other
  misc_difference 14: note = a, c, u, g, unknown, or other
  misc_difference 15: note = a, c, u, g, unknown, or other
  misc_difference 16: note = a, c, u, g, unknown, or other
  misc_difference 17: note = a, c, u, g, unknown, or other
  misc_difference 18: note = a, c, u, g, unknown, or other
  misc_difference 19: note = a, c, u, g, unknown, or other
  misc_difference 20: note = a, c, u, g, unknown, or other
  misc_difference 21: note = a, c, u, g, unknown, or other
  misc_difference 22: note = a, c, u, g, unknown, or other
  misc_difference 23: note = a, c, u, g, unknown, or other
  misc_difference 24: note = a, c, u, g, unknown, or other
  misc_difference 25: note = a, c, u, g, unknown, or other
  misc_difference 26: note = a, c, u, g, unknown, or other
  misc_difference 27: note = a, c, u, g, unknown, or other
  misc_difference 28: note = a, c, u, g, unknown, or other
  misc_difference 30: note = a, c, u, g, unknown, or other
  misc_difference 31: note = a, c, u, g, unknown, or other
  misc_difference 32: note = a, c, u, g, unknown, or other
  misc_difference 33: note = a, c, u, g, unknown, or other
  misc_difference 36: note = a, c, u, g, unknown, or other
  misc_difference 37: note = a, c, u, g, unknown, or other
  misc_difference 38: note = a, c, u, g, unknown, or other
  misc_difference 39: note = a, c, u, g, unknown, or other
  misc_difference 40: note = a, c, u, g, unknown, or other
  misc_difference 41: note = a, c, u, g, unknown, or other
  misc_difference 42: note = a, c, u, g, unknown, or other
  misc_difference 44: note = a, c, u, g, unknown, or other
  misc_difference 45: note = a, c, u, g, unknown, or other
  misc_difference 46: note = a, c, u, g, unknown, or other
  misc_difference 49: note = a, c, u, g, unknown, or other
  misc_difference 50: note = a, c, u, g, unknown, or other
  misc_difference 55: note = a, c, u, g, unknown, or other
  misc_difference 56: note = a, c, u, g, unknown, or other
  misc_difference 57: note = a, c, u, g, unknown, or other
  misc_difference 58: note = a, c, u, g, unknown, or other
  misc_difference 59: note = a, c, u, g, unknown, or other
  misc_difference 70: note = a, c, u, g, unknown, or other
  misc_difference 72: note = a, c, u, g, unknown, or other
  misc_difference 73: note = a, c, u, g, unknown, or other
  misc_difference 82: note = a, c, u, g, unknown, or other
  misc_difference 83: note = a, c, u, g, unknown, or other
  misc_difference 84: note = a, c, u, g, unknown, or other
  misc_difference 85: note = a, c, u, g, unknown, or other
  misc_difference 86: note = a, c, u, g, unknown, or other
  misc_difference 87: note = a, c, u, g, unknown, or other
  misc_difference 88: note = a, c, u, g, unknown, or other
  misc_difference 89: note = a, c, u, g, unknown, or other
  misc_difference 90: note = a, c, u, g, unknown, or other
  misc_difference 91: note = a, c, u, g, unknown, or other
  misc_difference 97: note = a, c, u, g, unknown, or other
  misc_difference 103: note = a, c, u, g, unknown, or other
  misc_difference 108: note = a, c, u, g, unknown, or other
  misc_difference 109: note = a, c, u, g, unknown, or other
  misc_difference 110: note = a, c, u, g, unknown, or other
  misc_difference 111: note = a, c, u, g, unknown, or other
  misc_difference 114: note = a, c, u, g, unknown, or other
  misc_difference 115: note = a, c, u, g, unknown, or other
  misc_difference 122: note = a, c, u, g, unknown, or other
  misc_difference 123: note = a, c, u, g, unknown, or other
  misc_difference 125: note = a, c, u, g, unknown, or other
  misc_difference 134: note = a, c, u, g, unknown, or other
  misc_difference 139: note = a, c, u, g, unknown, or other
  misc_difference 145: note = a, c, u, g, unknown, or other
  misc_difference 146: note = a, c, u, g, unknown, or other
  misc_difference 168: note = a, c, u, g, unknown, or other
  misc_difference 170: note = a, c, u, g, unknown, or other
  misc_difference 171: note = a, c, u, g, unknown, or other
  misc_difference 172: note = a, c, u, g, unknown, or other
  misc_difference 174: note = a, c, u, g, unknown, or other
  misc_difference 176: note = a, c, u, g, unknown, or other
  misc_difference 180: note = a, c, u, g, unknown, or other
  misc_difference 181: note = a, c, u, g, unknown, or other
  misc_difference 189: note = a, c, u, g, unknown, or other
  misc_difference 190: note = a, c, u, g, unknown, or other
  misc_difference 196: note = a, c, u, g, unknown, or other
  misc_difference 202: note = a, c, u, g, unknown, or other
  misc_difference 203: note = a, c, u, g, unknown, or other
  misc_difference 208: note = a, c, u, g, unknown, or other
  misc_difference 209: note = a, c, u, g, unknown, or other
rytynrncyyrnnnnnnnnnnnnnnnnnrnnnnyannnnnnnrnnnrynnrrrynnnnnaygyrcyyrynrnntacgaatannnnnnnnnnarcrynygaygntyrcnnnntynnyttcganncnryrgrtrynyttrnrytcrnnaacgaatrctcagggyyygcynynnnanyngctnnctatattnnyttcgnagarynnrrgynnrca

SEQ ID NO: 795301 - RNA, 153 nt, unidentified
  source 1..153: mol_type = unassigned RNA; note = ISMma5
  misc_difference 1: note = a, c, u, g, unknown, or other
  misc_difference 2: note = a, c, u, g, unknown, or other
  misc_difference 5: note = a, c, u, g, unknown, or other
  misc_difference 6: note = a, c, u, g, unknown, or other
  misc_difference 7: note = a, c, u, g, unknown, or other
  misc_difference 8: note = a, c, u, g, unknown, or other
  misc_difference 16: note = a, c, u, g, unknown, or other
  misc_difference 18: note = a, c, u, g, unknown, or other
  misc_difference 25: note = a, c, u, g, unknown, or other
  misc_difference 26: note = a, c, u, g, unknown, or other
  misc_difference 27: note = a, c, u, g, unknown, or other
  misc_difference 28: note = a, c, u, g, unknown, or other
  misc_difference 29: note = a, c, u, g, unknown, or other
  misc_difference 30: note = a, c, u, g, unknown, or other
  misc_difference 40: note = a, c, u, g, unknown, or other
  misc_difference 41: note = a, c, u, g, unknown, or other
  misc_difference 42: note = a, c, u, g, unknown, or other
  misc_difference 45: note = a, c, u, g, unknown, or other
  misc_difference 52: note = a, c, u, g, unknown, or other
  misc_difference 53: note = a, c, u, g, unknown, or other
  misc_difference 54: note = a, c, u, g, unknown, or other
  misc_difference 65: note = a, c, u, g, unknown, or other
  misc_difference 66: note = a, c, u, g, unknown, or other
  misc_difference 67: note = a, c, u, g, unknown, or other
  misc_difference 68: note = a, c, u, g, unknown, or other
  misc_difference 69: note = a, c, u, g, unknown, or other
  misc_difference 72: note = a, c, u, g, unknown, or other
  misc_difference 74: note = a, c, u, g, unknown, or other
  misc_difference 78: note = a, c, u, g, unknown, or other
  misc_difference 80: note = a, c, u, g, unknown, or other
  misc_difference 83: note = a, c, u, g, unknown, or other
  misc_difference 84: note = a, c, u, g, unknown, or other
  misc_difference 92: note = a, c, u, g, unknown, or other
  misc_difference 94: note = a, c, u, g, unknown, or other
  misc_difference 96: note = a, c, u, g, unknown, or other
  misc_difference 99: note = a, c, u, g, unknown, or other
  misc_difference 104: note = a, c, u, g, unknown, or other
  misc_difference 108: note = a, c, u, g, unknown, or other
  misc_difference 109: note = a, c, u, g, unknown, or other
  misc_difference 113: note = a, c, u, g, unknown, or other
  misc_difference 116: note = a, c, u, g, unknown, or other
  misc_difference 120: note = a, c, u, g, unknown, or other
  misc_difference 126: note = a, c, u, g, unknown, or other
  misc_difference 127: note = a, c, u, g, unknown, or other
  misc_difference 128: note = a, c, u, g, unknown, or other
  misc_difference 129: note = a, c, u, g, unknown, or other
  misc_difference 130: note = a, c, u, g, unknown, or other
  misc_difference 131: note = a, c, u, g, unknown, or other
  misc_difference 132: note = a, c, u, g, unknown, or other
  misc_difference 133: note = a, c, u, g, unknown, or other
  misc_difference 134: note = a, c, u, g, unknown, or other
  misc_difference 143: note = a, c, u, g, unknown, or other
  misc_difference 144: note = a, c, u, g, unknown, or other
  misc_difference 145: note = a, c, u, g, unknown, or other
  misc_difference 150: note = a, c, u, g, unknown, or other
  misc_difference 151: note = a, c, u, g, unknown, or other
  misc_difference 152: note = a, c, u, g, unknown, or other
  misc_difference 153: note = a, c, u, g, unknown, or other
nnyynnnnygggyagnrnaggytgnnnnnnytttggrrynnnranyccgyynnnraaactarccnnnnnyynynycgnangcnnrartgcgncnyngancgcgnatrnnaaantgnccynyraggnnnnnnnnnctrcccaynnnrrrrnnnn

SEQ ID NO: 795302 - RNA, 187 nt, unidentified
  source 1..187: mol_type = unassigned RNA; note = IS900
  misc_difference 1: note = a, c, u, g, unknown, or other
  misc_difference 3: note = a, c, u, g, unknown, or other
  misc_difference 4: note = a, c, u, g, unknown, or other
  misc_difference 5: note = a, c, u, g, unknown, or other
  misc_difference 11: note = a, c, u, g, unknown, or other
  misc_difference 12: note = a, c, u, g, unknown, or other
  misc_difference 13: note = a, c, u, g, unknown, or other
  misc_difference 14: note = a, c, u, g, unknown, or other
  misc_difference 17: note = a, c, u, g, unknown, or other
  misc_difference 20: note = a, c, u, g, unknown, or other
  misc_difference 22: note = a, c, u, g, unknown, or other
  misc_difference 23: note = a, c, u, g, unknown, or other
  misc_difference 31: note = a, c, u, g, unknown, or other
  misc_difference 34: note = a, c, u, g, unknown, or other
  misc_difference 35: note = a, c, u, g, unknown, or other
  misc_difference 38: note = a, c, u, g, unknown, or other
  misc_difference 39: note = a, c, u, g, unknown, or other
  misc_difference 50: note = a, c, u, g, unknown, or other
  misc_difference 63: note = a, c, u, g, unknown, or other
  misc_difference 64: note = a, c, u, g, unknown, or other
  misc_difference 65: note = a, c, u, g, unknown, or other
  misc_difference 67: note = a, c, u, g, unknown, or other
  misc_difference 68: note = a, c, u, g, unknown, or other
  misc_difference 69: note = a, c, u, g, unknown, or other
  misc_difference 70: note = a, c, u, g, unknown, or other
  misc_difference 71: note = a, c, u, g, unknown, or other
  misc_difference 72: note = a, c, u, g, unknown, or other
  misc_difference 73: note = a, c, u, g, unknown, or other
  misc_difference 77: note = a, c, u, g, unknown, or other
  misc_difference 79: note = a, c, u, g, unknown, or other
  misc_difference 80: note = a, c, u, g, unknown, or other
  misc_difference 81: note = a, c, u, g, unknown, or other
  misc_difference 82: note = a, c, u, g, unknown, or other
  misc_difference 89: note = a, c, u, g, unknown, or other
  misc_difference 90: note = a, c, u, g, unknown, or other
  misc_difference 91: note = a, c, u, g, unknown, or other
  misc_difference 92: note = a, c, u, g, unknown, or other
  misc_difference 93: note = a, c, u, g, unknown, or other
  misc_difference 94: note = a, c, u, g, unknown, or other
  misc_difference 97: note = a, c, u, g, unknown, or other
  misc_difference 108: note = a, c, u, g, unknown, or other
  misc_difference 132: note = a, c, u, g, unknown, or other
  misc_difference 140: note = a, c, u, g, unknown, or other
  misc_difference 147: note = a, c, u, g, unknown, or other
  misc_difference 148: note = a, c, u, g, unknown, or other
  misc_difference 149: note = a, c, u, g, unknown, or other
  misc_difference 157: note = a, c, u, g, unknown, or other
  misc_difference 158: note = a, c, u, g, unknown, or other
  misc_difference 170: note = a, c, u, g, unknown, or other
  misc_difference 176: note = a, c, u, g, unknown, or other
  misc_difference 187: note = a, c, u, g, unknown, or other
nynnnyrggynnnnyynrrncnnyygtargntynnrrnnrcccrgggrynyygggtrtggctnnnrnnnnnnngcynynnnnryggcynnnnnngantggccgcccgnyryyccrcgacgrcycgrccgctnattgrganrygcgannngatcgctnngtarggayrygncggcgnggtcgtctgcn

SEQ ID NO: 795303 - RNA, 177 nt, unidentified
  source 1..177: mol_type = unassigned RNA; note = ISHne5
  misc_difference 2: note = a, c, u, g, unknown, or other
  misc_difference 12: note = a, c, u, g, unknown, or other
  misc_difference 13: note = a, c, u, g, unknown, or other
  misc_difference 14: note = a, c, u, g, unknown, or other
  misc_difference 16: note = a, c, u, g, unknown, or other
  misc_difference 21: note = a, c, u, g, unknown, or other
  misc_difference 24: note = a, c, u, g, unknown, or other
  misc_difference 29: note = a, c, u, g, unknown, or other
  misc_difference 31: note = a, c, u, g, unknown, or other
  misc_difference 32: note = a, c, u, g, unknown, or other
  misc_difference 33: note = a, c, u, g, unknown, or other
  misc_difference 46: note = a, c, u, g, unknown, or other
  misc_difference 54: note = a, c, u, g, unknown, or other
  misc_difference 55: note = a, c, u, g, unknown, or other
  misc_difference 57: note = a, c, u, g, unknown, or other
  misc_difference 58: note = a, c, u, g, unknown, or other
  misc_difference 59: note = a, c, u, g, unknown, or other
  misc_difference 63: note = a, c, u, g, unknown, or other
  misc_difference 69: note = a, c, u, g, unknown, or other
  misc_difference 70: note = a, c, u, g, unknown, or other
  misc_difference 71: note = a, c, u, g, unknown, or other
  misc_difference 72: note = a, c, u, g, unknown, or other
  misc_difference 73: note = a, c, u, g, unknown, or other
  misc_difference 74: note = a, c, u, g, unknown, or other
  misc_difference 81: note = a, c, u, g, unknown, or other
  misc_difference 90: note = a, c, u, g, unknown, or other
  misc_difference 91: note = a, c, u, g, unknown, or other
  misc_difference 111: note = a, c, u, g, unknown, or other
  misc_difference 112: note = a, c, u, g, unknown, or other
  misc_difference 113: note = a, c, u, g, unknown, or other
  misc_difference 114: note = a, c, u, g, unknown, or other
  misc_difference 135: note = a, c, u, g, unknown, or other
  misc_difference 136: note = a, c, u, g, unknown, or other
  misc_difference 138: note = a, c, u, g, unknown, or other
  misc_difference 141: note = a, c, u, g, unknown, or other
  misc_difference 146: note = a, c, u, g, unknown, or other
  misc_difference 157: note = a, c, u, g, unknown, or other
  misc_difference 161: note = a, c, u, g, unknown, or other
  misc_difference 164: note = a, c, u, g, unknown, or other
  misc_difference 176: note = a, c, u, g, unknown, or other
  misc_difference 177: note = a, c, u, g, unknown, or other
rngrrycrcygnnngnrrgynrcnrcyyncnnncrgyggyrrgggnyggatcgnnrnnnygcnggycrnnnnnngggccgngytagagtnngatcrcccyyrtctttyccnnnngrcctgaacggatacyygrgnnynrgncccgnatgacaagcanaggncrnggaaaagatgann

SEQ ID NO: 795304 - RNA, 197 nt, unidentified
  source 1..197: mol_type = unassigned RNA; note = ISMtsp6
  misc_difference 1: note = a, c, u, g, unknown, or other
  misc_difference 2: note = a, c, u, g, unknown, or other
  misc_difference 3: note = a, c, u, g, unknown, or other
  misc_difference 4: note = a, c, u, g, unknown, or other
  misc_difference 5: note = a, c, u, g, unknown, or other
  misc_difference 13: note = a, c, u, g, unknown, or other
  misc_difference 14: note = a, c, u, g, unknown, or other
  misc_difference 43: note = a, c, u, g, unknown, or other
  misc_difference 48: note = a, c, u, g, unknown, or other
  misc_difference 50: note = a, c, u, g, unknown, or other
  misc_difference 51: note = a, c, u, g, unknown, or other
  misc_difference 52: note = a, c, u, g, unknown, or other
  misc_difference 57: note = a, c, u, g, unknown, or other
  misc_difference 68: note = a, c, u, g, unknown, or other
  misc_difference 69: note = a, c, u, g, unknown, or other
  misc_difference 70: note = a, c, u, g, unknown, or other
  misc_difference 71: note = a, c, u, g, unknown, or other
  misc_difference 72: note = a, c, u, g, unknown, or other
  misc_difference 85: note = a, c, u, g, unknown, or other
  misc_difference 86: note = a, c, u, g, unknown, or other
  misc_difference 88: note = a, c, u, g, unknown, or other
  misc_difference 93: note = a, c, u, g, unknown, or other
  misc_difference 98: note = a, c, u, g, unknown, or other
  misc_difference 99: note = a, c, u, g, unknown, or other
  misc_difference 110: note = a, c, u, g, unknown, or other
  misc_difference 112: note = a, c, u, g, unknown, or other
  misc_difference 113: note = a, c, u, g, unknown, or other
  misc_difference 114: note = a, c, u, g, unknown, or other
  misc_difference 115: note = a, c, u, g, unknown, or other
  misc_difference 119: note = a, c, u, g, unknown, or other
  misc_difference 120: note = a, c, u, g, unknown, or other
  misc_difference 127: note = a, c, u, g, unknown, or other
  misc_difference 128: note = a, c, u, g, unknown, or other
  misc_difference 129: note = a, c, u, g, unknown, or other
  misc_difference 131: note = a, c, u, g, unknown, or other
  misc_difference 140: note = a, c, u, g, unknown, or other
  misc_difference 165: note = a, c, u, g, unknown, or other
  misc_difference 166: note = a, c, u, g, unknown, or other
  misc_difference 167: note = a, c, u, g, unknown, or other
  misc_difference 168: note = a, c, u, g, unknown, or other
  misc_difference 181: note = a, c, u, g, unknown, or other
  misc_difference 185: note = a, c, u, g, unknown, or other
  misc_difference 192: note = a, c, u, g, unknown, or other
  misc_difference 195: note = a, c, u, g, unknown, or other
  misc_difference 196: note = a, c, u, g, unknown, or other
  misc_difference 197: note = a, c, u, g, unknown, or other
nnnnnyygygcannggyggrggcgrrrccrcggcagrggaayncccgnynnnygctnygtggccgrynnnnnrycgacgcccgynnynagaynggranngccycrgacgnannnncggnnrtgcggnnnynaayccgcgnatcagagyttgrtcaccgacgtcynnnnrgyyycgycyccnccyntgcrcrnyynnn

SEQ ID NO: 795305 - RNA, 154 nt, unidentified
  source 1..154: mol_type = unassigned RNA; note = ISMba7
  misc_difference 1: note = a, c, u, g, unknown, or other
  misc_difference 2: note = a, c, u, g, unknown, or other
  misc_difference 3: note = a, c, u, g, unknown, or other
  misc_difference 4: note = a, c, u, g, unknown, or other
  misc_difference 6: note = a, c, u, g, unknown, or other
  misc_difference 7: note = a, c, u, g, unknown, or other
  misc_difference 8: note = a, c, u, g, unknown, or other
  misc_difference 10: note = a, c, u, g, unknown, or other
  misc_difference 18: note = a, c, u, g, unknown, or other
  misc_difference 20: note = a, c, u, g, unknown, or other
  misc_difference 27: note = a, c, u, g, unknown, or other
  misc_difference 28: note = a, c, u, g, unknown, or other
  misc_difference 29: note = a, c, u, g, unknown, or other
  misc_difference 30: note = a, c, u, g, unknown, or other
  misc_difference 31: note = a, c, u, g, unknown, or other
  misc_difference 32: note = a, c, u, g, unknown, or other
  misc_difference 42: note = a, c, u, g, unknown, or other
  misc_difference 43: note = a, c, u, g, unknown, or other
  misc_difference 44: note = a, c, u, g, unknown, or other
  misc_difference 47: note = a, c, u, g, unknown, or other
  misc_difference 52: note = a, c, u, g, unknown, or other
  misc_difference 53: note = a, c, u, g, unknown, or other
  misc_difference 54: note = a, c, u, g, unknown, or other
  misc_difference 55: note = a, c, u, g, unknown, or other
  misc_difference 56: note = a, c, u, g, unknown, or other
  misc_difference 67: note = a, c, u, g, unknown, or other
  misc_difference 68: note = a, c, u, g, unknown, or other
  misc_difference 69: note = a, c, u, g, unknown, or other
  misc_difference 70: note = a, c, u, g, unknown, or other
  misc_difference 74: note = a, c, u, g, unknown, or other
  misc_difference 76: note = a, c, u, g, unknown, or other
  misc_difference 80: note = a, c, u, g, unknown, or other
  misc_difference 82: note = a, c, u, g, unknown, or other
  misc_difference 85: note = a, c, u, g, unknown, or other
  misc_difference 86: note = a, c, u, g, unknown, or other
  misc_difference 94: note = a, c, u, g, unknown, or other
  misc_difference 96: note = a, c, u, g, unknown, or other
  misc_difference 98: note = a, c, u, g, unknown, or other
  misc_difference 101: note = a, c, u, g, unknown, or other
  misc_difference 106: note = a, c, u, g, unknown, or other
  misc_difference 110: note = a, c, u, g, unknown, or other
  misc_difference 111: note = a, c, u, g, unknown, or other
  misc_difference 115: note = a, c, u, g, unknown, or other
  misc_difference 118: note = a, c, u, g, unknown, or other
  misc_difference 122: note = a, c, u, g, unknown, or other
  misc_difference 123: note = a, c, u, g, unknown, or other
  misc_difference 128: note = a, c, u, g, unknown, or other
  misc_difference 129: note = a, c, u, g, unknown, or other
  misc_difference 130: note = a, c, u, g, unknown, or other
  misc_difference 131: note = a, c, u, g, unknown, or other
  misc_difference 132: note = a, c, u, g, unknown, or other
  misc_difference 133: note = a, c, u, g, unknown, or other
  misc_difference 134: note = a, c, u, g, unknown, or other
  misc_difference 135: note = a, c, u, g, unknown, or other
  misc_difference 145: note = a, c, u, g, unknown, or other
  misc_difference 146: note = a, c, u, g, unknown, or other
  misc_difference 147: note = a, c, u, g, unknown, or other
  misc_difference 150: note = a, c, u, g, unknown, or other
  misc_difference 151: note = a, c, u, g, unknown, or other
  misc_difference 152: note = a, c, u, g, unknown, or other
  misc_difference 153: note = a, c, u, g, unknown, or other
  misc_difference 154: note = a, c, u, g, unknown, or other
nnnnynnnyntgggyagnrnaggytgnnnnnnttttrggrynnnranycygnnnnnraaactarccnnnnryynynycgnangcnnrartgygncnyngancrcgnatrnnaaantgnccynnraggnnnnnnnnctrcccayrnnnrrnnnnn

SEQ ID NO: 795306 - RNA, 229 nt, unidentified
  source 1..229: mol_type = unassigned RNA; note = ISBli6
  misc_difference 1: note = a, c, u, g, unknown, or other
  misc_difference 5: note = a, c, u, g, unknown, or other
  misc_difference 6: note = a, c, u, g, unknown, or other
  misc_difference 10: note = a, c, u, g, unknown, or other
  misc_difference 12: note = a, c, u, g, unknown, or other
  misc_difference 15: note = a, c, u, g, unknown, or other
  misc_difference 16: note = a, c, u, g, unknown, or other
  misc_difference 17: note = a, c, u, g, unknown, or other
  misc_difference 18: note = a, c, u, g, unknown, or other
  misc_difference 19: note = a, c, u, g, unknown, or other
  misc_difference 20: note = a, c, u, g, unknown, or other
  misc_difference 21: note = a, c, u, g, unknown, or other
  misc_difference 25: note = a, c, u, g, unknown, or other
  misc_difference 27: note = a, c, u, g, unknown, or other
  misc_difference 28: note = a, c, u, g, unknown, or other
  misc_difference 30: note = a, c, u, g, unknown, or other
  misc_difference 31: note = a, c, u, g, unknown, or other
  misc_difference 32: note = a, c, u, g, unknown, or other
  misc_difference 43: note = a, c, u, g, unknown, or other
  misc_difference 44: note = a, c, u, g, unknown, or other
  misc_difference 45: note = a, c, u, g, unknown, or other
  misc_difference 46: note = a, c, u, g, unknown, or other
  misc_difference 47: note = a, c, u, g, unknown, or other
  misc_difference 48: note = a, c, u, g, unknown, or other
  misc_difference 49: note = a, c, u, g, unknown, or other
  misc_difference 50: note = a, c, u, g, unknown, or other
  misc_difference 51: note = a, c, u, g, unknown, or other
  misc_difference 57: note = a, c, u, g, unknown, or other
  misc_difference 59: note = a, c, u, g, unknown, or other
  misc_difference 60: note = a, c, u, g, unknown, or other
  misc_difference 61: note = a, c, u, g, unknown, or other
  misc_difference 63: note = a, c, u, g, unknown, or other
  misc_difference 69: note = a, c, u, g, unknown, or other
  misc_difference 70: note = a, c, u, g, unknown, or other
  misc_difference 71: note = a, c, u, g, unknown, or other
  misc_difference 72: note = a, c, u, g, unknown, or other
  misc_difference 73: note = a, c, u, g, unknown, or other
  misc_difference 74: note = a, c, u, g, unknown, or other
  misc_difference 75: note = a, c, u, g, unknown, or other
  misc_difference 88: note = a, c, u, g, unknown, or other
  misc_difference 89: note = a, c, u, g, unknown, or other
  misc_difference 90: note = a, c, u, g, unknown, or other
  misc_difference 92: note = a, c, u, g, unknown, or other
  misc_difference 93: note = a, c, u, g, unknown, or other
  misc_difference 94: note = a, c, u, g, unknown, or other
  misc_difference 95: note = a, c, u, g, unknown, or other
  misc_difference 98: note = a, c, u, g, unknown, or other
  misc_difference 99: note = a, c, u, g, unknown, or other
  misc_difference 100: note = a, c, u, g, unknown, or other
  misc_difference 102: note = a, c, u, g, unknown, or other
  misc_difference 103: note = a, c, u, g, unknown, or other
  misc_difference 104: note = a, c, u, g, unknown, or other
  misc_difference 105: note = a, c, u, g, unknown, or other
  misc_difference 106: note = a, c, u, g, unknown, or other
  misc_difference 107: note = a, c, u, g, unknown, or other
  misc_difference 111: note = a, c, u, g, unknown, or other
  misc_difference 112: note = a, c, u, g, unknown, or other
  misc_difference 118: note = a, c, u, g, unknown, or other
  misc_difference 126: note = a, c, u, g, unknown, or other
  misc_difference 135: note = a, c, u, g, unknown, or other
  misc_difference 147: note = a, c, u, g, unknown, or other
  misc_difference 148: note = a, c, u, g, unknown, or other
  misc_difference 150: note = a, c, u, g, unknown, or other
  misc_difference 151: note = a, c, u, g, unknown, or other
  misc_difference 152: note = a, c, u, g, unknown, or other
  misc_difference 154: note = a, c, u, g, unknown, or other
  misc_difference 167: note = a, c, u, g, unknown, or other
  misc_difference 168: note = a, c, u, g, unknown, or other
  misc_difference 189: note = a, c, u, g, unknown, or other
  misc_difference 190: note = a, c, u, g, unknown, or other
  misc_difference 198: note = a, c, u, g, unknown, or other
  misc_difference 202: note = a, c, u, g, unknown, or other
  misc_difference 203: note = a, c, u, g, unknown, or other
  misc_difference 204: note = a, c, u, g, unknown, or other
  misc_difference 205: note = a, c, u, g, unknown, or other
  misc_difference 206: note = a, c, u, g, unknown, or other
  misc_difference 207: note = a, c, u, g, unknown, or other
  misc_difference 208: note = a, c, u, g, unknown, or other
  misc_difference 209: note = a, c, u, g, unknown, or other
  misc_difference 210: note = a, c, u, g, unknown, or other
  misc_difference 211: note = a, c, u, g, unknown, or other
  misc_difference 212: note = a, c, u, g, unknown, or other
  misc_difference 213: note = a, c, u, g, unknown, or other
  misc_difference 214: note = a, c, u, g, unknown, or other
  misc_difference 223: note = a, c, u, g, unknown, or other
  misc_difference 225: note = a, c, u, g, unknown, or other
  misc_difference 226: note = a, c, u, g, unknown, or other
  misc_difference 227: note = a, c, u, g, unknown, or other
  misc_difference 228: note = a, c, u, g, unknown, or other
nrrynnyrrngnygnnnnnnnryynynnrnnnggyytgacycnnnnnnnnncygrcnynnnrntgycynnnnnnngayyygtcgryynnnynnnnrrnnnynnnnnnryrnnrccggncrgrygrnyrtgacytnataggagcytgnncnnnrngycycrtcrcygnnytgtcygyyyrcccgrccggnnygygyyrncyynnnnnnnnnnnnnrrrrgryrnynnnnc

SEQ ID NO: 795307 - RNA, 226 nt, unidentified
  source 1..226: mol_type = unassigned RNA; note = ISCARN80
  misc_difference 12: note = a, c, u, g, unknown, or other
  misc_difference 26: note = a, c, u, g, unknown, or other
  misc_difference 54: note = a, c, u, g, unknown, or other
  misc_difference 58: note = a, c, u, g, unknown, or other
  misc_difference 59: note = a, c, u, g, unknown, or other
  misc_difference 67: note = a, c, u, g, unknown, or other
  misc_difference 68: note = a, c, u, g, unknown, or other
  misc_difference 69: note = a, c, u, g, unknown, or other
  misc_difference 70: note = a, c, u, g, unknown, or other
  misc_difference 71: note = a, c, u, g, unknown, or other
  misc_difference 72: note = a, c, u, g, unknown, or other
  misc_difference 73: note = a, c, u, g, unknown, or other
  misc_difference 75: note = a, c, u, g, unknown, or other
  misc_difference 76: note = a, c, u, g, unknown, or other
  misc_difference 77: note = a, c, u, g, unknown, or other
  misc_difference 82: note = a, c, u, g, unknown, or other
  misc_difference 83: note = a, c, u, g, unknown, or other
  misc_difference 84: note = a, c, u, g, unknown, or other
  misc_difference 92: note = a, c, u, g, unknown, or other
  misc_difference 93: note = a, c, u, g, unknown, or other
  misc_difference 94: note = a, c, u, g, unknown, or other
  misc_difference 95: note = a, c, u, g, unknown, or other
  misc_difference 96: note = a, c, u, g, unknown, or other
  misc_difference 97: note = a, c, u, g, unknown, or other
  misc_difference 102: note = a, c, u, g, unknown, or other
  misc_difference 106: note = a, c, u, g, unknown, or other
  misc_difference 107: note = a, c, u, g, unknown, or other
  misc_difference 111: note = a, c, u, g, unknown, or other
  misc_difference 118: note = a, c, u, g, unknown, or other
  misc_difference 135: note = a, c, u, g, unknown, or other
  misc_difference 139: note = a, c, u, g, unknown, or other
  misc_difference 140: note = a, c, u, g, unknown, or other
  misc_difference 141: note = a, c, u, g, unknown, or other
  misc_difference 142: note = a, c, u, g, unknown, or other
  misc_difference 149: note = a, c, u, g, unknown, or other
  misc_difference 150: note = a, c, u, g, unknown, or other
  misc_difference 151: note = a, c, u, g, unknown, or other
  misc_difference 163: note = a, c, u, g, unknown, or other
  misc_difference 184: note = a, c, u, g, unknown, or other
  misc_difference 189: note = a, c, u, g, unknown, or other
  misc_difference 190: note = a, c, u, g, unknown, or other
  misc_difference 199: note = a, c, u, g, unknown, or other
  misc_difference 204: note = a, c, u, g, unknown, or other
  misc_difference 213: note = a, c, u, g, unknown, or other
  misc_difference 214: note = a, c, u, g, unknown, or other
  misc_difference 215: note = a, c, u, g, unknown, or other
  misc_difference 216: note = a, c, u, g, unknown, or other
  misc_difference 217: note = a, c, u, g, unknown, or other
  misc_difference 218: note = a, c, u, g, unknown, or other
  misc_difference 224: note = a, c, u, g, unknown, or other
ccaccgattgcncaggcaatcatganrtgatggcraracaggtyagaccgtgrnygrnnrarycygnnnnnnncnnngyrcnnnragyrcgnnnnnntgatnaggnnyyrnycagcrnattccatcagggacrgnrgcnnnngcyycrnnnaaagtccggatntatggcygcaatctyyacctncyyrnnrtcayyrantgarngcttgrcannnnnngrrygncc

SEQ ID NO: 795308 - RNA, 227 nt, unidentified
  source 1..227: mol_type = unassigned RNA; note = ISMass1
  misc_difference 1: note = a, c, u, g, unknown, or other
  misc_difference 2: note = a, c, u, g, unknown, or other
  misc_difference 3: note = a, c, u, g, unknown, or other
  misc_difference 6: note = a, c, u, g, unknown, or other
  misc_difference 9: note = a, c, u, g, unknown, or other
  misc_difference 24: note = a, c, u, g, unknown, or other
  misc_difference 30: note = a, c, u, g, unknown, or other
  misc_difference 31: note = a, c, u, g, unknown, or other
  misc_difference 32: note = a, c, u, g, unknown, or other
  misc_difference 33: note = a, c, u, g, unknown, or other
  misc_difference 34: note = a, c, u, g, unknown, or other
  misc_difference 50: note = a, c, u, g, unknown, or other
  misc_difference 53: note = a, c, u, g, unknown, or other
  misc_difference 66: note = a, c, u, g, unknown, or other
  misc_difference 68: note = a, c, u, g, unknown, or other
  misc_difference 74: note = a, c, u, g, unknown, or other
  misc_difference 75: note = a, c, u, g, unknown, or other
  misc_difference 76: note = a, c, u, g, unknown, or other
  misc_difference 77: note = a, c, u, g, unknown, or other
  misc_difference 78: note = a, c, u, g, unknown, or other
  misc_difference 82: note = a, c, u, g, unknown, or other
  misc_difference 90: note = a, c, u, g, unknown, or other
  misc_difference 98: note = a, c, u, g, unknown, or other
  misc_difference 99: note = a, c, u, g, unknown, or other
  misc_difference 100: note = a, c, u, g, unknown, or other
  misc_difference 101: note = a, c, u, g, unknown, or other
  misc_difference 102: note = a, c, u, g, unknown, or other
  misc_difference 108: note = a, c, u, g, unknown, or other
  misc_difference 112: note = a, c, u, g, unknown, or other
  misc_difference 126: note = a, c, u, g, unknown, or other
  misc_difference 145: note = a, c, u, g, unknown, or other
  misc_difference 146: note = a, c, u, g, unknown, or other
  misc_difference 147: note = a, c, u, g, unknown, or other
  misc_difference 148: note = a, c, u, g, unknown, or other
  misc_difference 149: note = a, c, u, g, unknown, or other
  misc_difference 154: note = a, c, u, g, unknown, or other
  misc_difference 155: note = a, c, u, g, unknown, or other
  misc_difference 156: note = a, c, u, g, unknown, or other
  misc_difference 157: note = a, c, u, g, unknown, or other
  misc_difference 175: note = a, c, u, g, unknown, or other
  misc_difference 183: note = a, c, u, g, unknown, or other
  misc_difference 189: note = a, c, u, g, unknown, or other
  misc_difference 190: note = a, c, u, g, unknown, or other
  misc_difference 191: note = a, c, u, g, unknown, or other
  misc_difference 195: note = a, c, u, g, unknown, or other
  misc_difference 197: note = a, c, u, g, unknown, or other
  misc_difference 198: note = a, c, u, g, unknown, or other
  misc_difference 202: note = a, c, u, g, unknown, or other
  misc_difference 204: note = a, c, u, g, unknown, or other
  misc_difference 205: note = a, c, u, g, unknown, or other
  misc_difference 215: note = a, c, u, g, unknown, or other
nnnyancynycyggttttgcgaynrctgannnnngatgacrtraacggcnyancggcctgrygranancctgrnnnnnraanyggcyyynrargccgnnnnnyttttnaggnyyrycrggcgcgrnyctcatcrtggcgcggrrnnnnnccyannnngacgccggatagattyrngcaagccnryyaynnnrycnrnnrycnrnnttgcaaaarngrgggygaccat

SEQ ID NO: 795309 - RNA, 163 nt, unidentified
  source 1..163: mol_type = unassigned RNA; note = ISWpi12
  misc_difference 1: note = a, c, u, g, unknown, or other
  misc_difference 2: note = a, c, u, g, unknown, or other
  misc_difference 3: note = a, c, u, g, unknown, or other
  misc_difference 4: note = a, c, u, g, unknown, or other
  misc_difference 5: note = a, c, u, g, unknown, or other
  misc_difference 6: note = a, c, u, g, unknown, or other
  misc_difference 7: note = a, c, u, g, unknown, or other
  misc_difference 8: note = a, c, u, g, unknown, or other
  misc_difference 9: note = a, c, u, g, unknown, or other
  misc_difference 10: note = a, c, u, g, unknown, or other
  misc_difference 11: note = a, c, u, g, unknown, or other
  misc_difference 13: note = a, c, u, g, unknown, or other
  misc_difference 16: note = a, c, u, g, unknown, or other
  misc_difference 18: note = a, c, u, g, unknown, or other
  misc_difference 19: note = a, c, u, g, unknown, or other
  misc_difference 20: note = a, c, u, g, unknown, or other
  misc_difference 22: note = a, c, u, g, unknown, or other
  misc_difference 23: note = a, c, u, g, unknown, or other
  misc_difference 24: note = a, c, u, g, unknown, or other
  misc_difference 25: note = a, c, u, g, unknown, or other
  misc_difference 26: note = a, c, u, g, unknown, or other
  misc_difference 27: note = a, c, u, g, unknown, or other
  misc_difference 28: note = a, c, u, g, unknown, or other
  misc_difference 29: note = a, c, u, g, unknown, or other
  misc_difference 31: note = a, c, u, g, unknown, or other
  misc_difference 32: note = a, c, u, g, unknown, or other
  misc_difference 33: note = a, c, u, g, unknown, or other
  misc_difference 34: note = a, c, u, g, unknown, or other
  misc_difference 35: note = a, c, u, g, unknown, or other
  misc_difference 36: note = a, c, u, g, unknown, or other
  misc_difference 37: note = a, c, u, g, unknown, or other
  misc_difference 38: note = a, c, u, g, unknown, or other
  misc_difference 39: note = a, c, u, g, unknown, or other
  misc_difference 40: note = a, c, u, g, unknown, or other
  misc_difference 41: note = a, c, u, g, unknown, or other
  misc_difference 42: note = a, c, u, g, unknown, or other
  misc_difference 43: note = a, c, u, g, unknown, or other
  misc_difference 44: note = a, c, u, g, unknown, or other
  misc_difference 45: note = a, c, u, g, unknown, or other
  misc_difference 46: note = a, c, u, g, unknown, or other
  misc_difference 49: note = a, c, u, g, unknown, or other
  misc_difference 50: note = a, c, u, g, unknown, or other
  misc_difference 51: note = a, c, u, g, unknown, or other
  misc_difference 64: note = a, c, u, g, unknown, or other
  misc_difference 66: note = a, c, u, g, unknown, or other
  misc_difference 68: note = a, c, u, g, unknown, or other
  misc_difference 72: note = a, c, u, g, unknown, or other
  misc_difference 75: note = a, c, u, g, unknown, or other
  misc_difference 77: note = a, c, u, g, unknown, or other
  misc_difference 78: note = a, c, u, g, unknown, or other
  misc_difference 79: note = a, c, u, g, unknown, or other
  misc_difference 82: note = a, c, u, g, unknown, or other
  misc_difference 86: note = a, c, u, g, unknown, or other
  misc_difference 88: note = a, c, u, g, unknown, or other
  misc_difference 89: note = a, c, u, g, unknown, or other
  misc_difference 90: note = a, c, u, g, unknown, or other
  misc_difference 94: note = a, c, u, g, unknown, or other
  misc_difference 95: note = a, c, u, g, unknown, or other
  misc_difference 99: note = a, c, u, g, unknown, or other
  misc_difference 104: note = a, c, u, g, unknown, or other
  misc_difference 107: note = a, c, u, g, unknown, or other
  misc_difference 108: note = a, c, u, g, unknown, or other
  misc_difference 109: note = a, c, u, g, unknown, or other
  misc_difference 110: note = a, c, u, g, unknown, or other
  misc_difference 116: note = a, c, u, g, unknown, or other
  misc_difference 117: note = a, c, u, g, unknown, or other
  misc_difference 118: note = a, c, u, g, unknown, or other
  misc_difference 119: note = a, c, u, g, unknown, or other
  misc_difference 127: note = a, c, u, g, unknown, or other
  misc_difference 128: note = a, c, u, g, unknown, or other
  misc_difference 134: note = a, c, u, g, unknown, or other
  misc_difference 135: note = a, c, u, g, unknown, or other
  misc_difference 136: note = a, c, u, g, unknown, or other
  misc_difference 142: note = a, c, u, g, unknown, or other
  misc_difference 143: note = a, c, u, g, unknown, or other
  misc_difference 144: note = a, c, u, g, unknown, or other
  misc_difference 145: note = a, c, u, g, unknown, or other
  misc_difference 146: note = a, c, u, g, unknown, or other
  misc_difference 155: note = a, c, u, g, unknown, or other
  misc_difference 156: note = a, c, u, g, unknown, or other
  misc_difference 163: note = a, c, u, g, unknown, or other
nnnnnnnnnnnrnrrnrnnnynnnnnnnnynnnnnnnnnnnnnnnnygnnnryrrrygaccgynynrnratnggnynnnyrnccgnynnnatcnnggtnyyyrncynnnnyycyynnnncgyttgrnnagttgnnngggyynnnnnrcrcccgynnacaatcn

SEQ ID NO: 795310 - RNA, 199 nt, unidentified
  source 1..199: mol_type = unassigned RNA; note = ISSso6
  misc_difference 1: note = a, c, u, g, unknown, or other
  misc_difference 2: note = a, c, u, g, unknown, or other
  misc_difference 3: note = a, c, u, g, unknown, or other
  misc_difference 4: note = a, c, u, g, unknown, or other
  misc_difference 12: note = a, c, u, g, unknown, or other
  misc_difference 15: note = a, c, u, g, unknown, or other
  misc_difference 18: note = a, c, u, g, unknown, or other
  misc_difference 32: note = a, c, u, g, unknown, or other
  misc_difference 33: note = a, c, u, g, unknown, or other
  misc_difference 34: note = a, c, u, g, unknown, or other
  misc_difference 35: note = a, c, u, g, unknown, or other
  misc_difference 37: note = a, c, u, g, unknown, or other
  misc_difference 45: note = a, c, u, g, unknown, or other
  misc_difference 48: note = a, c, u, g, unknown, or other
  misc_difference 49: note = a, c, u, g, unknown, or other
  misc_difference 50: note = a, c, u, g, unknown, or other
  misc_difference 51: note = a, c, u, g, unknown, or other
  misc_difference 52: note = a, c, u, g, unknown, or other
  misc_difference 56: note = a, c, u, g, unknown, or other
  misc_difference 57: note = a, c, u, g, unknown, or other
  misc_difference 59: note = a, c, u, g, unknown, or other
  misc_difference 63: note = a, c, u, g, unknown, or other
  misc_difference 65: note = a, c, u, g, unknown, or other
  misc_difference 66: note = a, c, u, g, unknown, or other
  misc_difference 67: note = a, c, u, g, unknown, or other
  misc_difference 68: note = a, c, u, g, unknown, or other
  misc_difference 69: note = a, c, u, g, unknown, or other
  misc_difference 70: note = a, c, u, g, unknown, or other
  misc_difference 71: note = a, c, u, g, unknown, or other
  misc_difference 73: note = a, c, u, g, unknown, or other
  misc_difference 79: note = a, c, u, g, unknown, or other
  misc_difference 82: note = a, c, u, g, unknown, or other
  misc_difference 83: note = a, c, u, g, unknown, or other
  misc_difference 84: note = a, c, u, g, unknown, or other
  misc_difference 86: note = a, c, u, g, unknown, or other
  misc_difference 90: note = a, c, u, g, unknown, or other
  misc_difference 91: note = a, c, u, g, unknown, or other
  misc_difference 93: note = a, c, u, g, unknown, or other
  misc_difference 101: note = a, c, u, g, unknown, or other
  misc_difference 103: note = a, c, u, g, unknown, or other
  misc_difference 104: note = a, c, u, g, unknown, or other
  misc_difference 105: note = a, c, u, g, unknown, or other
  misc_difference 106: note = a, c, u, g, unknown, or other
  misc_difference 113: note = a, c, u, g, unknown, or other
  misc_difference 114: note = a, c, u, g, unknown, or other
  misc_difference 115: note = a, c, u, g, unknown, or other
  misc_difference 116: note = a, c, u, g, unknown, or other
  misc_difference 117: note = a, c, u, g, unknown, or other
  misc_difference 121: note = a, c, u, g, unknown, or other
  misc_difference 122: note = a, c, u, g, unknown, or other
  misc_difference 127: note = a, c, u, g, unknown, or other
  misc_difference 129: note = a, c, u, g, unknown, or other
  misc_difference 150: note = a, c, u, g, unknown, or other
  misc_difference 155: note = a, c, u, g, unknown, or other
  misc_difference 157: note = a, c, u, g, unknown, or other
  misc_difference 163: note = a, c, u, g, unknown, or other
  misc_difference 164: note = a, c, u, g, unknown, or other
  misc_difference 165: note = a, c, u, g, unknown, or other
  misc_difference 166: note = a, c, u, g, unknown, or other
  misc_difference 167: note = a, c, u, g, unknown, or other
  misc_difference 175: note = a, c, u, g, unknown, or other
  misc_difference 178: note = a, c, u, g, unknown, or other
  misc_difference 180: note = a, c, u, g, unknown, or other
  misc_difference 183: note = a, c, u, g, unknown, or other
  misc_difference 184: note = a, c, u, g, unknown, or other
  misc_difference 188: note = a, c, u, g, unknown, or other
  misc_difference 192: note = a, c, u, g, unknown, or other
  misc_difference 194: note = a, c, u, g, unknown, or other
  misc_difference 195: note = a, c, u, g, unknown, or other
  misc_difference 196: note = a, c, u, g, unknown, or other
  misc_difference 197: note = a, c, u, g, unknown, or other
  misc_difference 198: note = a, c, u, g, unknown, or other
  misc_difference 199: note = a, c, u, g, unknown, or other
nnnnrryyyycngrnrrngrcgyrgcccggynnnngngyaayccncgnnnnnrytnngnrrcnrnnnnnnnynrayyyncgnnnynagrnngnggcaggcncnnnngrcggannnnngyanngyggnancyraccyrcgrayatcagyrngatcnrncgycgnnnnntrcygcyncrncncynncrrnrrrnynnnnnn

SEQ ID NO: 795311 - RNA, 237 nt, unidentified
  source 1..237: mol_type = unassigned RNA; note = IS884
  misc_difference 22: note = a, c, u, g, unknown, or other
  misc_difference 31: note = a, c, u, g, unknown, or other
  misc_difference 33: note = a, c, u, g, unknown, or other
  misc_difference 45: note = a, c, u, g, unknown, or other
  misc_difference 51: note = a, c, u, g, unknown, or other
  misc_difference 66: note = a, c, u, g, unknown, or other
  misc_difference 74: note = a, c, u, g, unknown, or other
  misc_difference 76: note = a, c, u, g, unknown, or other
  misc_difference 77: note = a, c, u, g, unknown, or other
  misc_difference 78: note = a, c, u, g, unknown, or other
  misc_difference 79: note = a, c, u, g, unknown, or other
  misc_difference 80: note = a, c, u, g, unknown, or other
  misc_difference 81: note = a, c, u, g, unknown, or other
  misc_difference 82: note = a, c, u, g, unknown, or other
  misc_difference 83: note = a, c, u, g, unknown, or other
  misc_difference 84: note = a, c, u, g, unknown, or other
  misc_difference 92: note = a, c, u, g, unknown, or other
  misc_difference 99: note = a, c, u, g, unknown, or other
  misc_difference 100: note = a, c, u, g, unknown, or other
  misc_difference 101: note = a, c, u, g, unknown, or other
  misc_difference 102: note = a, c, u, g, unknown, or other
  misc_difference 103: note = a, c, u, g, unknown, or other
  misc_difference 104: note = a, c, u, g, unknown, or other
  misc_difference 105: note = a, c, u, g, unknown, or other
  misc_difference 113: note = a, c, u, g, unknown, or other
  misc_difference 133: note = a, c, u, g, unknown, or other
  misc_difference 147: note = a, c, u, g, unknown, or other
  misc_difference 149: note = a, c, u, g, unknown, or other
  misc_difference 150: note = a, c, u, g, unknown, or other
  misc_difference 151: note = a, c, u, g, unknown, or other
  misc_difference 158: note = a, c, u, g, unknown, or other
  misc_difference 159: note = a, c, u, g, unknown, or other
  misc_difference 193: note = a, c, u, g, unknown, or other
  misc_difference 197: note = a, c, u, g, unknown, or other
  misc_difference 198: note = a, c, u, g, unknown, or other
  misc_difference 199: note = a, c, u, g, unknown, or other
  misc_difference 204: note = a, c, u, g, unknown, or other
  misc_difference 209: note = a, c, u, g, unknown, or other
  misc_difference 210: note = a, c, u, g, unknown, or other
  misc_difference 213: note = a, c, u, g, unknown, or other
  misc_difference 214: note = a, c, u, g, unknown, or other
  misc_difference 221: note = a, c, u, g, unknown, or other
  misc_difference 226: note = a, c, u, g, unknown, or other
  misc_difference 236: note = a, c, u, g, unknown, or other
rygrrcgtcrraaggttgcgynggcaatygnrngygatgacarrncaggtnggaccgggacycgcnaarcctgnrnnnnnnnnngagcyyynagctcgnnnnnnnaatgaggngygrgtcagcggattycatngrggccygcagyrnrnnngctgcannraggycgratatararcygcarccyrycyygyyngycnnnrcrynygarnncynnygcarrngggrnrcgytcayrnr

SEQ ID NO: 795312 - RNA, 217 nt, unidentified
  source 1..217: mol_type = unassigned RNA; note = ISCps5
  misc_difference 1: note = a, c, u, g, unknown, or other
  misc_difference 5: note = a, c, u, g, unknown, or other
  misc_difference 11: note = a, c, u, g, unknown, or other
  misc_difference 12: note = a, c, u, g, unknown, or other
  misc_difference 13: note = a, c, u, g, unknown, or other
  misc_difference 14: note = a, c, u, g, unknown, or other
  misc_difference 15: note = a, c, u, g, unknown, or other
  misc_difference 16: note = a, c, u, g, unknown, or other
  misc_difference 17: note = a, c, u, g, unknown, or other
  misc_difference 18: note = a, c, u, g, unknown, or other
  misc_difference 20: note = a, c, u, g, unknown, or other
  misc_difference 21: note = a, c, u, g, unknown, or other
  misc_difference 22: note = a, c, u, g, unknown, or other
  misc_difference 23: note = a, c, u, g, unknown, or other
  misc_difference 24: note = a, c, u, g, unknown, or other
  misc_difference 25: note = a, c, u, g, unknown, or other
  misc_difference 26: note = a, c, u, g, unknown, or other
  misc_difference 27: note = a, c, u, g, unknown, or other
  misc_difference 28: note = a, c, u, g, unknown, or other
  misc_difference 29: note = a, c, u, g, unknown, or other
  misc_difference 30: note = a, c, u, g, unknown, or other
  misc_difference 31: note = a, c, u, g, unknown, or other
  misc_difference 32: note = a, c, u, g, unknown, or other
  misc_difference 34: note = a, c, u, g, unknown, or other
  misc_difference 36: note = a, c, u, g, unknown, or other
  misc_difference 40: note = a, c, u, g, unknown, or other
  misc_difference 41: note = a, c, u, g, unknown, or other
  misc_difference 42: note = a, c, u, g, unknown, or other
  misc_difference 43: note = a, c, u, g, unknown, or other
  misc_difference 44: note = a, c, u, g, unknown, or other
  misc_difference 46: note = a, c, u, g, unknown, or other
  misc_difference 48: note = a, c, u, g, unknown, or other
  misc_difference 50: note = a, c, u, g, unknown, or other
  misc_difference 53: note = a, c, u, g, unknown, or other
  misc_difference 54: note = a, c, u, g, unknown, or other
  misc_difference 55: note = a, c, u, g, unknown, or other
  misc_difference 56: note = a, c, u, g, unknown, or other
  misc_difference 57: note = a, c, u, g, unknown, or other
  misc_difference 62: note = a, c, u, g, unknown, or other
  misc_difference 74: note = a, c, u, g, unknown, or other
  misc_difference 76: note = a, c, u, g, unknown, or other
  misc_difference 77: note = a, c, u, g, unknown, or other
  misc_difference 86: note = a, c, u, g, unknown, or other
  misc_difference 87: note = a, c, u, g, unknown, or other
  misc_difference 88: note = a, c, u, g, unknown, or other
  misc_difference 89: note = a, c, u, g, unknown, or other
  misc_difference 90: note = a, c, u, g, unknown, or other
  misc_difference 91: note = a, c, u, g, unknown, or other
  misc_difference 92: note = a, c, u, g, unknown, or other
  misc_difference 93: note = a, c, u, g, unknown, or other
  misc_difference 94: note = a, c, u, g, unknown, or other
  misc_difference 95: note = a, c, u, g, unknown, or other
  misc_difference 101: note = a, c, u, g, unknown, or other
  misc_difference 102: note = a, c, u, g, unknown, or other
  misc_difference 107: note = a, c, u, g, unknown, or other
  misc_difference 110: note = a, c, u, g, unknown, or other
  misc_difference 119: note = a, c, u, g, unknown, or other
  misc_difference 126: note = a, c, u, g, unknown, or other
  misc_difference 129: note = a, c, u, g, unknown, or other
  misc_difference 142: note = a, c, u, g, unknown, or other
  misc_difference 143: note = a, c, u, g, unknown, or other
  misc_difference 149: note = a, c, u, g, unknown, or other
  misc_difference 171: note = a, c, u, g, unknown, or other
  misc_difference 172: note = a, c, u, g, unknown, or other
  misc_difference 173: note = a, c, u, g, unknown, or other
  misc_difference 174: note = a, c, u, g, unknown, or other
  misc_difference 175: note = a, c, u, g, unknown, or other
  misc_difference 176: note = a, c, u, g, unknown, or other
  misc_difference 179: note = a, c, u, g, unknown, or other
  misc_difference 180: note = a, c, u, g, unknown, or other
  misc_difference 184: note = a, c, u, g, unknown, or other
  misc_difference 185: note = a, c, u, g, unknown, or other
  misc_difference 186: note = a, c, u, g, unknown, or other
  misc_difference 194: note = a, c, u, g, unknown, or other
  misc_difference 195: note = a, c, u, g, unknown, or other
  misc_difference 201: note = a, c, u, g, unknown, or other
  misc_difference 207: note = a, c, u, g, unknown, or other
  misc_difference 209: note = a, c, u, g, unknown, or other
  misc_difference 213: note = a, c, u, g, unknown, or other
nytynryyyynnnnnnnnynnnnnnnnnnnnnrnynryannnnnynrnyngynnnnnyrggnyatgyrcyygynrnntacgaatannnnnnnnnnarcrynngatgntyncygctttrnyttcganyynryrggtrcrcttnnrytcrnyaacgaatactcagggctygcnnnnnnaynngctnnnctatattnnyttcgnagarcnynrgynyrca

SEQ ID NO: 795313 - RNA, 168 nt, unidentified
  source 1..168: mol_type = unassigned RNA; note = ISShwo3
  misc_difference 1: note = a, c, u, g, unknown, or other
  misc_difference 2: note = a, c, u, g, unknown, or other
  misc_difference 3: note = a, c, u, g, unknown, or other
  misc_difference 4: note = a, c, u, g, unknown, or other
  misc_difference 5: note = a, c, u, g, unknown, or other
  misc_difference 13: note = a, c, u, g, unknown, or other
  misc_difference 14: note = a, c, u, g, unknown, or other
  misc_difference 24: note = a, c, u, g, unknown, or other
  misc_difference 25: note = a, c, u, g, unknown, or other
  misc_difference 33: note = a, c, u, g, unknown, or other
  misc_difference 36: note = a, c, u, g, unknown, or other
  misc_difference 44: note = a, c, u, g, unknown, or other
  misc_difference 46: note = a, c, u, g, unknown, or other
  misc_difference 49: note = a, c, u, g, unknown, or other
  misc_difference 51: note = a, c, u, g, unknown, or other
  misc_difference 66: note = a, c, u, g, unknown, or other
  misc_difference 67: note = a, c, u, g, unknown, or other
  misc_difference 68: note = a, c, u, g, unknown, or other
  misc_difference 69: note = a, c, u, g, unknown, or other
  misc_difference 70: note = a, c, u, g, unknown, or other
  misc_difference 71: note = a, c, u, g, unknown, or other
  misc_difference 72: note = a, c, u, g, unknown, or other
  misc_difference 73: note = a, c, u, g, unknown, or other
  misc_difference 82: note = a, c, u, g, unknown, or other
  misc_difference 83: note = a, c, u, g, unknown, or other
  misc_difference 103: note = a, c, u, g, unknown, or other
  misc_difference 105: note = a, c, u, g, unknown, or other
  misc_difference 116: note = a, c, u, g, unknown, or other
  misc_difference 119: note = a, c, u, g, unknown, or other
  misc_difference 120: note = a, c, u, g, unknown, or other
  misc_difference 130: note = a, c, u, g, unknown, or other
  misc_difference 131: note = a, c, u, g, unknown, or other
  misc_difference 133: note = a, c, u, g, unknown, or other
  misc_difference 147: note = a, c, u, g, unknown, or other
  misc_difference 149: note = a, c, u, g, unknown, or other
  misc_difference 167: note = a, c, u, g, unknown, or other
  misc_difference 168: note = a, c, u, g, unknown, or other
nnnnnygggtaanntgagrcccanncttyrgyngcnacyraagnynyyntntryrryagytcgrtnnnnnnnnggytcctynntygagagaccgrtaacaagnrngarcryyryanrrnncyyyaagyannanactcgrayagtcrnyngggyctcgarcccgyatnn

SEQ ID NO: 795314 - RNA, 235 nt, unidentified
  source 1..235: mol_type = unassigned RNA; note = ISSpu22
  misc_difference 2: note = a, c, u, g, unknown, or other
  misc_difference 3: note = a, c, u, g, unknown, or other
  misc_difference 4: note = a, c, u, g, unknown, or other
  misc_difference 5: note = a, c, u, g, unknown, or other
  misc_difference 7: note = a, c, u, g, unknown, or other
  misc_difference 8: note = a, c, u, g, unknown, or other
  misc_difference 11: note = a, c, u, g, unknown, or other
  misc_difference 12: note = a, c, u, g, unknown, or other
  misc_difference 13: note = a, c, u, g, unknown, or other
  misc_difference 14: note = a, c, u, g, unknown, or other
  misc_difference 16: note = a, c, u, g, unknown, or other
  misc_difference 20: note = a, c, u, g, unknown, or other
  misc_difference 21: note = a, c, u, g, unknown, or other
  misc_difference 24: note = a, c, u, g, unknown, or other
  misc_difference 25: note = a, c, u, g, unknown, or other
  misc_difference 26: note = a, c, u, g, unknown, or other
  misc_difference 27: note = a, c, u, g, unknown, or other
  misc_difference 28: note = a, c, u, g, unknown, or other
  misc_difference 29: note = a, c, u, g, unknown, or other
  misc_difference 30: note = a, c, u, g, unknown, or other
  misc_difference 31: note = a, c, u, g, unknown, or other
  misc_difference 32: note = a, c, u, g, unknown, or other
  misc_difference 33: note = a, c, u, g, unknown, or other
  misc_difference 34: note = a, c, u, g, unknown, or other
  misc_difference 35: note = a, c, u, g, unknown, or other
  misc_difference 42: note = a, c, u, g, unknown, or other
  misc_difference 43: note = a, c, u, g, unknown, or other
  misc_difference 47: note = a, c, u, g, unknown, or other
  misc_difference 51: note = a, c, u, g, unknown, or other
  misc_difference 60: note = a, c, u, g, unknown, or other
  misc_difference 62: note = a, c, u, g, unknown, or other
  misc_difference 65: note = a, c, u, g, unknown, or other
  misc_difference 69: note = a, c, u, g, unknown, or other
  misc_difference 74: note = a, c, u, g, unknown, or other
  misc_difference 75: note = a, c, u, g, unknown, or other
  misc_difference 76: note = a, c, u, g, unknown, or other
  misc_difference 77: note = a, c, u, g, unknown, or other
  misc_difference 78: note = a, c, u, g, unknown, or other
  misc_difference 79: note = a, c, u, g, unknown, or other
  misc_difference 80: note = a, c, u, g, unknown, or other
  misc_difference 81: note = a, c, u, g, unknown, or other
  misc_difference 82: note = a, c, u, g, unknown, or other
  misc_difference 83: note = a, c, u, g, unknown, or other
  misc_difference 84: note = a, c, u, g, unknown, or other
  misc_difference 89: note = a, c, u, g, unknown, or other
  misc_difference 90: note = a, c, u, g, unknown, or other
  misc_difference 91: note = a, c, u, g, unknown, or other
  misc_difference 92: note = a, c, u, g, unknown, or other
  misc_difference 100: note = a, c, u, g, unknown, or other
  misc_difference 101: note = a, c, u, g, unknown, or other
  misc_difference 102: note = a, c, u, g, unknown, or other
  misc_difference 103: note = a, c, u, g, unknown, or other
  misc_difference 104: note = a, c, u, g, unknown, or other
  misc_difference 105: note = a, c, u, g, unknown, or other
  misc_difference 110: note = a, c, u, g, unknown, or other
  misc_difference 115: note = a, c, u, g, unknown, or other
  misc_difference 118: note = a, c, u, g, unknown, or other
  misc_difference 120: note = a, c, u, g, unknown, or other
  misc_difference 129: note = a, c, u, g, unknown, or other
  misc_difference 141: note = a, c, u, g, unknown, or other
  misc_difference 146: note = a, c, u, g, unknown, or other
  misc_difference 147: note = a, c, u, g, unknown, or other
  misc_difference 148: note = a, c, u, g, unknown, or other
  misc_difference 149: note = a, c, u, g, unknown, or other
  misc_difference 150: note = a, c, u, g, unknown, or other
  misc_difference 151: note = a, c, u, g, unknown, or other
  misc_difference 152: note = a, c, u, g, unknown, or other
  misc_difference 153: note = a, c, u, g, unknown, or other
  misc_difference 154: note = a, c, u, g, unknown, or other
  misc_difference 155: note = a, c, u, g, unknown, or other
  misc_difference 156: note = a, c, u, g, unknown, or other
  misc_difference 157: note = a, c, u, g, unknown, or other
  misc_difference 161: note = a, c, u, g, unknown, or other
  misc_difference 162: note = a, c, u, g, unknown, or other
  misc_difference 163: note = a, c, u, g, unknown, or other
  misc_difference 164: note = a, c, u, g, unknown, or other
  misc_difference 165: note = a, c, u, g, unknown, or other
  misc_difference 166: note = a, c, u, g, unknown, or other
  misc_difference 181: note = a, c, u, g, unknown, or other
  misc_difference 182: note = a, c, u, g, unknown, or other
  misc_difference 183: note = a, c, u, g, unknown, or other
  misc_difference 187: note = a, c, u, g, unknown, or other
  misc_difference 189: note = a, c, u, g, unknown, or other
  misc_difference 190: note = a, c, u, g, unknown, or other
  misc_difference 192: note = a, c, u, g, unknown, or other
  misc_difference 193: note = a, c, u, g, unknown, or other
  misc_difference 195: note = a, c, u, g, unknown, or other
  misc_difference 196: note = a, c, u, g, unknown, or other
  misc_difference 197: note = a, c, u, g, unknown, or other
  misc_difference 198: note = a, c, u, g, unknown, or other
  misc_difference 199: note = a, c, u, g, unknown, or other
  misc_difference 205: note = a, c, u, g, unknown, or other
  misc_difference 206: note = a, c, u, g, unknown, or other
  misc_difference 207: note = a, c, u, g, unknown, or other
  misc_difference 208: note = a, c, u, g, unknown, or other
  misc_difference 209: note = a, c, u, g, unknown, or other
  misc_difference 210: note = a, c, u, g, unknown, or other
  misc_difference 211: note = a, c, u, g, unknown, or other
  misc_difference 219: note = a, c, u, g, unknown, or other
  misc_difference 220: note = a, c, u, g, unknown, or other
  misc_difference 221: note = a, c, u, g, unknown, or other
  misc_difference 222: note = a, c, u, g, unknown, or other
  misc_difference 223: note = a, c, u, g, unknown, or other
  misc_difference 224: note = a, c, u, g, unknown, or other
  misc_difference 225: note = a, c, u, g, unknown, or other
  misc_difference 226: note = a, c, u, g, unknown, or other
  misc_difference 227: note = a, c, u, g, unknown, or other
  misc_difference 234: note = a, c, u, g, unknown, or other
  misc_difference 235: note = a, c, u, g, unknown, or other
rnnnnynnyynnnnrntgcnnrrnnnnnnnnnnnngatgrynnraynggtnaraccrgcnynyynrranyctgnnnnnnnnnnnggcynnnnrargccgnnnnnntgrtnagganrrnrngygcrratnycatcrrggcyngrrrnnnnnnnnnnnnyycnnnnnnargccgratataygnnngcanynnynnynnnnnyyryynnnnnnnyttgyrrnnnnnnnnnrgyycrnn

SEQ ID NO: 795315 - RNA, 228 nt, unidentified
  source 1..228: mol_type = unassigned RNA; note = ISPpu25
  misc_difference 3: note = a, c, u, g, unknown, or other
  misc_difference 4: note = a, c, u, g, unknown, or other
  misc_difference 5: note = a, c, u, g, unknown, or other
  misc_difference 6: note = a, c, u, g, unknown, or other
  misc_difference 13: note = a, c, u, g, unknown, or other
  misc_difference 14: note = a, c, u, g, unknown, or other
  misc_difference 15: note = a, c, u, g, unknown, or other
  misc_difference 17: note = a, c, u, g, unknown, or other
  misc_difference 20: note = a, c, u, g, unknown, or other
  misc_difference 21: note = a, c, u, g, unknown, or other
  misc_difference 22: note = a, c, u, g, unknown, or other
  misc_difference 23: note = a, c, u, g, unknown, or other
  misc_difference 24: note = a, c, u, g, unknown, or other
  misc_difference 26: note = a, c, u, g, unknown, or other
  misc_difference 28: note = a, c, u, g, unknown, or other
  misc_difference 29: note = a, c, u, g, unknown, or other
  misc_difference 30: note = a, c, u, g, unknown, or other
  misc_difference 37: note = a, c, u, g, unknown, or other
  misc_difference 38: note = a, c, u, g, unknown, or other
  misc_difference 39: note = a, c, u, g, unknown, or other
  misc_difference 41: note = a, c, u, g, unknown, or other
  misc_difference 45: note = a, c, u, g, unknown, or other
  misc_difference 48: note = a, c, u, g, unknown, or other
  misc_difference 51: note = a, c, u, g, unknown, or other
  misc_difference 56: note = a, c, u, g, unknown, or other
  misc_difference 60: note = a, c, u, g, unknown, or other
  misc_difference 61: note = a, c, u, g, unknown, or other
  misc_difference 73: note = a, c, u, g, unknown, or other
  misc_difference 74: note = a, c, u, g, unknown, or other
  misc_difference 75: note = a, c, u, g, unknown, or other
  misc_difference 76: note = a, c, u, g, unknown, or other
  misc_difference 77: note = a, c, u, g, unknown, or other
  misc_difference 84: note = a, c, u, g, unknown, or other
  misc_difference 85: note = a, c, u, g, unknown, or other
  misc_difference 93: note = a, c, u, g, unknown, or other
  misc_difference 95: note = a, c, u, g, unknown, or other
  misc_difference 96: note = a, c, u, g, unknown, or other
  misc_difference 97: note = a, c, u, g, unknown, or other
  misc_difference 112: note = a, c, u, g, unknown, or other
  misc_difference 121: note = a, c, u, g, unknown, or other
  misc_difference 124: note = a, c, u, g, unknown, or other
  misc_difference 129: note = a, c, u, g, unknown, or other
  misc_difference 136: note = a, c, u, g, unknown, or other
  misc_difference 140: note = a, c, u, g, unknown, or other
  misc_difference 141: note = a, c, u, g, unknown, or other
  misc_difference 142: note = a, c, u, g, unknown, or other
  misc_difference 143: note = a, c, u, g, unknown, or other
  misc_difference 144: note = a, c, u, g, unknown, or other
  misc_difference 145: note = a, c, u, g, unknown, or other
  misc_difference 146: note = a, c, u, g, unknown, or other
  misc_difference 147: note = a, c, u, g, unknown, or other
  misc_difference 148: note = a, c, u, g, unknown, or other
  misc_difference 154: note = a, c, u, g, unknown, or other
  misc_difference 155: note = a, c, u, g, unknown, or other
  misc_difference 156: note = a, c, u, g, unknown, or other
  misc_difference 157: note = a, c, u, g, unknown, or other
  misc_difference 166: note = a, c, u, g, unknown, or other
  misc_difference 173: note = a, c, u, g, unknown, or other
  misc_difference 181: note = a, c, u, g, unknown, or other
  misc_difference 182: note = a, c, u, g, unknown, or other
  misc_difference 183: note = a, c, u, g, unknown, or other
  misc_difference 186: note = a, c, u, g, unknown, or other
  misc_difference 187: note = a, c, u, g, unknown, or other
  misc_difference 188: note = a, c, u, g, unknown, or other
  misc_difference 189: note = a, c, u, g, unknown, or other
  misc_difference 194: note = a, c, u, g, unknown, or other
  misc_difference 198: note = a, c, u, g, unknown, or other
  misc_difference 199: note = a, c, u, g, unknown, or other
  misc_difference 200: note = a, c, u, g, unknown, or other
  misc_difference 202: note = a, c, u, g, unknown, or other
  misc_difference 203: note = a, c, u, g, unknown, or other
  misc_difference 204: note = a, c, u, g, unknown, or other
  misc_difference 205: note = a, c, u, g, unknown, or other
  misc_difference 207: note = a, c, u, g, unknown, or other
  misc_difference 208: note = a, c, u, g, unknown, or other
  misc_difference 212: note = a, c, u, g, unknown, or other
  misc_difference 213: note = a, c, u, g, unknown, or other
  misc_difference 214: note = a, c, u, g, unknown, or other
  misc_difference 215: note = a, c, u, g, unknown, or other
  misc_difference 219: note = a, c, u, g, unknown, or other
ycnnnnrrytgcnnngnrrnnnnnrnrnnnatgryrnnnyngrynrgnccnryryngrrnnargccgataacnnnnntgrycynnragrycgnynnnarcgattggcycycnrygcgcgrnyynycatnrtggccnggrnnnnnnnnnyccaynnnnaggccgranatacgrntgcarycnnnyynnnnygycnryynnnynnnnynnyrynnnnyrynggrggagyc

SEQ ID NO: 795316 - RNA, 158 nt, unidentified
  source 1..158: mol_type = unassigned RNA; note = ISNme5
  misc_difference 1: note = a, c, u, g, unknown, or other
  misc_difference 2: note = a, c, u, g, unknown, or other
  misc_difference 3: note = a, c, u, g, unknown, or other
  misc_difference 4: note = a, c, u, g, unknown, or other
  misc_difference 5: note = a, c, u, g, unknown, or other
  misc_difference 6: note = a, c, u, g, unknown, or other
  misc_difference 7: note = a, c, u, g, unknown, or other
  misc_difference 9: note = a, c, u, g, unknown, or other
  misc_difference 11: note = a, c, u, g, unknown, or other
  misc_difference 12: note = a, c, u, g, unknown, or other
  misc_difference 13: note = a, c, u, g, unknown, or other
  misc_difference 14: note = a, c, u, g, unknown, or other
  misc_difference 15: note = a, c, u, g, unknown, or other
  misc_difference 16: note = a, c, u, g, unknown, or other
  misc_difference 17: note = a, c, u, g, unknown, or other
  misc_difference 19: note = a, c, u, g, unknown, or other
  misc_difference 20: note = a, c, u, g, unknown, or other
  misc_difference 21: note = a, c, u, g, unknown, or other
  misc_difference 22: note = a, c, u, g, unknown, or other
  misc_difference 24: note = a, c, u, g, unknown, or other
  misc_difference 29: note = a, c, u, g, unknown, or other
  misc_difference 33: note = a, c, u, g, unknown, or other
  misc_difference 34: note = a, c, u, g, unknown, or other
  misc_difference 35: note = a, c, u, g, unknown, or other
  misc_difference 36: note = a, c, u, g, unknown, or other
  misc_difference 37: note = a, c, u, g, unknown, or other
  misc_difference 38: note = a, c, u, g, unknown, or other
  misc_difference 42: note = a, c, u, g, unknown, or other
  misc_difference 45: note = a, c, u, g, unknown, or other
  misc_difference 47: note = a, c, u, g, unknown, or other
  misc_difference 48: note = a, c, u, g, unknown, or other
  misc_difference 49: note = a, c, u, g, unknown, or other
  misc_difference 53: note = a, c, u, g, unknown, or other
  misc_difference 58: note = a, c, u, g, unknown, or other
  misc_difference 59: note = a, c, u, g, unknown, or other
  misc_difference 60: note = a, c, u, g, unknown, or other
  misc_difference 61: note = a, c, u, g, unknown, or other
  misc_difference 62: note = a, c, u, g, unknown, or other
  misc_difference 66: note = a, c, u, g, unknown, or other
  misc_difference 67: note = a, c, u, g, unknown, or other
  misc_difference 68: note = a, c, u, g, unknown, or other
  misc_difference 71: note = a, c, u, g, unknown, or other
  misc_difference 75: note = a, c, u, g, unknown, or other
  misc_difference 77: note = a, c, u, g, unknown, or other
  misc_difference 78: note = a, c, u, g, unknown, or other
  misc_difference 79: note = a, c, u, g, unknown, or other
  misc_difference 81: note = a, c, u, g, unknown, or other
  misc_difference 82: note = a, c, u, g, unknown, or other
  misc_difference 83: note = a, c, u, g, unknown, or other
  misc_difference 84: note = a, c, u, g, unknown, or other
  misc_difference 85: note = a, c, u, g, unknown, or other
  misc_difference 86: note = a, c, u, g, unknown, or other
  misc_difference 87: note = a, c, u, g, unknown, or other
  misc_difference 88: note = a, c, u, g, unknown, or other
  misc_difference 90: note = a, c, u, g, unknown, or other
  misc_difference 91: note = a, c, u, g, unknown, or other
  misc_difference 92: note = a, c, u, g, unknown, or other
  misc_difference 93: note = a, c, u, g, unknown, or other
  misc_difference 94: note = a, c, u, g, unknown, or other
  misc_difference 95: note = a, c, u, g, unknown, or other
  misc_difference 112: note = a, c, u, g, unknown, or other
  misc_difference 116: note = a, c, u, g, unknown, or other
  misc_difference 117: note = a, c, u, g, unknown, or other
  misc_difference 118: note = a, c, u, g, unknown, or other
  misc_difference 119: note = a, c, u, g, unknown, or other
  misc_difference 120: note = a, c, u, g, unknown, or other
  misc_difference 123: note = a, c, u, g, unknown, or other
  misc_difference 128: note = a, c, u, g, unknown, or other
  misc_difference 131: note = a, c, u, g, unknown, or other
  misc_difference 139: note = a, c, u, g, unknown, or other
  misc_difference 140: note = a, c, u, g, unknown, or other
  misc_difference 144: note = a, c, u, g, unknown, or other
  misc_difference 145: note = a, c, u, g, unknown, or other
  misc_difference 146: note = a, c, u, g, unknown, or other
  misc_difference 149: note = a, c, u, g, unknown, or other
  misc_difference 152: note = a, c, u, g, unknown, or other
  misc_difference 153: note = a, c, u, g, unknown, or other
  misc_difference 154: note = a, c, u, g, unknown, or other
  misc_difference 157: note = a, c, u, g, unknown, or other
  misc_difference 158: note = a, c, u, g, unknown, or other
nnnnnnnrnynnnnnnngnnnnynryagnyygnnnnnnyyyngrnynnnrarnycgynnnnnagcnnnrrncgynrnnnynnnnnnnnynnnnnnarcccgaacrgttgyyngrrnnnnnranyycgnatnygcaaggnngggnnngrnrrnnnyrnn

SEQ ID NO: 795317 - RNA, 223 nt, unidentified
  source 1..223: mol_type = unassigned RNA; note = IS1533
  misc_difference 1: note = a, c, u, g, unknown, or other
  misc_difference 2: note = a, c, u, g, unknown, or other
  misc_difference 3: note = a, c, u, g, unknown, or other
  misc_difference 4: note = a, c, u, g, unknown, or other
  misc_difference 5: note = a, c, u, g, unknown, or other
  misc_difference 6: note = a, c, u, g, unknown, or other
  misc_difference 7: note = a, c, u, g, unknown, or other
  misc_difference 8: note = a, c, u, g, unknown, or other
  misc_difference 9: note = a, c, u, g, unknown, or other
  misc_difference 10: note = a, c, u, g, unknown, or other
  misc_difference 13: note = a, c, u, g, unknown, or other
  misc_difference 15: note = a, c, u, g, unknown, or other
  misc_difference 16: note = a, c, u, g, unknown, or other
  misc_difference 17: note = a, c, u, g, unknown, or other
  misc_difference 18: note = a, c, u, g, unknown, or other
  misc_difference 21: note = a, c, u, g, unknown, or other
  misc_difference 22: note = a, c, u, g, unknown, or other
  misc_difference 29: note = a, c, u, g, unknown, or other
  misc_difference 34: note = a, c, u, g, unknown, or other
  misc_difference 36: note = a, c, u, g, unknown, or other
  misc_difference 42: note = a, c, u, g, unknown, or other
  misc_difference 43: note = a, c, u, g, unknown, or other
  misc_difference 44: note = a, c, u, g, unknown, or other
  misc_difference 45: note = a, c, u, g, unknown, or other
  misc_difference 53: note = a, c, u, g, unknown, or other
  misc_difference 55: note = a, c, u, g, unknown, or other
  misc_difference 58: note = a, c, u, g, unknown, or other
  misc_difference 59: note = a, c, u, g, unknown, or other
  misc_difference 60: note = a, c, u, g, unknown, or other
  misc_difference 61: note = a, c, u, g, unknown, or other
  misc_difference 62: note = a, c, u, g, unknown, or other
  misc_difference 63: note = a, c, u, g, unknown, or other
  misc_difference 66: note = a, c, u, g, unknown, or other
  misc_difference 73: note = a, c, u, g, unknown, or other
  misc_difference 75: note = a, c, u, g, unknown, or other
  misc_difference 76: note = a, c, u, g, unknown, or other
  misc_difference 77: note = a, c, u, g, unknown, or other
  misc_difference 78: note = a, c, u, g, unknown, or other
  misc_difference 79: note = a, c, u, g, unknown, or other
  misc_difference 80: note = a, c, u, g, unknown, or other
  misc_difference 81: note = a, c, u, g, unknown, or other
  misc_difference 82: note = a, c, u, g, unknown, or other
  misc_difference 83: note = a, c, u, g, unknown, or other
  misc_difference 84: note = a, c, u, g, unknown, or other
  misc_difference 85: note = a, c, u, g, unknown, or other
  misc_difference 86: note = a, c, u, g, unknown, or other
  misc_difference 88: note = a, c, u, g, unknown, or other
  misc_difference 94: note = a, c, u, g, unknown, or other
  misc_difference 97: note = a, c, u, g, unknown, or other
  misc_difference 98: note = a, c, u, g, unknown, or other
  misc_difference 99: note = a, c, u, g, unknown, or other
  misc_difference 100: note = a, c, u, g, unknown, or other
  misc_difference 105: note = a, c, u, g, unknown, or other
  misc_difference 106: note = a, c, u, g, unknown, or other
  misc_difference 108: note = a, c, u, g, unknown, or other
  misc_difference 110: note = a, c, u, g, unknown, or other
  misc_difference 111: note = a, c, u, g, unknown, or other
  misc_difference 112: note = a, c, u, g, unknown, or other
  misc_difference 113: note = a, c, u, g, unknown, or other
  misc_difference 125: note = a, c, u, g, unknown, or other
  misc_difference 126: note = a, c, u, g, unknown, or other
  misc_difference 129: note = a, c, u, g, unknown, or other
  misc_difference 133: note = a, c, u, g, unknown, or other
  misc_difference 140: note = a, c, u, g, unknown, or other
  misc_difference 141: note = a, c, u, g, unknown, or other
  misc_difference 142: note = a, c, u, g, unknown, or other
  misc_difference 143: note = a, c, u, g, unknown, or other
  misc_difference 144: note = a, c, u, g, unknown, or other
  misc_difference 145: note = a, c, u, g, unknown, or other
  misc_difference 146: note = a, c, u, g, unknown, or other
  misc_difference 148: note = a, c, u, g, unknown, or other
  misc_difference 149: note = a, c, u, g, unknown, or other
  misc_difference 159: note = a, c, u, g, unknown, or other
  misc_difference 167: note = a, c, u, g, unknown, or other
  misc_difference 168: note = a, c, u, g, unknown, or other
  misc_difference 174: note = a, c, u, g, unknown, or other
  misc_difference 182: note = a, c, u, g, unknown, or other
  misc_difference 184: note = a, c, u, g, unknown, or other
  misc_difference 185: note = a, c, u, g, unknown, or other
  misc_difference 186: note = a, c, u, g, unknown, or other
  misc_difference 187: note = a, c, u, g, unknown, or other
  misc_difference 188: note = a, c, u, g, unknown, or other
  misc_difference 189: note = a, c, u, g, unknown, or other
  misc_difference 190: note = a, c, u, g, unknown, or other
  misc_difference 191: note = a, c, u, g, unknown, or other
  misc_difference 195: note = a, c, u, g, unknown, or other
  misc_difference 202: note = a, c, u, g, unknown, or other
  misc_difference 206: note = a, c, u, g, unknown, or other
  misc_difference 207: note = a, c, u, g, unknown, or other
  misc_difference 208: note = a, c, u, g, unknown, or other
  misc_difference 209: note = a, c, u, g, unknown, or other
  misc_difference 211: note = a, c, u, g, unknown, or other
  misc_difference 214: note = a, c, u, g, unknown, or other
  misc_difference 216: note = a, c, u, g, unknown, or other
  misc_difference 217: note = a, c, u, g, unknown, or other
  misc_difference 219: note = a, c, u, g, unknown, or other
  misc_difference 220: note = a, c, u, g, unknown, or other
  misc_difference 221: note = a, c, u, g, unknown, or other
  misc_difference 222: note = a, c, u, g, unknown, or other
  misc_difference 223: note = a, c, u, g, unknown, or other
nnnnnnnnnnrrnrnnnnrrnnrryrganrrrynrnyrcgrnnnnggagrayncncgnnnnnnyyntgygrcnrnnnnnnnnnnnnynrayycnygnnnnyaganngngnnnnctcccgacgrannayngtcntgcggynnnnnnnrnnyaayccgcgnatryyagnntgayynrtcgtcgnrnnnnnnnnyyynycyryynyyynnnnynyynrnnrnnnnn

SEQ ID NO: 795318 - RNA, 181 nt, unidentified
  source 1..181: mol_type = unassigned RNA; note = ISMex17
  misc_difference 1: note = a, c, u, g, unknown, or other
  misc_difference 2: note = a, c, u, g, unknown, or other
  misc_difference 3: note = a, c, u, g, unknown, or other
  misc_difference 4: note = a, c, u, g, unknown, or other
  misc_difference 5: note = a, c, u, g, unknown, or other
  misc_difference 6: note = a, c, u, g, unknown, or other
  misc_difference 7: note = a, c, u, g, unknown, or other
  misc_difference 8: note = a, c, u, g, unknown, or other
  misc_difference 11: note = a, c, u, g, unknown, or other
  misc_difference 12: note = a, c, u, g, unknown, or other
  misc_difference 15: note = a, c, u, g, unknown, or other
  misc_difference 17: note = a, c, u, g, unknown, or other
  misc_difference 20: note = a, c, u, g, unknown, or other
  misc_difference 22: note = a, c, u, g, unknown, or other
  misc_difference 24: note = a, c, u, g, unknown, or other
  misc_difference 25: note = a, c, u, g, unknown, or other
  misc_difference 26: note = a, c, u, g, unknown, or other
  misc_difference 27: note = a, c, u, g, unknown, or other
  misc_difference 29: note = a, c, u, g, unknown, or other
  misc_difference 48: note = a, c, u, g, unknown, or other
  misc_difference 52: note = a, c, u, g, unknown, or other
  misc_difference 53: note = a, c, u, g, unknown, or other
  misc_difference 54: note = a, c, u, g, unknown, or other
  misc_difference 55: note = a, c, u, g, unknown, or other
  misc_difference 56: note = a, c, u, g, unknown, or other
  misc_difference 60: note = a, c, u, g, unknown, or other
  misc_difference 64: note = a, c, u, g, unknown, or other
  misc_difference 66: note = a, c, u, g, unknown, or other
  misc_difference 67: note = a, c, u, g, unknown, or other
  misc_difference 69: note = a, c, u, g, unknown, or other
  misc_difference 73: note = a, c, u, g, unknown, or other
  misc_difference 80: note = a, c, u, g, unknown, or other
  misc_difference 81: note = a, c, u, g, unknown, or other
  misc_difference 86: note = a, c, u, g, unknown, or other
  misc_difference 87: note = a, c, u, g, unknown, or other
  misc_difference 90: note = a, c, u, g, unknown, or other
  misc_difference 91: note = a, c, u, g, unknown, or other
  misc_difference 104: note = a, c, u, g, unknown, or other
  misc_difference 128: note = a, c, u, g, unknown, or other
  misc_difference 136: note = a, c, u, g, unknown, or other
  misc_difference 137: note = a, c, u, g, unknown, or other
  misc_difference 138: note = a, c, u, g, unknown, or other
  misc_difference 139: note = a, c, u, g, unknown, or other
  misc_difference 140: note = a, c, u, g, unknown, or other
  misc_difference 144: note = a, c, u, g, unknown, or other
  misc_difference 151: note = a, c, u, g, unknown, or other
  misc_difference 155: note = a, c, u, g, unknown, or other
  misc_difference 163: note = a, c, u, g, unknown, or other
  misc_difference 167: note = a, c, u, g, unknown, or other
  misc_difference 169: note = a, c, u, g, unknown, or other
  misc_difference 170: note = a, c, u, g, unknown, or other
  misc_difference 171: note = a, c, u, g, unknown, or other
  misc_difference 179: note = a, c, u, g, unknown, or other
  misc_difference 180: note = a, c, u, g, unknown, or other
nnnnnnnnygnntcngntanrntnnnngnygcggtgrcggrygrrrgnccgnnnnnyccnrggnynnynragnccgtrrnnragcnnggnncyycrycygycgntccatcgaacccgaacagtcgcyngggccgcnnnnngcgnagcccgnttrngcaaggangggnynnnatggayrnnr

SEQ ID NO: 795319 - RNA, 192 nt, unidentified
  source 1..192: mol_type = unassigned RNA; note = IS1110
  misc_difference 1: note = a, c, u, g, unknown, or other
  misc_difference 2: note = a, c, u, g, unknown, or other
  misc_difference 3: note = a, c, u, g, unknown, or other
  misc_difference 4: note = a, c, u, g, unknown, or other
  misc_difference 5: note = a, c, u, g, unknown, or other
  misc_difference 6: note = a, c, u, g, unknown, or other
  misc_difference 9: note = a, c, u, g, unknown, or other
  misc_difference 10: note = a, c, u, g, unknown, or other
  misc_difference 11: note = a, c, u, g, unknown, or other
  misc_difference 12: note = a, c, u, g, unknown, or other
  misc_difference 13: note = a, c, u, g, unknown, or other
  misc_difference 14: note = a, c, u, g, unknown, or other
  misc_difference 15: note = a, c, u, g, unknown, or other
  misc_difference 17: note = a, c, u, g, unknown, or other
  misc_difference 18: note = a, c, u, g, unknown, or other
  misc_difference 19: note = a, c, u, g, unknown, or other
  misc_difference 20: note = a, c, u, g, unknown, or other
  misc_difference 21: note = a, c, u, g, unknown, or other
  misc_difference 22: note = a, c, u, g, unknown, or other
  misc_difference 23: note = a, c, u, g, unknown, or other
  misc_difference 24: note = a, c, u, g, unknown, or other
  misc_difference 25: note = a, c, u, g, unknown, or other
  misc_difference 26: note = a, c, u, g, unknown, or other
  misc_difference 29: note = a, c, u, g, unknown, or other
  misc_difference 32: note = a, c, u, g, unknown, or other
  misc_difference 34: note = a, c, u, g, unknown, or other
  misc_difference 35: note = a, c, u, g, unknown, or other
  misc_difference 36: note = a, c, u, g, unknown, or other
  misc_difference 46: note = a, c, u, g, unknown, or other
  misc_difference 47: note = a, c, u, g, unknown, or other
  misc_difference 60: note = a, c, u, g, unknown, or other
  misc_difference 61: note = a, c, u, g, unknown, or other
  misc_difference 64: note = a, c, u, g, unknown, or other
  misc_difference 65: note = a, c, u, g, unknown, or other
  misc_difference 66: note = a, c, u, g, unknown, or other
  misc_difference 67: note = a, c, u, g, unknown, or other
  misc_difference 68: note = a, c, u, g, unknown, or other
  misc_difference 76: note = a, c, u, g, unknown, or other
  misc_difference 77: note = a, c, u, g, unknown, or other
  misc_difference 85: note = a, c, u, g, unknown, or other
  misc_difference 86: note = a, c, u, g, unknown, or other
  misc_difference 89: note = a, c, u, g, unknown, or other
  misc_difference 91: note = a, c, u, g, unknown, or other
  misc_difference 105: note = a, c, u, g, unknown, or other
  misc_difference 110: note = a, c, u, g, unknown, or other
  misc_difference 111: note = a, c, u, g, unknown, or other
  misc_difference 116: note = a, c, u, g, unknown, or other
  misc_difference 135: note = a, c, u, g, unknown, or other
  misc_difference 136: note = a, c, u, g, unknown, or other
  misc_difference 142: note = a, c, u, g, unknown, or other
  misc_difference 143: note = a, c, u, g, unknown, or other
  misc_difference 154: note = a, c, u, g, unknown, or other
  misc_difference 160: note = a, c, u, g, unknown, or other
  misc_difference 161: note = a, c, u, g, unknown, or other
  misc_difference 162: note = a, c, u, g, unknown, or other
  misc_difference 165: note = a, c, u, g, unknown, or other
  misc_difference 182: note = a, c, u, g, unknown, or other
  misc_difference 185: note = a, c, u, g, unknown, or other
  misc_difference 186: note = a, c, u, g, unknown, or other
  misc_difference 187: note = a, c, u, g, unknown, or other
  misc_difference 188: note = a, c, u, g, unknown, or other
  misc_difference 189: note = a, c, u, g, unknown, or other
  misc_difference 190: note = a, c, u, g, unknown, or other
  misc_difference 191: note = a, c, u, g, unknown, or other
  misc_difference 192: note = a, c, u, g, unknown, or other
nnnnnnrgnnnnnnngnnnnnnnnnnrgnyyngnnnrcccrggrgnnycgggtrtggctnnyrnnnnnyygccrynnrtggctynnrrngnytggccgcccggynyyycnngacgncycgrccgctrattgrganntgcgannygatcgctgyntarggnnnygncggcgrggtygtcyrynggnnnnnnnn

SEQ ID NO: 795320 - RNA, 229 nt, unidentified
  source 1..229: mol_type = unassigned RNA; note = ISBcen1
  misc_difference 1: note = a, c, u, g, unknown, or other
  misc_difference 2: note = a, c, u, g, unknown, or other
  misc_difference 3: note = a, c, u, g, unknown, or other
  misc_difference 4: note = a, c, u, g, unknown, or other
  misc_difference 5: note = a, c, u, g, unknown, or other
  misc_difference 10: note = a, c, u, g, unknown, or other
  misc_difference 13: note = a, c, u, g, unknown, or other
  misc_difference 25: note = a, c, u, g, unknown, or other
  misc_difference 31: note = a, c, u, g, unknown, or other
  misc_difference 32: note = a, c, u, g, unknown, or other
  misc_difference 33: note = a, c, u, g, unknown, or other
  misc_difference 35: note = a, c, u, g, unknown, or other
  misc_difference 51: note = a, c, u, g, unknown, or other
  misc_difference 54: note = a, c, u, g, unknown, or other
  misc_difference 67: note = a, c, u, g, unknown, or other
  misc_difference 69: note = a, c, u, g, unknown, or other
  misc_difference 74: note = a, c, u, g, unknown, or other
  misc_difference 75: note = a, c, u, g, unknown, or other
  misc_difference 76: note = a, c, u, g, unknown, or other
  misc_difference 77: note = a, c, u, g, unknown, or other
  misc_difference 78: note = a, c, u, g, unknown, or other
  misc_difference 79: note = a, c, u, g, unknown, or other
  misc_difference 80: note = a, c, u, g, unknown, or other
  misc_difference 83: note = a, c, u, g, unknown, or other
  misc_difference 91: note = a, c, u, g, unknown, or other
  misc_difference 99: note = a, c, u, g, unknown, or other
  misc_difference 100: note = a, c, u, g, unknown, or other
  misc_difference 101: note = a, c, u, g, unknown, or other
  misc_difference 102: note = a, c, u, g, unknown, or other
  misc_difference 103: note = a, c, u, g, unknown, or other
  misc_difference 104: note = a, c, u, g, unknown, or other
  misc_difference 109: note = a, c, u, g, unknown, or other
  misc_difference 113: note = a, c, u, g, unknown, or other
  misc_difference 127: note = a, c, u, g, unknown, or other
  misc_difference 128: note = a, c, u, g, unknown, or other
  misc_difference 145: note = a, c, u, g, unknown, or other
  misc_difference 146: note = a, c, u, g, unknown, or other
  misc_difference 147: note = a, c, u, g, unknown, or other
  misc_difference 148: note = a, c, u, g, unknown, or other
  misc_difference 149: note = a, c, u, g, unknown, or other
  misc_difference 150: note = a, c, u, g, unknown, or other
  misc_difference 151: note = a, c, u, g, unknown, or other
  misc_difference 156: note = a, c, u, g, unknown, or other
  misc_difference 157: note = a, c, u, g, unknown, or other
  misc_difference 158: note = a, c, u, g, unknown, or other
  misc_difference 159: note = a, c, u, g, unknown, or other
  misc_difference 186: note = a, c, u, g, unknown, or other
  misc_difference 188: note = a, c, u, g, unknown, or other
  misc_difference 191: note = a, c, u, g, unknown, or other
  misc_difference 192: note = a, c, u, g, unknown, or other
  misc_difference 198: note = a, c, u, g, unknown, or other
  misc_difference 199: note = a, c, u, g, unknown, or other
  misc_difference 200: note = a, c, u, g, unknown, or other
  misc_difference 201: note = a, c, u, g, unknown, or other
  misc_difference 204: note = a, c, u, g, unknown, or other
  misc_difference 206: note = a, c, u, g, unknown, or other
  misc_difference 207: note = a, c, u, g, unknown, or other
  misc_difference 217: note = a, c, u, g, unknown, or other
  misc_difference 223: note = a, c, u, g, unknown, or other
nnnnnryyynycnggttttgcgaynrctgannnyngatgacrtraacggcnyancggcctgryrrrnancctgnnnnnnnaanyggcyyynrargcygnnnnnnttttnaggnyyrycaggcgcgrnnctcatcgyggcgcggrnnnnnnnyyyannnngacgccgratagatttrrgcaagccrnynrynnyryyrnnnnycnrnnttgcaaaarngrggrngaccat

SEQ ID NO: 795321 - RNA, 227 nt, unidentified
  source 1..227: mol_type = unassigned RNA; note = ISPa55
  misc_difference 5: note = a, c, u, g, unknown, or other
  misc_difference 6: note = a, c, u, g, unknown, or other
  misc_difference 10: note = a, c, u, g, unknown, or other
  misc_difference 14: note = a, c, u, g, unknown, or other
  misc_difference 17: note = a, c, u, g, unknown, or other
  misc_difference 19: note = a, c, u, g, unknown, or other
  misc_difference 25: note = a, c, u, g, unknown, or other
  misc_difference 26: note = a, c, u, g, unknown, or other
  misc_difference 28: note = a, c, u, g, unknown, or other
  misc_difference 29: note = a, c, u, g, unknown, or other
  misc_difference 43: note = a, c, u, g, unknown, or other
  misc_difference 44: note = a, c, u, g, unknown, or other
  misc_difference 47: note = a, c, u, g, unknown, or other
  misc_difference 63: note = a, c, u, g, unknown, or other
  misc_difference 64: note = a, c, u, g, unknown, or other
  misc_difference 65: note = a, c, u, g, unknown, or other
  misc_difference 66: note = a, c, u, g, unknown, or other
  misc_difference 70: note = a, c, u, g, unknown, or other
  misc_difference 71: note = a, c, u, g, unknown, or other
  misc_difference 73: note = a, c, u, g, unknown, or other
  misc_difference 75: note = a, c, u, g, unknown, or other
  misc_difference 76: note = a, c, u, g, unknown, or other
  misc_difference 77: note = a, c, u, g, unknown, or other
  misc_difference 78: note = a, c, u, g, unknown, or other
  misc_difference 79: note = a, c, u, g, unknown, or other
  misc_difference 80: note = a, c, u, g, unknown, or other
  misc_difference 81: note = a, c, u, g, unknown, or other
  misc_difference 82: note = a, c, u, g, unknown, or other
  misc_difference 83: note = a, c, u, g, unknown, or other
  misc_difference 84: note = a, c, u, g, unknown, or other
  misc_difference 85: note = a, c, u, g, unknown, or other
  misc_difference 95: note = a, c, u, g, unknown, or other
  misc_difference 99: note = a, c, u, g, unknown, or other
  misc_difference 100: note = a, c, u, g, unknown, or other
  misc_difference 101: note = a, c, u, g, unknown, or other
  misc_difference 102: note = a, c, u, g, unknown, or other
  misc_difference 103: note = a, c, u, g, unknown, or other
  misc_difference 104: note = a, c, u, g, unknown, or other
  misc_difference 105: note = a, c, u, g, unknown, or other
  misc_difference 108: note = a, c, u, g, unknown, or other
  misc_difference 109: note = a, c, u, g, unknown, or other
  misc_difference 110: note = a, c, u, g, unknown, or other
  misc_difference 111: note = a, c, u, g, unknown, or other
  misc_difference 115: note = a, c, u, g, unknown, or other
  misc_difference 129: note = a, c, u, g, unknown, or other
  misc_difference 131: note = a, c, u, g, unknown, or other
  misc_difference 135: note = a, c, u, g, unknown, or other
  misc_difference 145: note = a, c, u, g, unknown, or other
  misc_difference 149: note = a, c, u, g, unknown, or other
  misc_difference 150: note = a, c, u, g, unknown, or other
  misc_difference 158: note = a, c, u, g, unknown, or other
  misc_difference 161: note = a, c, u, g, unknown, or other
  misc_difference 166: note = a, c, u, g, unknown, or other
  misc_difference 167: note = a, c, u, g, unknown, or other
  misc_difference 168: note = a, c, u, g, unknown, or other
  misc_difference 169: note = a, c, u, g, unknown, or other
  misc_difference 170: note = a, c, u, g, unknown, or other
  misc_difference 171: note = a, c, u, g, unknown, or other
  misc_difference 174: note = a, c, u, g, unknown, or other
  misc_difference 186: note = a, c, u, g, unknown, or other
  misc_difference 190: note = a, c, u, g, unknown, or other
  misc_difference 205: note = a, c, u, g, unknown, or other
  misc_difference 211: note = a, c, u, g, unknown, or other
  misc_difference 212: note = a, c, u, g, unknown, or other
  misc_difference 213: note = a, c, u, g, unknown, or other
  misc_difference 217: note = a, c, u, g, unknown, or other
  misc_difference 221: note = a, c, u, g, unknown, or other
  misc_difference 223: note = a, c, u, g, unknown, or other
  misc_difference 227: note = a, c, u, g, unknown, or other
tyyrnnryyngcgnrrnrngrtagnnannrggtcagaccgrcnnrrnrrgarcctgrctaacnnnnyggnnrncnnnnnnnnnnnygryygatcnycrnnnnnnnrynnnnccgnyrarygarygaggnynyyrngygcggyttntaynntggyccgnrynrryrnnnnnnryncracaagrccgnytanrgaratgcagtctgnyyctynnnyrynryrnynrcrn

SEQ ID NO: 795322 - RNA, 188 nt, unidentified
  source 1..188: mol_type = unassigned RNA; note = ISSto4
  misc_difference 2: note = a, c, u, g, unknown, or other
  misc_difference 5: note = a, c, u, g, unknown, or other
  misc_difference 6: note = a, c, u, g, unknown, or other
  misc_difference 8: note = a, c, u, g, unknown, or other
  misc_difference 11: note = a, c, u, g, unknown, or other
  misc_difference 12: note = a, c, u, g, unknown, or other
  misc_difference 13: note = a, c, u, g, unknown, or other
  misc_difference 14: note = a, c, u, g, unknown, or other
  misc_difference 15: note = a, c, u, g, unknown, or other
  misc_difference 16: note = a, c, u, g, unknown, or other
  misc_difference 17: note = a, c, u, g, unknown, or other
  misc_difference 19: note = a, c, u, g, unknown, or other
  misc_difference 20: note = a, c, u, g, unknown, or other
  misc_difference 21: note = a, c, u, g, unknown, or other
  misc_difference 22: note = a, c, u, g, unknown, or other
  misc_difference 23: note = a, c, u, g, unknown, or other
  misc_difference 24: note = a, c, u, g, unknown, or other
  misc_difference 27: note = a, c, u, g, unknown, or other
  misc_difference 28: note = a, c, u, g, unknown, or other
  misc_difference 29: note = a, c, u, g, unknown, or other
  misc_difference 30: note = a, c, u, g, unknown, or other
  misc_difference 33: note = a, c, u, g, unknown, or other
  misc_difference 34: note = a, c, u, g, unknown, or other
  misc_difference 35: note = a, c, u, g, unknown, or other
  misc_difference 36: note = a, c, u, g, unknown, or other
  misc_difference 37: note = a, c, u, g, unknown, or other
  misc_difference 39: note = a, c, u, g, unknown, or other
  misc_difference 40: note = a, c, u, g, unknown, or other
  misc_difference 41: note = a, c, u, g, unknown, or other
  misc_difference 42: note = a, c, u, g, unknown, or other
  misc_difference 45: note = a, c, u, g, unknown, or other
  misc_difference 46: note = a, c, u, g, unknown, or other
  misc_difference 47: note = a, c, u, g, unknown, or other
  misc_difference 48: note = a, c, u, g, unknown, or other
  misc_difference 49: note = a, c, u, g, unknown, or other
  misc_difference 50: note = a, c, u, g, unknown, or other
  misc_difference 52: note = a, c, u, g, unknown, or other
  misc_difference 54: note = a, c, u, g, unknown, or other
  misc_difference 55: note = a, c, u, g, unknown, or other
  misc_difference 57: note = a, c, u, g, unknown, or other
  misc_difference 59: note = a, c, u, g, unknown, or other
  misc_difference 61: note = a, c, u, g, unknown, or other
  misc_difference 63: note = a, c, u, g, unknown, or other
  misc_difference 64: note = a, c, u, g, unknown, or other
  misc_difference 65: note = a, c, u, g, unknown, or other
  misc_difference 66: note = a, c, u, g, unknown, or other
  misc_difference 67: note = a, c, u, g, unknown, or other
  misc_difference 72: note = a, c, u, g, unknown, or other
  misc_difference 73: note = a, c, u, g, unknown, or other
  misc_difference 74: note = a, c, u, g, unknown, or other
  misc_difference 75: note = a, c, u, g, unknown, or other
  misc_difference 76: note = a, c, u, g, unknown, or other
  misc_difference 80: note = a, c, u, g, unknown, or other
  misc_difference 83: note = a, c, u, g, unknown, or other
  misc_difference 84: note = a, c, u, g, unknown, or other
  misc_difference 85: note = a, c, u, g, unknown, or other
  misc_difference 87: note = a, c, u, g, unknown, or other
  misc_difference 88: note = a, c, u, g, unknown, or other
  misc_difference 92: note = a, c, u, g, unknown, or other
  misc_difference 93: note = a, c, u, g, unknown, or other
  misc_difference 94: note = a, c, u, g, unknown, or other
  misc_difference 95: note = a, c, u, g, unknown, or other
  misc_difference 96: note = a, c, u, g, unknown, or other
  misc_difference 97: note = a, c, u, g, unknown, or other
  misc_difference 98: note = a, c, u, g, unknown, or other
  misc_difference 99: note = a, c, u, g, unknown, or other
  misc_difference 101: note = a, c, u, g, unknown, or other
  misc_difference 108: note = a, c, u, g, unknown, or other
  misc_difference 109: note = a, c, u, g, unknown, or other
  misc_difference 110: note = a, c, u, g, unknown, or other
  misc_difference 111: note = a, c, u, g, unknown, or other
  misc_difference 112: note = a, c, u, g, unknown, or other
  misc_difference 113: note = a, c, u, g, unknown, or other
  misc_difference 114: note = a, c, u, g, unknown, or other
  misc_difference 115: note = a, c, u, g, unknown, or other
  misc_difference 116: note = a, c, u, g, unknown, or other
  misc_difference 117: note = a, c, u, g, unknown, or other
  misc_difference 119: note = a, c, u, g, unknown, or other
  misc_difference 120: note = a, c, u, g, unknown, or other
  misc_difference 121: note = a, c, u, g, unknown, or other
  misc_difference 123: note = a, c, u, g, unknown, or other
  misc_difference 124: note = a, c, u, g, unknown, or other
  misc_difference 125: note = a, c, u, g, unknown, or other
  misc_difference 127: note = a, c, u, g, unknown, or other
  misc_difference 129: note = a, c, u, g, unknown, or other
  misc_difference 130: note = a, c, u, g, unknown, or other
  misc_difference 131: note = a, c, u, g, unknown, or other
  misc_difference 133: note = a, c, u, g, unknown, or other
  misc_difference 134: note = a, c, u, g, unknown, or other
  misc_difference 136: note = a, c, u, g, unknown, or other
  misc_difference 137: note = a, c, u, g, unknown, or other
  misc_difference 140: note = a, c, u, g, unknown, or other
  misc_difference 142: note = a, c, u, g, unknown, or other
  misc_difference 143: note = a, c, u, g, unknown, or other
  misc_difference 144: note = a, c, u, g, unknown, or other
  misc_difference 145: note = a, c, u, g, unknown, or other
  misc_difference 146: note = a, c, u, g, unknown, or other
  misc_difference 147: note = a, c, u, g, unknown, or other
  misc_difference 148: note = a, c, u, g, unknown, or other
  misc_difference 149: note = a, c, u, g, unknown, or other
  misc_difference 150: note = a, c, u, g, unknown, or other
  misc_difference 151: note = a, c, u, g, unknown, or other
  misc_difference 152: note = a, c, u, g, unknown, or other
  misc_difference 153: note = a, c, u, g, unknown, or other
  misc_difference 154: note = a, c, u, g, unknown, or other
  misc_difference 155: note = a, c, u, g, unknown, or other
  misc_difference 157: note = a, c, u, g, unknown, or other
  misc_difference 158: note = a, c, u, g, unknown, or other
  misc_difference 159: note = a, c, u, g, unknown, or other
  misc_difference 161: note = a, c, u, g, unknown, or other
  misc_difference 162: note = a, c, u, g, unknown, or other
  misc_difference 163: note = a, c, u, g, unknown, or other
  misc_difference 164: note = a, c, u, g, unknown, or other
  misc_difference 166: note = a, c, u, g, unknown, or other
  misc_difference 168: note = a, c, u, g, unknown, or other
  misc_difference 169: note = a, c, u, g, unknown, or other
  misc_difference 171: note = a, c, u, g, unknown, or other
  misc_difference 173: note = a, c, u, g, unknown, or other
  misc_difference 174: note = a, c, u, g, unknown, or other
  misc_difference 175: note = a, c, u, g, unknown, or other
  misc_difference 176: note = a, c, u, g, unknown, or other
  misc_difference 178: note = a, c, u, g, unknown, or other
  misc_difference 179: note = a, c, u, g, unknown, or other
  misc_difference 180: note = a, c, u, g, unknown, or other
  misc_difference 181: note = a, c, u, g, unknown, or other
  misc_difference 182: note = a, c, u, g, unknown, or other
  misc_difference 183: note = a, c, u, g, unknown, or other
  misc_difference 185: note = a, c, u, g, unknown, or other
  misc_difference 186: note = a, c, u, g, unknown, or other
  misc_difference 187: note = a, c, u, g, unknown, or other
rnyynnrnyrnnnnnnnrnnnnnnyrnnnnyrnnnnnynnnnyrnnnnnnrnrnnrnynrnrnnnnnryyrnnnnnyyrnrynnnrnnyyrnnnnnnnnrnyyrryynnnnnnnnnnrnnnynnnynrnnnynnrnnrrnynnnnnnnnnnnnnnrnnnrnnnnynynnrnrnnnnynnnnnnrnnnr

SEQ ID NO: 795323 - RNA, 197 nt, unidentified
  source 1..197: mol_type = unassigned RNA; note = ISLin1
  misc_difference 4: note = a, c, u, g, unknown, or other
  misc_difference 6: note = a, c, u, g, unknown, or other
  misc_difference 10: note = a, c, u, g, unknown, or other
  misc_difference 12: note = a, c, u, g, unknown, or other
  misc_difference 13: note = a, c, u, g, unknown, or other
  misc_difference 14: note = a, c, u, g, unknown, or other
  misc_difference 16: note = a, c, u, g, unknown, or other
  misc_difference 23: note = a, c, u, g, unknown, or other
  misc_difference 24: note = a, c, u, g, unknown, or other
  misc_difference 26: note = a, c, u, g, unknown, or other
  misc_difference 38: note = a, c, u, g, unknown, or other
  misc_difference 55: note = a, c, u, g, unknown, or other
  misc_difference 56: note = a, c, u, g, unknown, or other
  misc_difference 57: note = a, c, u, g, unknown, or other
  misc_difference 58: note = a, c, u, g, unknown, or other
  misc_difference 59: note = a, c, u, g, unknown, or other
  misc_difference 60: note = a, c, u, g, unknown, or other
  misc_difference 61: note = a, c, u, g, unknown, or other
  misc_difference 62: note = a, c, u, g, unknown, or other
  misc_difference 63: note = a, c, u, g, unknown, or other
  misc_difference 64: note = a, c, u, g, unknown, or other
  misc_difference 65: note = a, c, u, g, unknown, or other
  misc_difference 73: note = a, c, u, g, unknown, or other
  misc_difference 74: note = a, c, u, g, unknown, or other
  misc_difference 75: note = a, c, u, g, unknown, or other
  misc_difference 79: note = a, c, u, g, unknown, or other
  misc_difference 84: note = a, c, u, g, unknown, or other
  misc_difference 86: note = a, c, u, g, unknown, or other
  misc_difference 100: note = a, c, u, g, unknown, or other
  misc_difference 109: note = a, c, u, g, unknown, or other
  misc_difference 110: note = a, c, u, g, unknown, or other
  misc_difference 111: note = a, c, u, g, unknown, or other
  misc_difference 112: note = a, c, u, g, unknown, or other
  misc_difference 113: note = a, c, u, g, unknown, or other
  misc_difference 116: note = a, c, u, g, unknown, or other
  misc_difference 117: note = a, c, u, g, unknown, or other
  misc_difference 118: note = a, c, u, g, unknown, or other
  misc_difference 119: note = a, c, u, g, unknown, or other
  misc_difference 122: note = a, c, u, g, unknown, or other
  misc_difference 123: note = a, c, u, g, unknown, or other
  misc_difference 124: note = a, c, u, g, unknown, or other
  misc_difference 125: note = a, c, u, g, unknown, or other
  misc_difference 140: note = a, c, u, g, unknown, or other
  misc_difference 141: note = a, c, u, g, unknown, or other
  misc_difference 150: note = a, c, u, g, unknown, or other
  misc_difference 151: note = a, c, u, g, unknown, or other
  misc_difference 152: note = a, c, u, g, unknown, or other
  misc_difference 158: note = a, c, u, g, unknown, or other
  misc_difference 159: note = a, c, u, g, unknown, or other
  misc_difference 160: note = a, c, u, g, unknown, or other
  misc_difference 161: note = a, c, u, g, unknown, or other
  misc_difference 163: note = a, c, u, g, unknown, or other
  misc_difference 164: note = a, c, u, g, unknown, or other
  misc_difference 177: note = a, c, u, g, unknown, or other
  misc_difference 181: note = a, c, u, g, unknown, or other
  misc_difference 182: note = a, c, u, g, unknown, or other
  misc_difference 183: note = a, c, u, g, unknown, or other
  misc_difference 184: note = a, c, u, g, unknown, or other
  misc_difference 185: note = a, c, u, g, unknown, or other
  misc_difference 190: note = a, c, u, g, unknown, or other
  misc_difference 192: note = a, c, u, g, unknown, or other
  misc_difference 194: note = a, c, u, g, unknown, or other
  misc_difference 195: note = a, c, u, g, unknown, or other
  misc_difference 196: note = a, c, u, g, unknown, or other
rrynrnyrrnrnnnrntayyytnnrnyygacggrryynrrgrgcyggyrgargynnnnnnnnnnnrygrrrynnnrrancycgnynarrcygrcyryygnrrygyrrynnnnnrynnnnrrnnnnacyrcgrataggarnnyrgtryrynnnryyyrnnnnannrctycyrryyyynatynnnnnrrrrnrnrnnnr

SEQ ID NO: 795324 - RNA, 234 nt, unidentified
  source 1..234: mol_type = unassigned RNA; note = ISAtu7
  misc_difference 1: note = a, c, u, g, unknown, or other
  misc_difference 2: note = a, c, u, g, unknown, or other
  misc_difference 4: note = a, c, u, g, unknown, or other
  misc_difference 5: note = a, c, u, g, unknown, or other
  misc_difference 6: note = a, c, u, g, unknown, or other
  misc_difference 7: note = a, c, u, g, unknown, or other
  misc_difference 15: note = a, c, u, g, unknown, or other
  misc_difference 16: note = a, c, u, g, unknown, or other
  misc_difference 17: note = a, c, u, g, unknown, or other
  misc_difference 18: note = a, c, u, g, unknown, or other
  misc_difference 19: note = a, c, u, g, unknown, or other
  misc_difference 21: note = a, c, u, g, unknown, or other
  misc_difference 22: note = a, c, u, g, unknown, or other
  misc_difference 24: note = a, c, u, g, unknown, or other
  misc_difference 25: note = a, c, u, g, unknown, or other
  misc_difference 26: note = a, c, u, g, unknown, or other
  misc_difference 27: note = a, c, u, g, unknown, or other
  misc_difference 28: note = a, c, u, g, unknown, or other
  misc_difference 29: note = a, c, u, g, unknown, or other
  misc_difference 30: note = a, c, u, g, unknown, or other
  misc_difference 31: note = a, c, u, g, unknown, or other
  misc_difference 32: note = a, c, u, g, unknown, or other
  misc_difference 33: note = a, c, u, g, unknown, or other
  misc_difference 34: note = a, c, u, g, unknown, or other
  misc_difference 35: note = a, c, u, g, unknown, or other
  misc_difference 36: note = a, c, u, g, unknown, or other
  misc_difference 38: note = a, c, u, g, unknown, or other
  misc_difference 39: note = a, c, u, g, unknown, or other
  misc_difference 40: note = a, c, u, g, unknown, or other
  misc_difference 42: note = a, c, u, g, unknown, or other
  misc_difference 43: note = a, c, u, g, unknown, or other
  misc_difference 44: note = a, c, u, g, unknown, or other
  misc_difference 45: note = a, c, u, g, unknown, or other
  misc_difference 46: note = a, c, u, g, unknown, or other
  misc_difference 47: note = a, c, u, g, unknown, or other
  misc_difference 48: note = a, c, u, g, unknown, or other
  misc_difference 49: note = a, c, u, g, unknown, or other
  misc_difference 50: note = a, c, u, g, unknown, or other
  misc_difference 51: note = a, c, u, g, unknown, or other
  misc_difference 53: note = a, c, u, g, unknown, or other
  misc_difference 54: note = a, c, u, g, unknown, or other
  misc_difference 56: note = a, c, u, g, unknown, or other
  misc_difference 57: note = a, c, u, g, unknown, or other
  misc_difference 65: note = a, c, u, g, unknown, or other
  misc_difference 83: note = a, c, u, g, unknown, or other
  misc_difference 86: note = a, c, u, g, unknown, or other
  misc_difference 99: note = a, c, u, g, unknown, or other
  misc_difference 100: note = a, c, u, g, unknown, or other
  misc_difference 101: note = a, c, u, g, unknown, or other
  misc_difference 103: note = a, c, u, g, unknown, or other
  misc_difference 104: note = a, c, u, g, unknown, or other
  misc_difference 105: note = a, c, u, g, unknown, or other
  misc_difference 107: note = a, c, u, g, unknown, or other
  misc_difference 116: note = a, c, u, g, unknown, or other
  misc_difference 124: note = a, c, u, g, unknown, or other
  misc_difference 129: note = a, c, u, g, unknown, or other
  misc_difference 132: note = a, c, u, g, unknown, or other
  misc_difference 183: note = a, c, u, g, unknown, or other
  misc_difference 192: note = a, c, u, g, unknown, or other
  misc_difference 199: note = a, c, u, g, unknown, or other
  misc_difference 200: note = a, c, u, g, unknown, or other
  misc_difference 208: note = a, c, u, g, unknown, or other
  misc_difference 210: note = a, c, u, g, unknown, or other
  misc_difference 211: note = a, c, u, g, unknown, or other
  misc_difference 212: note = a, c, u, g, unknown, or other
  misc_difference 213: note = a, c, u, g, unknown, or other
  misc_difference 214: note = a, c, u, g, unknown, or other
  misc_difference 215: note = a, c, u, g, unknown, or other
  misc_difference 216: note = a, c, u, g, unknown, or other
  misc_difference 217: note = a, c, u, g, unknown, or other
  misc_difference 218: note = a, c, u, g, unknown, or other
  misc_difference 219: note = a, c, u, g, unknown, or other
  misc_difference 221: note = a, c, u, g, unknown, or other
  misc_difference 228: note = a, c, u, g, unknown, or other
  misc_difference 229: note = a, c, u, g, unknown, or other
  misc_difference 230: note = a, c, u, g, unknown, or other
  misc_difference 231: note = a, c, u, g, unknown, or other
  misc_difference 232: note = a, c, u, g, unknown, or other
  misc_difference 233: note = a, c, u, g, unknown, or other
  misc_difference 234: note = a, c, u, g, unknown, or other
nnrnnnnyggygccnnnnnynnynnnnnnnnnnnnnynnnrnnnnnnnnnnrnnynnccgggayngrggcrycgggagcacgnrrngygggcaggccgnnnynnnynatgagcygngagctcgngttrntanytggccgccyctrcgacyygcccggytgcgcygygagcgcgratccgtagntgtcgtgyngcccrcnngctcccrnynnnnnnnnnnrnrggrgrnnnnnnn

SEQ ID NO: 795325 - RNA, 272 nt, unidentified
  source 1..272: mol_type = unassigned RNA; note = ISMlo1
  misc_difference 13: note = a, c, u, g, unknown, or other
  misc_difference 15: note = a, c, u, g, unknown, or other
  misc_difference 21: note = a, c, u, g, unknown, or other
  misc_difference 27: note = a, c, u, g, unknown, or other
  misc_difference 28: note = a, c, u, g, unknown, or other
  misc_difference 29: note = a, c, u, g, unknown, or other
  misc_difference 30: note = a, c, u, g, unknown, or other
  misc_difference 31: note = a, c, u, g, unknown, or other
  misc_difference 33: note = a, c, u, g, unknown, or other
  misc_difference 37: note = a, c, u, g, unknown, or other
  misc_difference 60: note = a, c, u, g, unknown, or other
  misc_difference 70: note = a, c, u, g, unknown, or other
  misc_difference 73: note = a, c, u, g, unknown, or other
  misc_difference 101: note = a, c, u, g, unknown, or other
  misc_difference 108: note = a, c, u, g, unknown, or other
  misc_difference 118: note = a, c, u, g, unknown, or other
  misc_difference 119: note = a, c, u, g, unknown, or other
  misc_difference 120: note = a, c, u, g, unknown, or other
  misc_difference 122: note = a, c, u, g, unknown, or other
  misc_difference 123: note = a, c, u, g, unknown, or other
  misc_difference 124: note = a, c, u, g, unknown, or other
  misc_difference 127: note = a, c, u, g, unknown, or other
  misc_difference 133: note = a, c, u, g, unknown, or other
  misc_difference 135: note = a, c, u, g, unknown, or other
  misc_difference 136: note = a, c, u, g, unknown, or other
  misc_difference 137: note = a, c, u, g, unknown, or other
  misc_difference 145: note = a, c, u, g, unknown, or other
  misc_difference 146: note = a, c, u, g, unknown, or other
  misc_difference 147: note = a, c, u, g, unknown, or other
  misc_difference 148: note = a, c, u, g, unknown, or other
  misc_difference 149: note = a, c, u, g, unknown, or other
  misc_difference 154: note = a, c, u, g, unknown, or other
  misc_difference 189: note = a, c, u, g, unknown, or other
  misc_difference 200: note = a, c, u, g, unknown, or other
  misc_difference 205: note = a, c, u, g, unknown, or other
  misc_difference 207: note = a, c, u, g, unknown, or other
  misc_difference 209: note = a, c, u, g, unknown, or other
  misc_difference 225: note = a, c, u, g, unknown, or other
  misc_difference 245: note = a, c, u, g, unknown, or other
  misc_difference 247: note = a, c, u, g, unknown, or other
  misc_difference 252: note = a, c, u, g, unknown, or other
  misc_difference 253: note = a, c, u, g, unknown, or other
  misc_difference 254: note = a, c, u, g, unknown, or other
  misc_difference 255: note = a, c, u, g, unknown, or other
  misc_difference 256: note = a, c, u, g, unknown, or other
  misc_difference 257: note = a, c, u, g, unknown, or other
  misc_difference 258: note = a, c, u, g, unknown, or other
  misc_difference 268: note = a, c, u, g, unknown, or other
  misc_difference 269: note = a, c, u, g, unknown, or other
tagarrtyrgccngncrcgrnrrgcrnnnnnrnygcnrycgygyygrgcygaygcyrgancttgcaagrnrangagcagatggygygatcgatcgatccrngacgygngayaytccgnnnrnnncantggccnynnnaggycgynnnnntgttnggaacycrygyygcggaarccatcttggccagcgntcatrtgygrncgcrnynanaggccggacatatgrnygcaagcgatcygatcrrrnynyygynnnnnnnycttgcrrgnnggr

SEQ ID NO: 795326 - RNA, 193 nt, unidentified
  source 1..193: mol_type = unassigned RNA; note = IS5708
  misc_difference 2: note = a, c, u, g, unknown, or other
  misc_difference 3: note = a, c, u, g, unknown, or other
  misc_difference 6: note = a, c, u, g, unknown, or other
  misc_difference 9: note = a, c, u, g, unknown, or other
  misc_difference 12: note = a, c, u, g, unknown, or other
  misc_difference 13: note = a, c, u, g, unknown, or other
  misc_difference 23: note = a, c, u, g, unknown, or other
  misc_difference 25: note = a, c, u, g, unknown, or other
  misc_difference 28: note = a, c, u, g, unknown, or other
  misc_difference 44: note = a, c, u, g, unknown, or other
  misc_difference 48: note = a, c, u, g, unknown, or other
  misc_difference 50: note = a, c, u, g, unknown, or other
  misc_difference 56: note = a, c, u, g, unknown, or other
  misc_difference 57: note = a, c, u, g, unknown, or other
  misc_difference 58: note = a, c, u, g, unknown, or other
  misc_difference 60: note = a, c, u, g, unknown, or other
  misc_difference 61: note = a, c, u, g, unknown, or other
  misc_difference 62: note = a, c, u, g, unknown, or other
  misc_difference 63: note = a, c, u, g, unknown, or other
  misc_difference 64: note = a, c, u, g, unknown, or other
  misc_difference 65: note = a, c, u, g, unknown, or other
  misc_difference 67: note = a, c, u, g, unknown, or other
  misc_difference 70: note = a, c, u, g, unknown, or other
  misc_difference 71: note = a, c, u, g, unknown, or other
  misc_difference 72: note = a, c, u, g, unknown, or other
  misc_difference 73: note = a, c, u, g, unknown, or other
  misc_difference 74: note = a, c, u, g, unknown, or other
  misc_difference 75: note = a, c, u, g, unknown, or other
  misc_difference 76: note = a, c, u, g, unknown, or other
  misc_difference 78: note = a, c, u, g, unknown, or other
  misc_difference 79: note = a, c, u, g, unknown, or other
  misc_difference 92: note = a, c, u, g, unknown, or other
  misc_difference 102: note = a, c, u, g, unknown, or other
  misc_difference 127: note = a, c, u, g, unknown, or other
  misc_difference 130: note = a, c, u, g, unknown, or other
  misc_difference 132: note = a, c, u, g, unknown, or other
  misc_difference 138: note = a, c, u, g, unknown, or other
  misc_difference 139: note = a, c, u, g, unknown, or other
  misc_difference 147: note = a, c, u, g, unknown, or other
  misc_difference 155: note = a, c, u, g, unknown, or other
  misc_difference 157: note = a, c, u, g, unknown, or other
  misc_difference 160: note = a, c, u, g, unknown, or other
  misc_difference 165: note = a, c, u, g, unknown, or other
  misc_difference 166: note = a, c, u, g, unknown, or other
  misc_difference 171: note = a, c, u, g, unknown, or other
  misc_difference 172: note = a, c, u, g, unknown, or other
  misc_difference 174: note = a, c, u, g, unknown, or other
  misc_difference 175: note = a, c, u, g, unknown, or other
  misc_difference 177: note = a, c, u, g, unknown, or other
  misc_difference 178: note = a, c, u, g, unknown, or other
  misc_difference 179: note = a, c, u, g, unknown, or other
  misc_difference 180: note = a, c, u, g, unknown, or other
  misc_difference 181: note = a, c, u, g, unknown, or other
  misc_difference 182: note = a, c, u, g, unknown, or other
  misc_difference 184: note = a, c, u, g, unknown, or other
  misc_difference 185: note = a, c, u, g, unknown, or other
  misc_difference 186: note = a, c, u, g, unknown, or other
  misc_difference 187: note = a, c, u, g, unknown, or other
  misc_difference 188: note = a, c, u, g, unknown, or other
  misc_difference 190: note = a, c, u, g, unknown, or other
  misc_difference 191: note = a, c, u, g, unknown, or other
  misc_difference 192: note = a, c, u, g, unknown, or other
  misc_difference 193: note = a, c, u, g, unknown, or other
ynntgnrcngcnnrcgytgatgnrnarngggttrgaccyrcgynrggnrnryctgnnnrnnnnnnrngrnnnnnnnrnnyycgryyaryganygrggyycyngcgygcgtctttcatcagggtccgngcnrngyycannatgaccgnttrtagtnyngcngtyynncaycnnynnrnnnnnnrnnnnnrnnnn

SEQ ID NO: 795327 - RNA, 218 nt, unidentified
  source 1..218: mol_type = unassigned RNA; note = ISHaha5
  misc_difference 1: note = a, c, u, g, unknown, or other
  misc_difference 12: note = a, c, u, g, unknown, or other
  misc_difference 17: note = a, c, u, g, unknown, or other
  misc_difference 18: note = a, c, u, g, unknown, or other
  misc_difference 19: note = a, c, u, g, unknown, or other
  misc_difference 22: note = a, c, u, g, unknown, or other
  misc_difference 33: note = a, c, u, g, unknown, or other
  misc_difference 34: note = a, c, u, g, unknown, or other
  misc_difference 35: note = a, c, u, g, unknown, or other
  misc_difference 37: note = a, c, u, g, unknown, or other
  misc_difference 40: note = a, c, u, g, unknown, or other
  misc_difference 41: note = a, c, u, g, unknown, or other
  misc_difference 42: note = a, c, u, g, unknown, or other
  misc_difference 43: note = a, c, u, g, unknown, or other
  misc_difference 44: note = a, c, u, g, unknown, or other
  misc_difference 46: note = a, c, u, g, unknown, or other
  misc_difference 47: note = a, c, u, g, unknown, or other
  misc_difference 48: note = a, c, u, g, unknown, or other
  misc_difference 49: note = a, c, u, g, unknown, or other
  misc_difference 51: note = a, c, u, g, unknown, or other
  misc_difference 52: note = a, c, u, g, unknown, or other
  misc_difference 53: note = a, c, u, g, unknown, or other
  misc_difference 55: note = a, c, u, g, unknown, or other
  misc_difference 56: note = a, c, u, g, unknown, or other
  misc_difference 57: note = a, c, u, g, unknown, or other
  misc_difference 58: note = a, c, u, g, unknown, or other
  misc_difference 65: note = a, c, u, g, unknown, or other
  misc_difference 76: note = a, c, u, g, unknown, or other
  misc_difference 77: note = a, c, u, g, unknown, or other
  misc_difference 78: note = a, c, u, g, unknown, or other
  misc_difference 79: note = a, c, u, g, unknown, or other
  misc_difference 80: note = a, c, u, g, unknown, or other
  misc_difference 83: note = a, c, u, g, unknown, or other
  misc_difference 91: note = a, c, u, g, unknown, or other
  misc_difference 92: note = a, c, u, g, unknown, or other
  misc_difference 93: note = a, c, u, g, unknown, or other
  misc_difference 94: note = a, c, u, g, unknown, or other
  misc_difference 103: note = a, c, u, g, unknown, or other
  misc_difference 104: note = a, c, u, g, unknown, or other
  misc_difference 107: note = a, c, u, g, unknown, or other
  misc_difference 109: note = a, c, u, g, unknown, or other
  misc_difference 130: note = a, c, u, g, unknown, or other
  misc_difference 134: note = a, c, u, g, unknown, or other
  misc_difference 139: note = a, c, u, g, unknown, or other
  misc_difference 142: note = a, c, u, g, unknown, or other
  misc_difference 157: note = a, c, u, g, unknown, or other
  misc_difference 158: note = a, c, u, g, unknown, or other
  misc_difference 159: note = a, c, u, g, unknown, or other
  misc_difference 170: note = a, c, u, g, unknown, or other
  misc_difference 187: note = a, c, u, g, unknown, or other
  misc_difference 196: note = a, c, u, g, unknown, or other
  misc_difference 197: note = a, c, u, g, unknown, or other
  misc_difference 199: note = a, c, u, g, unknown, or other
  misc_difference 200: note = a, c, u, g, unknown, or other
  misc_difference 201: note = a, c, u, g, unknown, or other
  misc_difference 203: note = a, c, u, g, unknown, or other
  misc_difference 208: note = a, c, u, g, unknown, or other
  misc_difference 218: note = a, c, u, g, unknown, or other
ntatraggtyanccarnnnttnctggtygaycnnntntynnnnnrnnnnrnnntnnnngtagycngggyagaacgnnnnnrynygtgggannnngatcccgynnrynanacygttcrccccctacttgtnraancatgnttnaggctggttgggacnnngatcycgtatnacaagcgaarctrtgrnactrcaagnnrnnntnrgggntacyggyran

SEQ ID NO: 795328 - RNA, 193 nt, unidentified
  source 1..193: mol_type = unassigned RNA; note = ISSba8
  misc_difference 1: note = a, c, u, g, unknown, or other
  misc_difference 2: note = a, c, u, g, unknown, or other
  misc_difference 4: note = a, c, u, g, unknown, or other
  misc_difference 10: note = a, c, u, g, unknown, or other
  misc_difference 11: note = a, c, u, g, unknown, or other
  misc_difference 12: note = a, c, u, g, unknown, or other
  misc_difference 13: note = a, c, u, g, unknown, or other
  misc_difference 21: note = a, c, u, g, unknown, or other
  misc_difference 25: note = a, c, u, g, unknown, or other
  misc_difference 26: note = a, c, u, g, unknown, or other
  misc_difference 30: note = a, c, u, g, unknown, or other
  misc_difference 32: note = a, c, u, g, unknown, or other
  misc_difference 36: note = a, c, u, g, unknown, or other
  misc_difference 38: note = a, c, u, g, unknown, or other
  misc_difference 40: note = a, c, u, g, unknown, or other
  misc_difference 41: note = a, c, u, g, unknown, or other
  misc_difference 42: note = a, c, u, g, unknown, or other
  misc_difference 43: note = a, c, u, g, unknown, or other
  misc_difference 52: note = a, c, u, g, unknown, or other
  misc_difference 53: note = a, c, u, g, unknown, or other
  misc_difference 54: note = a, c, u, g, unknown, or other
  misc_difference 55: note = a, c, u, g, unknown, or other
  misc_difference 57: note = a, c, u, g, unknown, or other
  misc_difference 58: note = a, c, u, g, unknown, or other
  misc_difference 60: note = a, c, u, g, unknown, or other
  misc_difference 61: note = a, c, u, g, unknown, or other
  misc_difference 62: note = a, c, u, g, unknown, or other
  misc_difference 67: note = a, c, u, g, unknown, or other
  misc_difference 68: note = a, c, u, g, unknown, or other
  misc_difference 72: note = a, c, u, g, unknown, or other
  misc_difference 76: note = a, c, u, g, unknown, or other
  misc_difference 77: note = a, c, u, g, unknown, or other
  misc_difference 78: note = a, c, u, g, unknown, or other
  misc_difference 79: note = a, c, u, g, unknown, or other
  misc_difference 80: note = a, c, u, g, unknown, or other
  misc_difference 81: note = a, c, u, g, unknown, or other
  misc_difference 84: note = a, c, u, g, unknown, or other
  misc_difference 86: note = a, c, u, g, unknown, or other
  misc_difference 90: note = a, c, u, g, unknown, or other
  misc_difference 91: note = a, c, u, g, unknown, or other
  misc_difference 92: note = a, c, u, g, unknown, or other
  misc_difference 93: note = a, c, u, g, unknown, or other
  misc_difference 94: note = a, c, u, g, unknown, or other
  misc_difference 96: note = a, c, u, g, unknown, or other
  misc_difference 98: note = a, c, u, g, unknown, or other
  misc_difference 99: note = a, c, u, g, unknown, or other
  misc_difference 112: note = a, c, u, g, unknown, or other
  misc_difference 116: note = a, c, u, g, unknown, or other
  misc_difference 117: note = a, c, u, g, unknown, or other
  misc_difference 120: note = a, c, u, g, unknown, or other
  misc_difference 121: note = a, c, u, g, unknown, or other
  misc_difference 122: note = a, c, u, g, unknown, or other
  misc_difference 123: note = a, c, u, g, unknown, or other
  misc_difference 124: note = a, c, u, g, unknown, or other
  misc_difference 125: note = a, c, u, g, unknown, or other
  misc_difference 126: note = a, c, u, g, unknown, or other
  misc_difference 127: note = a, c, u, g, unknown, or other
  misc_difference 128: note = a, c, u, g, unknown, or other
  misc_difference 129: note = a, c, u, g, unknown, or other
  misc_difference 130: note = a, c, u, g, unknown, or other
  misc_difference 134: note = a, c, u, g, unknown, or other
  misc_difference 135: note = a, c, u, g, unknown, or other
  misc_difference 136: note = a, c, u, g, unknown, or other
  misc_difference 137: note = a, c, u, g, unknown, or other
  misc_difference 140: note = a, c, u, g, unknown, or other
  misc_difference 153: note = a, c, u, g, unknown, or other
  misc_difference 154: note = a, c, u, g, unknown, or other
  misc_difference 155: note = a, c, u, g, unknown, or other
  misc_difference 160: note = a, c, u, g, unknown, or other
  misc_difference 162: note = a, c, u, g, unknown, or other
  misc_difference 163: note = a, c, u, g, unknown, or other
  misc_difference 164: note = a, c, u, g, unknown, or other
  misc_difference 165: note = a, c, u, g, unknown, or other
  misc_difference 166: note = a, c, u, g, unknown, or other
  misc_difference 173: note = a, c, u, g, unknown, or other
  misc_difference 174: note = a, c, u, g, unknown, or other
  misc_difference 175: note = a, c, u, g, unknown, or other
  misc_difference 176: note = a, c, u, g, unknown, or other
  misc_difference 177: note = a, c, u, g, unknown, or other
  misc_difference 178: note = a, c, u, g, unknown, or other
  misc_difference 179: note = a, c, u, g, unknown, or other
  misc_difference 180: note = a, c, u, g, unknown, or other
  misc_difference 181: note = a, c, u, g, unknown, or other
  misc_difference 182: note = a, c, u, g, unknown, or other
  misc_difference 183: note = a, c, u, g, unknown, or other
  misc_difference 184: note = a, c, u, g, unknown, or other
  misc_difference 185: note = a, c, u, g, unknown, or other
  misc_difference 187: note = a, c, u, g, unknown, or other
  misc_difference 190: note = a, c, u, g, unknown, or other
  misc_difference 191: note = a, c, u, g, unknown, or other
  misc_difference 192: note = a, c, u, g, unknown, or other
  misc_difference 193: note = a, c, u, g, unknown, or other
nnrnytgcrnnnnyygatgrnrrannggtnrnycrncnynnnnrrarcctgnnnnrnncnnnrryynnrarnycgnnnnnnygnynaggnnnnnrngnncgrayyycatyrnggcnnrrnnnnnnnnnnnyyrnnnnrangccgratataygnnngcrrnynnnnnyyryyrnnnnnnnnnnnnnrnrrnnnn

SEQ ID NO: 795329 - RNA, 265 nt, unidentified
  source 1..265: mol_type = unassigned RNA; note = ISCsa4
  misc_difference 3: note = a, c, u, g, unknown, or other
  misc_difference 8: note = a, c, u, g, unknown, or other
  misc_difference 9: note = a, c, u, g, unknown, or other
  misc_difference 12: note = a, c, u, g, unknown, or other
  misc_difference 13: note = a, c, u, g, unknown, or other
  misc_difference 20: note = a, c, u, g, unknown, or other
  misc_difference 21: note = a, c, u, g, unknown, or other
  misc_difference 22: note = a, c, u, g, unknown, or other
  misc_difference 23: note = a, c, u, g, unknown, or other
  misc_difference 26: note = a, c, u, g, unknown, or other
  misc_difference 27: note = a, c, u, g, unknown, or other
  misc_difference 28: note = a, c, u, g, unknown, or other
  misc_difference 31: note = a, c, u, g, unknown, or other
  misc_difference 36: note = a, c, u, g, unknown, or other
  misc_difference 43: note = a, c, u, g, unknown, or other
  misc_difference 44: note = a, c, u, g, unknown, or other
  misc_difference 50: note = a, c, u, g, unknown, or other
  misc_difference 53: note = a, c, u, g, unknown, or other
  misc_difference 54: note = a, c, u, g, unknown, or other
  misc_difference 62: note = a, c, u, g, unknown, or other
  misc_difference 64: note = a, c, u, g, unknown, or other
  misc_difference 70: note = a, c, u, g, unknown, or other
  misc_difference 79: note = a, c, u, g, unknown, or other
  misc_difference 103: note = a, c, u, g, unknown, or other
  misc_difference 110: note = a, c, u, g, unknown, or other
  misc_difference 111: note = a, c, u, g, unknown, or other
  misc_difference 117: note = a, c, u, g, unknown, or other
  misc_difference 119: note = a, c, u, g, unknown, or other
  misc_difference 120: note = a, c, u, g, unknown, or other
  misc_difference 133: note = a, c, u, g, unknown, or other
  misc_difference 135: note = a, c, u, g, unknown, or other
  misc_difference 146: note = a, c, u, g, unknown, or other
  misc_difference 147: note = a, c, u, g, unknown, or other
  misc_difference 148: note = a, c, u, g, unknown, or other
  misc_difference 150: note = a, c, u, g, unknown, or other
  misc_difference 156: note = a, c, u, g, unknown, or other
  misc_difference 157: note = a, c, u, g, unknown, or other
  misc_difference 162: note = a, c, u, g, unknown, or other
  misc_difference 163: note = a, c, u, g, unknown, or other
  misc_difference 164: note = a, c, u, g, unknown, or other
  misc_difference 167: note = a, c, u, g, unknown, or other
  misc_difference 169: note = a, c, u, g, unknown, or other
  misc_difference 170: note = a, c, u, g, unknown, or other
  misc_difference 174: note = a, c, u, g, unknown, or other
  misc_difference 175: note = a, c, u, g, unknown, or other
  misc_difference 176: note = a, c, u, g, unknown, or other
  misc_difference 177: note = a, c, u, g, unknown, or other
  misc_difference 178: note = a, c, u, g, unknown, or other
  misc_difference 179: note = a, c, u, g, unknown, or other
  misc_difference 183: note = a, c, u, g, unknown, or other
  misc_difference 184: note = a, c, u, g, unknown, or other
  misc_difference 185: note = a, c, u, g, unknown, or other
  misc_difference 186: note = a, c, u, g, unknown, or other
  misc_difference 187: note = a, c, u, g, unknown, or other
  misc_difference 188: note = a, c, u, g, unknown, or other
  misc_difference 190: note = a, c, u, g, unknown, or other
  misc_difference 191: note = a, c, u, g, unknown, or other
  misc_difference 193: note = a, c, u, g, unknown, or other
  misc_difference 194: note = a, c, u, g, unknown, or other
  misc_difference 197: note = a, c, u, g, unknown, or other
  misc_difference 199: note = a, c, u, g, unknown, or other
  misc_difference 201: note = a, c, u, g, unknown, or other
  misc_difference 203: note = a, c, u, g, unknown, or other
  misc_difference 204: note = a, c, u, g, unknown, or other
  misc_difference 205: note = a, c, u, g, unknown, or other
  misc_difference 209: note = a, c, u, g, unknown, or other
  misc_difference 211: note = a, c, u, g, unknown, or other
  misc_difference 212: note = a, c, u, g, unknown, or other
  misc_difference 213: note = a, c, u, g, unknown, or other
  misc_difference 214: note = a, c, u, g, unknown, or other
  misc_difference 215: note = a, c, u, g, unknown, or other
  misc_difference 216: note = a, c, u, g, unknown, or other
  misc_difference 217: note = a, c, u, g, unknown, or other
  misc_difference 219: note = a, c, u, g, unknown, or other
  misc_difference 220: note = a, c, u, g, unknown, or other
  misc_difference 222: note = a, c, u, g, unknown, or other
  misc_difference 223: note = a, c, u, g, unknown, or other
  misc_difference 224: note = a, c, u, g, unknown, or other
  misc_difference 225: note = a, c, u, g, unknown, or other
  misc_difference 226: note = a, c, u, g, unknown, or other
  misc_difference 227: note = a, c, u, g, unknown, or other
  misc_difference 228: note = a, c, u, g, unknown, or other
  misc_difference 231: note = a, c, u, g, unknown, or other
  misc_difference 232: note = a, c, u, g, unknown, or other
  misc_difference 233: note = a, c, u, g, unknown, or other
  misc_difference 234: note = a, c, u, g, unknown, or other
  misc_difference 237: note = a, c, u, g, unknown, or other
  misc_difference 238: note = a, c, u, g, unknown, or other
  misc_difference 240: note = a, c, u, g, unknown, or other
  misc_difference 241: note = a, c, u, g, unknown, or other
  misc_difference 242: note = a, c, u, g, unknown, or other
  misc_difference 243: note = a, c, u, g, unknown, or other
  misc_difference 244: note = a, c, u, g, unknown, or other
  misc_difference 251: note = a, c, u, g, unknown, or other
  misc_difference 253: note = a, c, u, g, unknown, or other
  misc_difference 254: note = a, c, u, g, unknown, or other
  misc_difference 258: note = a, c, u, g, unknown, or other
  misc_difference 259: note = a, c, u, g, unknown, or other
  misc_difference 262: note = a, c, u, g, unknown, or other
  misc_difference 263: note = a, c, u, g, unknown, or other
  misc_difference 264: note = a, c, u, g, unknown, or other
rrnragcnnggnnagtcrgnnnnrannnyynccrtnagggcanngacccngynnrrgagcanrncygacnyccacyyyntggryaggyrgracgaaggaattnrggrcrnngayccngnnagayatgggaggntnrcyrccrrrgnnnrngtggrnnycyrnnngcnrnnayannnnnnraannnnnnrnnrnnyynrntnrnnnyrynynnnnnnnynnannnnnnnrynnnnatnnrnnnnntryyyrnrnnrytnntynnnr

SEQ ID NO: 795330 - RNA, 233 nt, unidentified
  source 1..233: mol_type = unassigned RNA; note = ISMpa1
  misc_difference 3: note = a, c, u, g, unknown, or other
  misc_difference 7: note = a, c, u, g, unknown, or other
  misc_difference 12: note = a, c, u, g, unknown, or other
  misc_difference 13: note = a, c, u, g, unknown, or other
  misc_difference 16: note = a, c, u, g, unknown, or other
  misc_difference 19: note = a, c, u, g, unknown, or other
  misc_difference 20: note = a, c, u, g, unknown, or other
  misc_difference 21: note = a, c, u, g, unknown, or other
  misc_difference 22: note = a, c, u, g, unknown, or other
  misc_difference 23: note = a, c, u, g, unknown, or other
  misc_difference 24: note = a, c, u, g, unknown, or other
  misc_difference 25: note = a, c, u, g, unknown, or other
  misc_difference 26: note = a, c, u, g, unknown, or other
  misc_difference 27: note = a, c, u, g, unknown, or other
  misc_difference 29: note = a, c, u, g, unknown, or other
  misc_difference 31: note = a, c, u, g, unknown, or other
  misc_difference 34: note = a, c, u, g, unknown, or other
  misc_difference 35: note = a, c, u, g, unknown, or other
  misc_difference 41: note = a, c, u, g, unknown, or other
  misc_difference 42: note = a, c, u, g, unknown, or other
  misc_difference 67: note = a, c, u, g, unknown, or other
  misc_difference 69: note = a, c, u, g, unknown, or other
  misc_difference 70: note = a, c, u, g, unknown, or other
  misc_difference 71: note = a, c, u, g, unknown, or other
  misc_difference 72: note = a, c, u, g, unknown, or other
  misc_difference 73: note = a, c, u, g, unknown, or other
  misc_difference 82: note = a, c, u, g, unknown, or other
  misc_difference 84: note = a, c, u, g, unknown, or other
  misc_difference 93: note = a, c, u, g, unknown, or other
  misc_difference 94: note = a, c, u, g, unknown, or other
  misc_difference 95: note = a, c, u, g, unknown, or other
  misc_difference 123: note = a, c, u, g, unknown, or other
  misc_difference 127: note = a, c, u, g, unknown, or other
  misc_difference 133: note = a, c, u, g, unknown, or other
  misc_difference 140: note = a, c, u, g, unknown, or other
  misc_difference 156: note = a, c, u, g, unknown, or other
  misc_difference 195: note = a, c, u, g, unknown, or other
  misc_difference 202: note = a, c, u, g, unknown, or other
  misc_difference 203: note = a, c, u, g, unknown, or other
  misc_difference 204: note = a, c, u, g, unknown, or other
  misc_difference 205: note = a, c, u, g, unknown, or other
  misc_difference 206: note = a, c, u, g, unknown, or other
  misc_difference 207: note = a, c, u, g, unknown, or other
  misc_difference 208: note = a, c, u, g, unknown, or other
  misc_difference 209: note = a, c, u, g, unknown, or other
  misc_difference 210: note = a, c, u, g, unknown, or other
  misc_difference 211: note = a, c, u, g, unknown, or other
  misc_difference 212: note = a, c, u, g, unknown, or other
  misc_difference 213: note = a, c, u, g, unknown, or other
  misc_difference 214: note = a, c, u, g, unknown, or other
  misc_difference 215: note = a, c, u, g, unknown, or other
  misc_difference 218: note = a, c, u, g, unknown, or other
  misc_difference 219: note = a, c, u, g, unknown, or other
  misc_difference 222: note = a, c, u, g, unknown, or other
  misc_difference 223: note = a, c, u, g, unknown, or other
  misc_difference 224: note = a, c, u, g, unknown, or other
  misc_difference 227: note = a, c, u, g, unknown, or other
  misc_difference 230: note = a, c, u, g, unknown, or other
  misc_difference 232: note = a, c, u, g, unknown, or other
ggnryynaycrnnyynyynnnnnnnnnrngnrannytgrtnnyygagccgcyggycggtgagcactnynnnnnycygrrryntngayyyctrnnnyyagaycgtgccccggcyggtyggtrrngrynrccyrnagcgctnrtgggrtgtcgtgccnyygagcactgatccattaggycgcygcygggygyccyynggctcrnnnnnnnnnnnnnnyrnnyrnnngrngrnrnr

SEQ ID NO: 795331 - RNA, 272 nt, unidentified
  source 1..272: mol_type = unassigned RNA; note = ISSfr2
  misc_difference 2: note = a, c, u, g, unknown, or other
  misc_difference 4: note = a, c, u, g, unknown, or other
  misc_difference 5: note = a, c, u, g, unknown, or other
  misc_difference 9: note = a, c, u, g, unknown, or other
  misc_difference 10: note = a, c, u, g, unknown, or other
  misc_difference 11: note = a, c, u, g, unknown, or other
  misc_difference 12: note = a, c, u, g, unknown, or other
  misc_difference 13: note = a, c, u, g, unknown, or other
  misc_difference 14: note = a, c, u, g, unknown, or other
  misc_difference 15: note = a, c, u, g, unknown, or other
  misc_difference 16: note = a, c, u, g, unknown, or other
  misc_difference 17: note = a, c, u, g, unknown, or other
  misc_difference 18: note = a, c, u, g, unknown, or other
  misc_difference 19: note = a, c, u, g, unknown, or other
  misc_difference 20: note = a, c, u, g, unknown, or other
  misc_difference 21: note = a, c, u, g, unknown, or other
  misc_difference 22: note = a, c, u, g, unknown, or other
  misc_difference 23: note = a, c, u, g, unknown, or other
  misc_difference 24: note = a, c, u, g, unknown, or other
  misc_difference 25: note = a, c, u, g, unknown, or other
  misc_difference 26: note = a, c, u, g, unknown, or other
  misc_difference 27: note = a, c, u, g, unknown, or other
  misc_difference 29: note = a, c, u, g, unknown, or other
  misc_difference 30: note = a, c, u, g, unknown, or other
  misc_difference 32: note = a, c, u, g, unknown, or other
  misc_difference 33: note = a, c, u, g, unknown, or other
  misc_difference 34: note = a, c, u, g, unknown, or other
  misc_difference 35: note = a, c, u, g, unknown, or other
  misc_difference 36: note = a, c, u, g, unknown, or other
  misc_difference 37: note = a, c, u, g, unknown, or other
  misc_difference 38: note = a, c, u, g, unknown, or other
  misc_difference 39: note = a, c, u, g, unknown, or other
  misc_difference 40: note = a, c, u, g, unknown, or other
  misc_difference 41: note = a, c, u, g, unknown, or other
  misc_difference 42: note = a, c, u, g, unknown, or other
  misc_difference 43: note = a, c, u, g, unknown, or other
  misc_difference 44: note = a, c, u, g, unknown, or other
  misc_difference 45: note = a, c, u, g, unknown, or other
  misc_difference 46: note = a, c, u, g, unknown, or other
  misc_difference 47: note = a, c, u, g, unknown, or other
  misc_difference 48: note = a, c, u, g, unknown, or other
  misc_difference 51: note = a, c, u, g, unknown, or other
  misc_difference 52: note = a, c, u, g, unknown, or other
  misc_difference 54: note = a, c, u, g, unknown, or other
  misc_difference 57: note = a, c, u, g, unknown, or other
  misc_difference 58: note = a, c, u, g, unknown, or other
  misc_difference 61: note = a, c, u, g, unknown, or other
  misc_difference 73: note = a, c, u, g, unknown, or other
  misc_difference 77: note = a, c, u, g, unknown, or other
  misc_difference 82: note = a, c, u, g, unknown, or other
  misc_difference 95: note = a, c, u, g, unknown, or other
  misc_difference 96: note = a, c, u, g, unknown, or other
  misc_difference 97: note = a, c, u, g, unknown, or other
  misc_difference 98: note = a, c, u, g, unknown, or other
  misc_difference 100: note = a, c, u, g, unknown, or other
  misc_difference 103: note = a, c, u, g, unknown, or other
  misc_difference 104: note = a, c, u, g, unknown, or other
  misc_difference 105: note = a, c, u, g, unknown, or other
  misc_difference 112: note = a, c, u, g, unknown, or other
  misc_difference 114: note = a, c, u, g, unknown, or other
  misc_difference 115: note = a, c, u, g, unknown, or other
  misc_difference 116: note = a, c, u, g, unknown, or other
  misc_difference 117: note = a, c, u, g, unknown, or other
  misc_difference 118: note = a, c, u, g, unknown, or other
  misc_difference 127: note = a, c, u, g, unknown, or other
  misc_difference 129: note = a, c, u, g, unknown, or other
  misc_difference 130: note = a, c, u, g, unknown, or other
  misc_difference 131: note = a, c, u, g, unknown, or other
  misc_difference 137: note = a, c, u, g, unknown, or other
  misc_difference 138: note = a, c, u, g, unknown, or other
  misc_difference 151: note = a, c, u, g, unknown, or other
  misc_difference 156: note = a, c, u, g, unknown, or other
  misc_difference 158: note = a, c, u, g, unknown, or other
  misc_difference 159: note = a, c, u, g, unknown, or other
  misc_difference 160: note = a, c, u, g, unknown, or other
  misc_difference 161: note = a, c, u, g, unknown, or other
  misc_difference 167: note = a, c, u, g, unknown, or other
  misc_difference 168: note = a, c, u, g, unknown, or other
  misc_difference 174: note = a, c, u, g, unknown, or other
  misc_difference 175: note = a, c, u, g, unknown, or other
  misc_difference 189: note = a, c, u, g, unknown, or other
  misc_difference 195: note = a, c, u, g, unknown, or other
  misc_difference 198: note = a, c, u, g, unknown, or other
  misc_difference 206: note = a, c, u, g, unknown, or other
  misc_difference 212: note = a, c, u, g, unknown, or other
  misc_difference 213: note = a, c, u, g, unknown, or other
  misc_difference 214: note = a, c, u, g, unknown, or other
  misc_difference 215: note = a, c, u, g, unknown, or other
  misc_difference 220: note = a, c, u, g, unknown, or other
  misc_difference 228: note = a, c, u, g, unknown, or other
  misc_difference 232: note = a, c, u, g, unknown, or other
  misc_difference 235: note = a, c, u, g, unknown, or other
  misc_difference 236: note = a, c, u, g, unknown, or other
  misc_difference 239: note = a, c, u, g, unknown, or other
  misc_difference 241: note = a, c, u, g, unknown, or other
  misc_difference 243: note = a, c, u, g, unknown, or other
  misc_difference 244: note = a, c, u, g, unknown, or other
  misc_difference 245: note = a, c, u, g, unknown, or other
  misc_difference 246: note = a, c, u, g, unknown, or other
  misc_difference 247: note = a, c, u, g, unknown, or other
  misc_difference 248: note = a, c, u, g, unknown, or other
  misc_difference 249: note = a, c, u, g, unknown, or other
  misc_difference 250: note = a, c, u, g, unknown, or other
  misc_difference 251: note = a, c, u, g, unknown, or other
  misc_difference 252: note = a, c, u, g, unknown, or other
  misc_difference 254: note = a, c, u, g, unknown, or other
  misc_difference 255: note = a, c, u, g, unknown, or other
  misc_difference 256: note = a, c, u, g, unknown, or other
  misc_difference 258: note = a, c, u, g, unknown, or other
  misc_difference 260: note = a, c, u, g, unknown, or other
  misc_difference 261: note = a, c, u, g, unknown, or other
  misc_difference 262: note = a, c, u, g, unknown, or other
  misc_difference 263: note = a, c, u, g, unknown, or other
  misc_difference 264: note = a, c, u, g, unknown, or other
  misc_difference 268: note = a, c, u, g, unknown, or other
  misc_difference 270: note = a, c, u, g, unknown, or other
  misc_difference 271: note = a, c, u, g, unknown, or other
  misc_difference 272: note = a, c, u, g, unknown, or other
ynrnntrannnnnnnnnnnnnnnnnnnrnnrnnnnnnnnnnnnnnnnnyrnnrnygnncrnrgcyggrggcrngrynryggnrgrgaaycctcgnnnnynyynnnrgcyggnynnnnnccgaygcyngnnnytaganngaggyrgcyccrngacgnannnnyggtynngcggtnnycracccgcgyatnrgagyntgntcraccgncgtyynnnnrryynygycyccnrcynygnncrnynrnnnnnnnnnnynnnyngnnnnnrrcnrnnn

SEQ ID NO: 795332 - RNA, 196 nt, unidentified
  source 1..196: mol_type = unassigned RNA; note = ISPye19
  misc_difference 1: note = a, c, u, g, unknown, or other
  misc_difference 2: note = a, c, u, g, unknown, or other
  misc_difference 3: note = a, c, u, g, unknown, or other
  misc_difference 5: note = a, c, u, g, unknown, or other
  misc_difference 7: note = a, c, u, g, unknown, or other
  misc_difference 11: note = a, c, u, g, unknown, or other
  misc_difference 14: note = a, c, u, g, unknown, or other
  misc_difference 18: note = a, c, u, g, unknown, or other
  misc_difference 47: note = a, c, u, g, unknown, or other
  misc_difference 48: note = a, c, u, g, unknown, or other
  misc_difference 49: note = a, c, u, g, unknown, or other
  misc_difference 50: note = a, c, u, g, unknown, or other
  misc_difference 51: note = a, c, u, g, unknown, or other
  misc_difference 66: note = a, c, u, g, unknown, or other
  misc_difference 67: note = a, c, u, g, unknown, or other
  misc_difference 68: note = a, c, u, g, unknown, or other
  misc_difference 69: note = a, c, u, g, unknown, or other
  misc_difference 70: note = a, c, u, g, unknown, or other
  misc_difference 81: note = a, c, u, g, unknown, or other
  misc_difference 83: note = a, c, u, g, unknown, or other
  misc_difference 89: note = a, c, u, g, unknown, or other
  misc_difference 90: note = a, c, u, g, unknown, or other
  misc_difference 103: note = a, c, u, g, unknown, or other
  misc_difference 109: note = a, c, u, g, unknown, or other
  misc_difference 127: note = a, c, u, g, unknown, or other
  misc_difference 141: note = a, c, u, g, unknown, or other
  misc_difference 147: note = a, c, u, g, unknown, or other
  misc_difference 150: note = a, c, u, g, unknown, or other
  misc_difference 163: note = a, c, u, g, unknown, or other
  misc_difference 164: note = a, c, u, g, unknown, or other
  misc_difference 165: note = a, c, u, g, unknown, or other
  misc_difference 166: note = a, c, u, g, unknown, or other
  misc_difference 167: note = a, c, u, g, unknown, or other
  misc_difference 179: note = a, c, u, g, unknown, or other
  misc_difference 183: note = a, c, u, g, unknown, or other
  misc_difference 186: note = a, c, u, g, unknown, or other
  misc_difference 192: note = a, c, u, g, unknown, or other
  misc_difference 193: note = a, c, u, g, unknown, or other
  misc_difference 196: note = a, c, u, g, unknown, or other
nnnyngnygyncrnrgcnggrggcrgrrcrcggyggggaaycctcgnnnnnyrytrtgrgcygrynnnnnycgaygcycgnynyyaganngaggcagccccrngacgrnrycryggtcrtgcggtrnccaacccgcgyatnagagyntgntcraccgycgtcnnnnngyyyygycyccngcynygnrcryynnyrn

SEQ ID NO: 795333 - RNA, 234 nt, unidentified
  source 1..234: mol_type = unassigned RNA; note = ISSso1
  misc_difference 4: note = a, c, u, g, unknown, or other
  misc_difference 21: note = a, c, u, g, unknown, or other
  misc_difference 22: note = a, c, u, g, unknown, or other
  misc_difference 27: note = a, c, u, g, unknown, or other
  misc_difference 31: note = a, c, u, g, unknown, or other
  misc_difference 33: note = a, c, u, g, unknown, or other
  misc_difference 42: note = a, c, u, g, unknown, or other
  misc_difference 43: note = a, c, u, g, unknown, or other
  misc_difference 51: note = a, c, u, g, unknown, or other
  misc_difference 58: note = a, c, u, g, unknown, or other
  misc_difference 77: note = a, c, u, g, unknown, or other
  misc_difference 78: note = a, c, u, g, unknown, or other
  misc_difference 79: note = a, c, u, g, unknown, or other
  misc_difference 80: note = a, c, u, g, unknown, or other
  misc_difference 81: note = a, c, u, g, unknown, or other
  misc_difference 82: note = a, c, u, g, unknown, or other
  misc_difference 84: note = a, c, u, g, unknown, or other
  misc_difference 91: note = a, c, u, g, unknown, or other
  misc_difference 100: note = a, c, u, g, unknown, or other
  misc_difference 101: note = a, c, u, g, unknown, or other
  misc_difference 104: note = a, c, u, g, unknown, or other
  misc_difference 129: note = a, c, u, g, unknown, or other
  misc_difference 133: note = a, c, u, g, unknown, or other
  misc_difference 140: note = a, c, u, g, unknown, or other
  misc_difference 145: note = a, c, u, g, unknown, or other
  misc_difference 146: note = a, c, u, g, unknown, or other
  misc_difference 147: note = a, c, u, g, unknown, or other
  misc_difference 148: note = a, c, u, g, unknown, or other
  misc_difference 150: note = a, c, u, g, unknown, or other
  misc_difference 152: note = a, c, u, g, unknown, or other
  misc_difference 160: note = a, c, u, g, unknown, or other
  misc_difference 184: note = a, c, u, g, unknown, or other
  misc_difference 185: note = a, c, u, g, unknown, or other
  misc_difference 192: note = a, c, u, g, unknown, or other
  misc_difference 197: note = a, c, u, g, unknown, or other
  misc_difference 198: note = a, c, u, g, unknown, or other
  misc_difference 201: note = a, c, u, g, unknown, or other
  misc_difference 202: note = a, c, u, g, unknown, or other
  misc_difference 203: note = a, c, u, g, unknown, or other
  misc_difference 207: note = a, c, u, g, unknown, or other
  misc_difference 209: note = a, c, u, g, unknown, or other
  misc_difference 212: note = a, c, u, g, unknown, or other
  misc_difference 219: note = a, c, u, g, unknown, or other
  misc_difference 224: note = a, c, u, g, unknown, or other
ygrnaygyyraaaggttgcrnnggyrnyyrnrngtgatgrcnnracaggtnrgaccgngacyyrcyaarcctgratnnnnnnyngrgcyynragcycgynnrrnraatraggygygrgtcagcgraytncatnrrggccngcagnnnnynrnctgcaaynaggccgratatararctgcarcynnycygtynrycrnnrcnnnrrrnrnyynygcaaangggangcgtycatay

SEQ ID NO: 795334 - RNA, 172 nt, unidentified
  source 1..172: mol_type = unassigned RNA; note = ISStma7
  misc_difference 1: note = a, c, u, g, unknown, or other
  misc_difference 2: note = a, c, u, g, unknown, or other
  misc_difference 3: note = a, c, u, g, unknown, or other
  misc_difference 4: note = a, c, u, g, unknown, or other
  misc_difference 5: note = a, c, u, g, unknown, or other
  misc_difference 6: note = a, c, u, g, unknown, or other
  misc_difference 9: note = a, c, u, g, unknown, or other
  misc_difference 10: note = a, c, u, g, unknown, or other
  misc_difference 12: note = a, c, u, g, unknown, or other
  misc_difference 13: note = a, c, u, g, unknown, or other
  misc_difference 14: note = a, c, u, g, unknown, or other
  misc_difference 15: note = a, c, u, g, unknown, or other
  misc_difference 16: note = a, c, u, g, unknown, or other
  misc_difference 17: note = a, c, u, g, unknown, or other
  misc_difference 20: note = a, c, u, g, unknown, or other
  misc_difference 25: note = a, c, u, g, unknown, or other
  misc_difference 26: note = a, c, u, g, unknown, or other
  misc_difference 28: note = a, c, u, g, unknown, or other
  misc_difference 32: note = a, c, u, g, unknown, or other
  misc_difference 33: note = a, c, u, g, unknown, or other
  misc_difference 34: note = a, c, u, g, unknown, or other
  misc_difference 35: note = a, c, u, g, unknown, or other
  misc_difference 36: note = a, c, u, g, unknown, or other
  misc_difference 37: note = a, c, u, g, unknown, or other
  misc_difference 40: note = a, c, u, g, unknown, or other
  misc_difference 41: note = a, c, u, g, unknown, or other
  misc_difference 46: note = a, c, u, g, unknown, or other
  misc_difference 47: note = a, c, u, g, unknown, or other
  misc_difference 48: note = a, c, u, g, unknown, or other
  misc_difference 50: note = a, c, u, g, unknown, or other
  misc_difference 57: note = a, c, u, g, unknown, or other
  misc_difference 58: note = a, c, u, g, unknown, or other
  misc_difference 59: note = a, c, u, g, unknown, or other
  misc_difference 60: note = a, c, u, g, unknown, or other
  misc_difference 61: note = a, c, u, g, unknown, or other
  misc_difference 65: note = a, c, u, g, unknown, or other
  misc_difference 66: note = a, c, u, g, unknown, or other
  misc_difference 69: note = a, c, u, g, unknown, or other
  misc_difference 71: note = a, c, u, g, unknown, or other
  misc_difference 79: note = a, c, u, g, unknown, or other
  misc_difference 80: note = a, c, u, g, unknown, or other
  misc_difference 84: note = a, c, u, g, unknown, or other
  misc_difference 86: note = a, c, u, g, unknown, or other
  misc_difference 87: note = a, c, u, g, unknown, or other
  misc_difference 88: note = a, c, u, g, unknown, or other
  misc_difference 89: note = a, c, u, g, unknown, or other
  misc_difference 91: note = a, c, u, g, unknown, or other
  misc_difference 106: note = a, c, u, g, unknown, or other
  misc_difference 107: note = a, c, u, g, unknown, or other
  misc_difference 112: note = a, c, u, g, unknown, or other
  misc_difference 113: note = a, c, u, g, unknown, or other
  misc_difference 115: note = a, c, u, g, unknown, or other
  misc_difference 121: note = a, c, u, g, unknown, or other
  misc_difference 124: note = a, c, u, g, unknown, or other
  misc_difference 125: note = a, c, u, g, unknown, or other
  misc_difference 132: note = a, c, u, g, unknown, or other
  misc_difference 133: note = a, c, u, g, unknown, or other
  misc_difference 138: note = a, c, u, g, unknown, or other
  misc_difference 139: note = a, c, u, g, unknown, or other
  misc_difference 140: note = a, c, u, g, unknown, or other
  misc_difference 141: note = a, c, u, g, unknown, or other
  misc_difference 142: note = a, c, u, g, unknown, or other
  misc_difference 144: note = a, c, u, g, unknown, or other
  misc_difference 145: note = a, c, u, g, unknown, or other
  misc_difference 148: note = a, c, u, g, unknown, or other
  misc_difference 149: note = a, c, u, g, unknown, or other
  misc_difference 150: note = a, c, u, g, unknown, or other
  misc_difference 151: note = a, c, u, g, unknown, or other
  misc_difference 152: note = a, c, u, g, unknown, or other
  misc_difference 153: note = a, c, u, g, unknown, or other
  misc_difference 158: note = a, c, u, g, unknown, or other
  misc_difference 159: note = a, c, u, g, unknown, or other
  misc_difference 160: note = a, c, u, g, unknown, or other
  misc_difference 161: note = a, c, u, g, unknown, or other
  misc_difference 164: note = a, c, u, g, unknown, or other
  misc_difference 165: note = a, c, u, g, unknown, or other
  misc_difference 166: note = a, c, u, g, unknown, or other
  misc_difference 167: note = a, c, u, g, unknown, or other
  misc_difference 168: note = a, c, u, g, unknown, or other
  misc_difference 169: note = a, c, u, g, unknown, or other
  misc_difference 170: note = a, c, u, g, unknown, or other
  misc_difference 171: note = a, c, u, g, unknown, or other
  misc_difference 172: note = a, c, u, g, unknown, or other
nnnnnnrynnrnnnnnnrrnrygrnngnycgnnnnnnyynnggyynnnrngrccgynnnnnagcnnggncnycryryynnyyynynnnnrnrcccgaacagttgcnngrrynnrngyycgnaynnryaagrnngggynnnnnrnnrrnnnnnnygrynnnnyrnnnnnnnnn

SEQ ID NO: 795335 - RNA, 279 nt, unidentified
  source 1..279: mol_type = unassigned RNA; note = ISMdi12
  misc_difference 1: note = a, c, u, g, unknown, or other
  misc_difference 5: note = a, c, u, g, unknown, or other
  misc_difference 9: note = a, c, u, g, unknown, or other
  misc_difference 11: note = a, c, u, g, unknown, or other
  misc_difference 12: note = a, c, u, g, unknown, or other
  misc_difference 13: note = a, c, u, g, unknown, or other
  misc_difference 15: note = a, c, u, g, unknown, or other
  misc_difference 16: note = a, c, u, g, unknown, or other
  misc_difference 17: note = a, c, u, g, unknown, or other
  misc_difference 18: note = a, c, u, g, unknown, or other
  misc_difference 21: note = a, c, u, g, unknown, or other
  misc_difference 24: note = a, c, u, g, unknown, or other
  misc_difference 28: note = a, c, u, g, unknown, or other
  misc_difference 29: note = a, c, u, g, unknown, or other
  misc_difference 30: note = a, c, u, g, unknown, or other
  misc_difference 33: note = a, c, u, g, unknown, or other
  misc_difference 34: note = a, c, u, g, unknown, or other
  misc_difference 35: note = a, c, u, g, unknown, or other
  misc_difference 36: note = a, c, u, g, unknown, or other
  misc_difference 37: note = a, c, u, g, unknown, or other
  misc_difference 39: note = a, c, u, g, unknown, or other
  misc_difference 40: note = a, c, u, g, unknown, or other
  misc_difference 41: note = a, c, u, g, unknown, or other
  misc_difference 42: note = a, c, u, g, unknown, or other
  misc_difference 43: note = a, c, u, g, unknown, or other
  misc_difference 45: note = a, c, u, g, unknown, or other
  misc_difference 48: note = a, c, u, g, unknown, or other
  misc_difference 49: note = a, c, u, g, unknown, or other
  misc_difference 50: note = a, c, u, g, unknown, or other
  misc_difference 57: note = a, c, u, g, unknown, or other
  misc_difference 69: note = a, c, u, g, unknown, or other
  misc_difference 72: note = a, c, u, g, unknown, or other
  misc_difference 73: note = a, c, u, g, unknown, or other
  misc_difference 77: note = a, c, u, g, unknown, or other
  misc_difference 78: note = a, c, u, g, unknown, or other
  misc_difference 96: note = a, c, u, g, unknown, or other
  misc_difference 98: note = a, c, u, g, unknown, or other
  misc_difference 102: note = a, c, u, g, unknown, or other
  misc_difference 104: note = a, c, u, g, unknown, or other
  misc_difference 113: note = a, c, u, g, unknown, or other
  misc_difference 116: note = a, c, u, g, unknown, or other
  misc_difference 117: note = a, c, u, g, unknown, or other
  misc_difference 120: note = a, c, u, g, unknown, or other
  misc_difference 121: note = a, c, u, g, unknown, or other
  misc_difference 122: note = a, c, u, g, unknown, or other
  misc_difference 123: note = a, c, u, g, unknown, or other
  misc_difference 124: note = a, c, u, g, unknown, or other
  misc_difference 125: note = a, c, u, g, unknown, or other
  misc_difference 126: note = a, c, u, g, unknown, or other
  misc_difference 127: note = a, c, u, g, unknown, or other
  misc_difference 129: note = a, c, u, g, unknown, or other
  misc_difference 130: note = a, c, u, g, unknown, or other
  misc_difference 131: note = a, c, u, g, unknown, or other
  misc_difference 137: note = a, c, u, g, unknown, or other
  misc_difference 138: note = a, c, u, g, unknown, or other
  misc_difference 146: note = a, c, u, g, unknown, or other
  misc_difference 147: note = a, c, u, g, unknown, or other
  misc_difference 148: note = a, c, u, g, unknown, or other
  misc_difference 149: note = a, c, u, g, unknown, or other
  misc_difference 150: note = a, c, u, g, unknown, or other
  misc_difference 151: note = a, c, u, g, unknown, or other
  misc_difference 159: note = a, c, u, g, unknown, or other
  misc_difference 160: note = a, c, u, g, unknown, or other
  misc_difference 163: note = a, c, u, g, unknown, or other
  misc_difference 174: note = a, c, u, g, unknown, or other
  misc_difference 176: note = a, c, u, g, unknown, or other
  misc_difference 183: note = a, c, u, g, unknown, or other
  misc_difference 188: note = a, c, u, g, unknown, or other
  misc_difference 195: note = a, c, u, g, unknown, or other
  misc_difference 197: note = a, c, u, g, unknown, or other
  misc_difference 198: note = a, c, u, g, unknown, or other
  misc_difference 199: note = a, c, u, g, unknown, or other
  misc_difference 201: note = a, c, u, g, unknown, or other
  misc_difference 202: note = a, c, u, g, unknown, or other
  misc_difference 209: note = a, c, u, g, unknown, or other
  misc_difference 210: note = a, c, u, g, unknown, or other
  misc_difference 211: note = a, c, u, g, unknown, or other
  misc_difference 212: note = a, c, u, g, unknown, or other
  misc_difference 219: note = a, c, u, g, unknown, or other
  misc_difference 249: note = a, c, u, g, unknown, or other
  misc_difference 250: note = a, c, u, g, unknown, or other
  misc_difference 252: note = a, c, u, g, unknown, or other
  misc_difference 259: note = a, c, u, g, unknown, or other
  misc_difference 261: note = a, c, u, g, unknown, or other
  misc_difference 262: note = a, c, u, g, unknown, or other
  misc_difference 263: note = a, c, u, g, unknown, or other
  misc_difference 264: note = a, c, u, g, unknown, or other
  misc_difference 265: note = a, c, u, g, unknown, or other
  misc_difference 266: note = a, c, u, g, unknown, or other
  misc_difference 274: note = a, c, u, g, unknown, or other
  misc_difference 275: note = a, c, u, g, unknown, or other
  misc_difference 276: note = a, c, u, g, unknown, or other
  misc_difference 277: note = a, c, u, g, unknown, or other
ngrrnyccnrnnnynnnnryngyntrannnrynnnnnrnnnnnynggnnngycrrrnrtgtgagraggncrnngrrnngtarggrcrraygrtcrnynagancnggrycrggnranncannnnnnnncnnngrgcynnragcycgnnnnnnygatytgnnccngrycygcgyancnccatacnggccngcggcrnrnnnrnngccgcannnnraggccngayacaygayygcaycygatcrcrygyycnnrnygyyyrnrnnnnnncttgcrynnnnrg

SEQ ID NO: 795336 - RNA, 205 nt, unidentified
  source 1..205: mol_type = unassigned RNA; note = ISSod14
  misc_difference 2: note = a, c, u, g, unknown, or other
  misc_difference 3: note = a, c, u, g, unknown, or other
  misc_difference 4: note = a, c, u, g, unknown, or other
  misc_difference 5: note = a, c, u, g, unknown, or other
  misc_difference 7: note = a, c, u, g, unknown, or other
  misc_difference 8: note = a, c, u, g, unknown, or other
  misc_difference 9: note = a, c, u, g, unknown, or other
  misc_difference 10: note = a, c, u, g, unknown, or other
  misc_difference 14: note = a, c, u, g, unknown, or other
  misc_difference 15: note = a, c, u, g, unknown, or other
  misc_difference 16: note = a, c, u, g, unknown, or other
  misc_difference 17: note = a, c, u, g, unknown, or other
  misc_difference 18: note = a, c, u, g, unknown, or other
  misc_difference 19: note = a, c, u, g, unknown, or other
  misc_difference 20: note = a, c, u, g, unknown, or other
  misc_difference 23: note = a, c, u, g, unknown, or other
  misc_difference 30: note = a, c, u, g, unknown, or other
  misc_difference 31: note = a, c, u, g, unknown, or other
  misc_difference 32: note = a, c, u, g, unknown, or other
  misc_difference 35: note = a, c, u, g, unknown, or other
  misc_difference 36: note = a, c, u, g, unknown, or other
  misc_difference 40: note = a, c, u, g, unknown, or other
  misc_difference 41: note = a, c, u, g, unknown, or other
  misc_difference 42: note = a, c, u, g, unknown, or other
  misc_difference 46: note = a, c, u, g, unknown, or other
  misc_difference 48: note = a, c, u, g, unknown, or other
  misc_difference 50: note = a, c, u, g, unknown, or other
  misc_difference 51: note = a, c, u, g, unknown, or other
  misc_difference 52: note = a, c, u, g, unknown, or other
  misc_difference 53: note = a, c, u, g, unknown, or other
  misc_difference 62: note = a, c, u, g, unknown, or other
  misc_difference 63: note = a, c, u, g, unknown, or other
  misc_difference 64: note = a, c, u, g, unknown, or other
  misc_difference 65: note = a, c, u, g, unknown, or other
  misc_difference 67: note = a, c, u, g, unknown, or other
  misc_difference 68: note = a, c, u, g, unknown, or other
  misc_difference 70: note = a, c, u, g, unknown, or other
  misc_difference 71: note = a, c, u, g, unknown, or other
  misc_difference 72: note = a, c, u, g, unknown, or other
  misc_difference 77: note = a, c, u, g, unknown, or other
  misc_difference 79: note = a, c, u, g, unknown, or other
  misc_difference 87: note = a, c, u, g, unknown, or other
  misc_difference 88: note = a, c, u, g, unknown, or other
  misc_difference 89: note = a, c, u, g, unknown, or other
  misc_difference 90: note = a, c, u, g, unknown, or other
  misc_difference 91: note = a, c, u, g, unknown, or other
  misc_difference 92: note = a, c, u, g, unknown, or other
  misc_difference 95: note = a, c, u, g, unknown, or other
  misc_difference 96: note = a, c, u, g, unknown, or other
  misc_difference 97: note = a, c, u, g, unknown, or other
  misc_difference 101: note = a, c, u, g, unknown, or other
  misc_difference 102: note = a, c, u, g, unknown, or other
  misc_difference 103: note = a, c, u, g, unknown, or other
  misc_difference 104: note = a, c, u, g, unknown, or other
  misc_difference 105: note = a, c, u, g, unknown, or other
  misc_difference 107: note = a, c, u, g, unknown, or other
  misc_difference 109: note = a, c, u, g, unknown, or other
  misc_difference 110: note = a, c, u, g, unknown, or other
  misc_difference 123: note = a, c, u, g, unknown, or other
  misc_difference 127: note = a, c, u, g, unknown, or other
  misc_difference 128: note = a, c, u, g, unknown, or other
  misc_difference 131: note = a, c, u, g, unknown, or other
  misc_difference 132: note = a, c, u, g, unknown, or other
  misc_difference 133: note = a, c, u, g, unknown, or other
  misc_difference 134: note = a, c, u, g, unknown, or other
  misc_difference 135: note = a, c, u, g, unknown, or other
  misc_difference 136: note = a, c, u, g, unknown, or other
  misc_difference 137: note = a, c, u, g, unknown, or other
  misc_difference 138: note = a, c, u, g, unknown, or other
  misc_difference 139: note = a, c, u, g, unknown, or other
  misc_difference 140: note = a, c, u, g, unknown, or other
  misc_difference 144: note = a, c, u, g, unknown, or other
  misc_difference 145: note = a, c, u, g, unknown, or other
  misc_difference 146: note = a, c, u, g, unknown, or other
  misc_difference 147: note = a, c, u, g, unknown, or other
  misc_difference 148: note = a, c, u, g, unknown, or other
  misc_difference 150: note = a, c, u, g, unknown, or other
  misc_difference 163: note = a, c, u, g, unknown, or other
  misc_difference 164: note = a, c, u, g, unknown, or other
  misc_difference 165: note = a, c, u, g, unknown, or other
  misc_difference 167: note = a, c, u, g, unknown, or other
  misc_difference 173: note = a, c, u, g, unknown, or other
  misc_difference 174: note = a, c, u, g, unknown, or other
  misc_difference 175: note = a, c, u, g, unknown, or other
  misc_difference 178: note = a, c, u, g, unknown, or other
  misc_difference 179: note = a, c, u, g, unknown, or other
  misc_difference 183: note = a, c, u, g, unknown, or other
  misc_difference 184: note = a, c, u, g, unknown, or other
  misc_difference 185: note = a, c, u, g, unknown, or other
  misc_difference 186: note = a, c, u, g, unknown, or other
  misc_difference 187: note = a, c, u, g, unknown, or other
  misc_difference 188: note = a, c, u, g, unknown, or other
  misc_difference 190: note = a, c, u, g, unknown, or other
  misc_difference 191: note = a, c, u, g, unknown, or other
  misc_difference 192: note = a, c, u, g, unknown, or other
  misc_difference 193: note = a, c, u, g, unknown, or other
  misc_difference 194: note = a, c, u, g, unknown, or other
  misc_difference 195: note = a, c, u, g, unknown, or other
  misc_difference 196: note = a, c, u, g, unknown, or other
  misc_difference 198: note = a, c, u, g, unknown, or other
  misc_difference 200: note = a, c, u, g, unknown, or other
  misc_difference 201: note = a, c, u, g, unknown, or other
  misc_difference 202: note = a, c, u, g, unknown, or other
  misc_difference 203: note = a, c, u, g, unknown, or other
  misc_difference 204: note = a, c, u, g, unknown, or other
  misc_difference 205: note = a, c, u, g, unknown, or other
ynnnnynnnnrgynnnnnnnyrnygatgrnnnrannggtnnnyyrncnynnnnrrarcctgnnnnrnncnnnggyynynrarrycrnnnnnnygnnnaggnnnnnrngnnygratyycatyanggcnnrrnnnnnnnnnnyyannnnnangccgratataygnnnrnrrycrnnnyynnyyrnnnnnnrnnnnnnnynrnnnnnn

SEQ ID NO: 795337 - RNA, 167 nt, unidentified
  source 1..167: mol_type = unassigned RNA; note = ISSm3
  misc_difference 1: note = a, c, u, g, unknown, or other
  misc_difference 2: note = a, c, u, g, unknown, or other
  misc_difference 3: note = a, c, u, g, unknown, or other
  misc_difference 4: note = a, c, u, g, unknown, or other
  misc_difference 5: note = a, c, u, g, unknown, or other
  misc_difference 6: note = a, c, u, g, unknown, or other
  misc_difference 7: note = a, c, u, g, unknown, or other
  misc_difference 13: note = a, c, u, g, unknown, or other
  misc_difference 15: note = a, c, u, g, unknown, or other
  misc_difference 16: note = a, c, u, g, unknown, or other
  misc_difference 18: note = a, c, u, g, unknown, or other
  misc_difference 19: note = a, c, u, g, unknown, or other
  misc_difference 31: note = a, c, u, g, unknown, or other
  misc_difference 32: note = a, c, u, g, unknown, or other
  misc_difference 33: note = a, c, u, g, unknown, or other
  misc_difference 34: note = a, c, u, g, unknown, or other
  misc_difference 35: note = a, c, u, g, unknown, or other
  misc_difference 36: note = a, c, u, g, unknown, or other
  misc_difference 39: note = a, c, u, g, unknown, or other
  misc_difference 40: note = a, c, u, g, unknown, or other
  misc_difference 46: note = a, c, u, g, unknown, or other
  misc_difference 47: note = a, c, u, g, unknown, or other
  misc_difference 48: note = a, c, u, g, unknown, or other
  misc_difference 49: note = a, c, u, g, unknown, or other
  misc_difference 57: note = a, c, u, g, unknown, or other
  misc_difference 58: note = a, c, u, g, unknown, or other
  misc_difference 59: note = a, c, u, g, unknown, or other
  misc_difference 60: note = a, c, u, g, unknown, or other
  misc_difference 61: note = a, c, u, g, unknown, or other
  misc_difference 65: note = a, c, u, g, unknown, or other
  misc_difference 66: note = a, c, u, g, unknown, or other
  misc_difference 67: note = a, c, u, g, unknown, or other
  misc_difference 77: note = a, c, u, g, unknown, or other
  misc_difference 78: note = a, c, u, g, unknown, or other
  misc_difference 80: note = a, c, u, g, unknown, or other
  misc_difference 81: note = a, c, u, g, unknown, or other
  misc_difference 82: note = a, c, u, g, unknown, or other
  misc_difference 90: note = a, c, u, g, unknown, or other
  misc_difference 93: note = a, c, u, g, unknown, or other
  misc_difference 95: note = a, c, u, g, unknown, or other
  misc_difference 112: note = a, c, u, g, unknown, or other
  misc_difference 114: note = a, c, u, g, unknown, or other
  misc_difference 119: note = a, c, u, g, unknown, or other
  misc_difference 121: note = a, c, u, g, unknown, or other
  misc_difference 122: note = a, c, u, g, unknown, or other
  misc_difference 129: note = a, c, u, g, unknown, or other
  misc_difference 130: note = a, c, u, g, unknown, or other
  misc_difference 138: note = a, c, u, g, unknown, or other
  misc_difference 142: note = a, c, u, g, unknown, or other
  misc_difference 145: note = a, c, u, g, unknown, or other
  misc_difference 148: note = a, c, u, g, unknown, or other
  misc_difference 153: note = a, c, u, g, unknown, or other
  misc_difference 158: note = a, c, u, g, unknown, or other
  misc_difference 161: note = a, c, u, g, unknown, or other
  misc_difference 165: note = a, c, u, g, unknown, or other
  misc_difference 167: note = a, c, u, g, unknown, or other
nnnnnnnyyyggnrnngnnyrygyagccygnnnnnncynngggyynnnnagcccgynnnnnagcnnnyrgcgcryrnnynnnrccryycntynrnarcccgaacrgttgyyngnryyynannycgyatnnrcaaggangggnrrnrangrrynygycnranycrnyn

SEQ ID NO: 795338 - RNA, 259 nt, unidentified
  source 1..259: mol_type = unassigned RNA; note = ISMno16
  misc_difference 1: note = a, c, u, g, unknown, or other
  misc_difference 5: note = a, c, u, g, unknown, or other
  misc_difference 11: note = a, c, u, g, unknown, or other
  misc_difference 12: note = a, c, u, g, unknown, or other
  misc_difference 14: note = a, c, u, g, unknown, or other
  misc_difference 18: note = a, c, u, g, unknown, or other
  misc_difference 22: note = a, c, u, g, unknown, or other
  misc_difference 23: note = a, c, u, g, unknown, or other
  misc_difference 24: note = a, c, u, g, unknown, or other
  misc_difference 27: note = a, c, u, g, unknown, or other
  misc_difference 28: note = a, c, u, g, unknown, or other
  misc_difference 29: note = a, c, u, g, unknown, or other
  misc_difference 30: note = a, c, u, g, unknown, or other
  misc_difference 31: note = a, c, u, g, unknown, or other
  misc_difference 34: note = a, c, u, g, unknown, or other
  misc_difference 40: note = a, c, u, g, unknown, or other
  misc_difference 57: note = a, c, u, g, unknown, or other
  misc_difference 58: note = a, c, u, g, unknown, or other
  misc_difference 59: note = a, c, u, g, unknown, or other
  misc_difference 60: note = a, c, u, g, unknown, or other
  misc_difference 73: note = a, c, u, g, unknown, or other
  misc_difference 88: note = a, c, u, g, unknown, or other
  misc_difference 100: note = a, c, u, g, unknown, or other
  misc_difference 105: note = a, c, u, g, unknown, or other
  misc_difference 107: note = a, c, u, g, unknown, or other
  misc_difference 109: note = a, c, u, g, unknown, or other
  misc_difference 114: note = a, c, u, g, unknown, or other
  misc_difference 119: note = a, c, u, g, unknown, or other
  misc_difference 120: note = a, c, u, g, unknown, or other
  misc_difference 121: note = a, c, u, g, unknown, or other
  misc_difference 122: note = a, c, u, g, unknown, or other
  misc_difference 123: note = a, c, u, g, unknown, or other
  misc_difference 124: note = a, c, u, g, unknown, or other
  misc_difference 132: note = a, c, u, g, unknown, or other
  misc_difference 133: note = a, c, u, g, unknown, or other
  misc_difference 134: note = a, c, u, g, unknown, or other
  misc_difference 135: note = a, c, u, g, unknown, or other
  misc_difference 136: note = a, c, u, g, unknown, or other
  misc_difference 176: note = a, c, u, g, unknown, or other
  misc_difference 179: note = a, c, u, g, unknown, or other
  misc_difference 180: note = a, c, u, g, unknown, or other
  misc_difference 181: note = a, c, u, g, unknown, or other
  misc_difference 182: note = a, c, u, g, unknown, or other
  misc_difference 183: note = a, c, u, g, unknown, or other
  misc_difference 193: note = a, c, u, g, unknown, or other
  misc_difference 194: note = a, c, u, g, unknown, or other
  misc_difference 196: note = a, c, u, g, unknown, or other
  misc_difference 212: note = a, c, u, g, unknown, or other
  misc_difference 229: note = a, c, u, g, unknown, or other
  misc_difference 230: note = a, c, u, g, unknown, or other
  misc_difference 231: note = a, c, u, g, unknown, or other
  misc_difference 232: note = a, c, u, g, unknown, or other
  misc_difference 233: note = a, c, u, g, unknown, or other
  misc_difference 234: note = a, c, u, g, unknown, or other
  misc_difference 237: note = a, c, u, g, unknown, or other
  misc_difference 239: note = a, c, u, g, unknown, or other
  misc_difference 240: note = a, c, u, g, unknown, or other
  misc_difference 242: note = a, c, u, g, unknown, or other
  misc_difference 243: note = a, c, u, g, unknown, or other
  misc_difference 244: note = a, c, u, g, unknown, or other
  misc_difference 245: note = a, c, u, g, unknown, or other
  misc_difference 254: note = a, c, u, g, unknown, or other
  misc_difference 255: note = a, c, u, g, unknown, or other
  misc_difference 256: note = a, c, u, g, unknown, or other
nragntcrgcnnrnyrgnrrynnnrcnnnnnyyngcygangccrgarcttgcargrnnnnragyagatggygngatcgatcgatccrngrygygrgayantccgnrnrnyccantggcnnnnnnargycgcnnnnntgttyggarcycrcgycgcggaarccatcttggccagcgntcnnnnnyrrycgcrynnanaggccggacatatgrnygcaagcgatcygatcnnnnnnyynynnrnnnnycttgyrrnnnggg

SEQ ID NO: 795339 - RNA, 370 nt, unidentified
  source 1..370: mol_type = unassigned RNA; note = IS117
  misc_difference 2: note = a, c, u, g, unknown, or other
  misc_difference 4: note = a, c, u, g, unknown, or other
  misc_difference 5: note = a, c, u, g, unknown, or other
  misc_difference 6: note = a, c, u, g, unknown, or other
  misc_difference 8: note = a, c, u, g, unknown, or other
  misc_difference 9: note = a, c, u, g, unknown, or other
  misc_difference 10: note = a, c, u, g, unknown, or other
  misc_difference 12: note = a, c, u, g, unknown, or other
  misc_difference 14: note = a, c, u, g, unknown, or other
  misc_difference 15: note = a, c, u, g, unknown, or other
  misc_difference 16: note = a, c, u, g, unknown, or other
  misc_difference 18: note = a, c, u, g, unknown, or other
  misc_difference 19: note = a, c, u, g, unknown, or other
  misc_difference 21: note = a, c, u, g, unknown, or other
  misc_difference 24: note = a, c, u, g, unknown, or other
  misc_difference 26: note = a, c, u, g, unknown, or other
  misc_difference 27: note = a, c, u, g, unknown, or other
  misc_difference 29: note = a, c, u, g, unknown, or other
  misc_difference 30: note = a, c, u, g, unknown, or other
  misc_difference 31: note = a, c, u, g, unknown, or other
  misc_difference 32: note = a, c, u, g, unknown, or other
  misc_difference 33: note = a, c, u, g, unknown, or other
  misc_difference 35: note = a, c, u, g, unknown, or other
  misc_difference 36: note = a, c, u, g, unknown, or other
  misc_difference 40: note = a, c, u, g, unknown, or other
  misc_difference 41: note = a, c, u, g, unknown, or other
  misc_difference 42: note = a, c, u, g, unknown, or other
  misc_difference 43: note = a, c, u, g, unknown, or other
  misc_difference 44: note = a, c, u, g, unknown, or other
  misc_difference 45: note = a, c, u, g, unknown, or other
  misc_difference 50: note = a, c, u, g, unknown, or other
  misc_difference 51: note = a, c, u, g, unknown, or other
  misc_difference 52: note = a, c, u, g, unknown, or other
  misc_difference 53: note = a, c, u, g, unknown, or other
  misc_difference 54: note = a, c, u, g, unknown, or other
  misc_difference 55: note = a, c, u, g, unknown, or other
  misc_difference 57: note = a, c, u, g, unknown, or other
  misc_difference 58: note = a, c, u, g, unknown, or other
  misc_difference 59: note = a, c, u, g, unknown, or other
  misc_difference 62: note = a, c, u, g, unknown, or other
  misc_difference 63: note = a, c, u, g, unknown, or other
  misc_difference 65: note = a, c, u, g, unknown, or other
  misc_difference 66: note = a, c, u, g, unknown, or other
  misc_difference 72: note = a, c, u, g, unknown, or other
  misc_difference 73: note = a, c, u, g, unknown, or other
  misc_difference 74: note = a, c, u, g, unknown, or other
  misc_difference 76: note = a, c, u, g, unknown, or other
  misc_difference 77: note = a, c, u, g, unknown, or other
  misc_difference 79: note = a, c, u, g, unknown, or other
  misc_difference 80: note = a, c, u, g, unknown, or other
  misc_difference 81: note = a, c, u, g, unknown, or other
  misc_difference 82: note = a, c, u, g, unknown, or other
  misc_difference 83: note = a, c, u, g, unknown, or other
  misc_difference 84: note = a, c, u, g, unknown, or other
  misc_difference 85: note = a, c, u, g, unknown, or other
  misc_difference 87: note = a, c, u, g, unknown, or other
  misc_difference 88: note = a, c, u, g, unknown, or other
  misc_difference 92: note = a, c, u, g, unknown, or other
  misc_difference 93: note = a, c, u, g, unknown, or other
  misc_difference 94: note = a, c, u, g, unknown, or other
  misc_difference 95: note = a, c, u, g, unknown, or other
  misc_difference 97: note = a, c, u, g, unknown, or other
  misc_difference 99: note = a, c, u, g, unknown, or other
  misc_difference 100: note = a, c, u, g, unknown, or other
  misc_difference 101: note = a, c, u, g, unknown, or other
  misc_difference 113: note = a, c, u, g, unknown, or other
  misc_difference 116: note = a, c, u, g, unknown, or other
  misc_difference 120: note = a, c, u, g, unknown, or other
  misc_difference 121: note = a, c, u, g, unknown, or other
  misc_difference 122: note = a, c, u, g, unknown, or other
  misc_difference 123: note = a, c, u, g, unknown, or other
  misc_difference 124: note = a, c, u, g, unknown, or other
  misc_difference 125: note = a, c, u, g, unknown, or other
  misc_difference 126: note = a, c, u, g, unknown, or other
  misc_difference 127: note = a, c, u, g, unknown, or other
  misc_difference 129: note = a, c, u, g, unknown, or other
  misc_difference 130: note = a, c, u, g, unknown, or other
  misc_difference 134: note = a, c, u, g, unknown, or other
  misc_difference 135: note = a, c, u, g, unknown, or other
  misc_difference 136: note = a, c, u, g, unknown, or other
  misc_difference 137: note = a, c, u, g, unknown, or other
  misc_difference 140: note = a, c, u, g, unknown, or other
  misc_difference 141: note = a, c, u, g, unknown, or other
  misc_difference 145: note = a, c, u, g, unknown, or other
  misc_difference 146: note = a, c, u, g, unknown, or other
  misc_difference 147: note = a, c, u, g, unknown, or other
  misc_difference 148: note = a, c, u, g, unknown, or other
  misc_difference 149: note = a, c, u, g, unknown, or other
  misc_difference 150: note = a, c, u, g, unknown, or other
  misc_difference 154: note = a, c, u, g, unknown, or other
  misc_difference 160: note = a, c, u, g, unknown, or other
  misc_difference 172: note = a, c, u, g, unknown, or other
  misc_difference 173: note = a, c, u, g, unknown, or other
  misc_difference 176: note = a, c, u, g, unknown, or other
  misc_difference 177: note = a, c, u, g, unknown, or other
  misc_difference 178: note = a, c, u, g, unknown, or other
  misc_difference 179: note = a, c, u, g, unknown, or other
  misc_difference 185: note = a, c, u, g, unknown, or other
  misc_difference 186: note = a, c, u, g, unknown, or other
  misc_difference 190: note = a, c, u, g, unknown, or other
  misc_difference 191: note = a, c, u, g, unknown, or other
  misc_difference 192: note = a, c, u, g, unknown, or other
  misc_difference 193: note = a, c, u, g, unknown, or other
  misc_difference 194: note = a, c, u, g, unknown, or other
  misc_difference 195: note = a, c, u, g, unknown, or other
  misc_difference 196: note = a, c, u, g, unknown, or other
  misc_difference 197: note = a, c, u, g, unknown, or other
  misc_difference 200: note = a, c, u, g, unknown, or other
  misc_difference 202: note = a, c, u, g, unknown, or other
  misc_difference 204: note = a, c, u, g, unknown, or other
  misc_difference 205: note = a, c, u, g, unknown, or other
  misc_difference 213: note = a, c, u, g, unknown, or other
  misc_difference 214: note = a, c, u, g, unknown, or other
  misc_difference 216: note = a, c, u, g, unknown, or other
  misc_difference 229: note = a, c, u, g, unknown, or other
  misc_difference 230: note = a, c, u, g, unknown, or other
  misc_difference 236: note = a, c, u, g, unknown, or other
  misc_difference 249: note = a, c, u, g, unknown, or other
  misc_difference 250: note = a, c, u, g, unknown, or other
  misc_difference 251: note = a, c, u, g, unknown, or other
  misc_difference 252: note = a, c, u, g, unknown, or other
  misc_difference 253: note = a, c, u, g, unknown, or other
  misc_difference 255: note = a, c, u, g, unknown, or other
  misc_difference 262: note = a, c, u, g, unknown, or other
  misc_difference 263: note = a, c, u, g, unknown, or other
  misc_difference 264: note = a, c, u, g, unknown, or other
  misc_difference 273: note = a, c, u, g, unknown, or other
  misc_difference 274: note = a, c, u, g, unknown, or other
  misc_difference 275: note = a, c, u, g, unknown, or other
  misc_difference 276: note = a, c, u, g, unknown, or other
  misc_difference 277: note = a, c, u, g, unknown, or other
  misc_difference 290: note = a, c, u, g, unknown, or other
  misc_difference 293: note = a, c, u, g, unknown, or other
  misc_difference 296: note = a, c, u, g, unknown, or other
  misc_difference 297: note = a, c, u, g, unknown, or other
  misc_difference 298: note = a, c, u, g, unknown, or other
  misc_difference 319: note = a, c, u, g, unknown, or other
  misc_difference 327: note = a, c, u, g, unknown, or other
  misc_difference 334: note = a, c, u, g, unknown, or other
  misc_difference 335: note = a, c, u, g, unknown, or other
  misc_difference 336: note = a, c, u, g, unknown, or other
  misc_difference 345: note = a, c, u, g, unknown, or other
  misc_difference 346: note = a, c, u, g, unknown, or other
  misc_difference 347: note = a, c, u, g, unknown, or other
  misc_difference 354: note = a, c, u, g, unknown, or other
  misc_difference 355: note = a, c, u, g, unknown, or other
rnynnnrnnnynrnnnynngnrynynnynnnnnynngrynnnnnnryyynnnnnnrnnnyrnnrnnyrryynnnynnynnnnnnnynnygrnnnnynynnnggyrccggryrnaynccynnnnnnnnynnggynnnnranncctnnnnnnaganyggyrnyryycrgygycnnyrnnnnyryyrnnryynnnnnnnnyrnynrnncgtygrynntngtggyrygagccnnyyrcanggygaccyctyrnnnnncnygagccnnnygagctcynnnnnagaccgrggcccntgnggnnngctggygycrcgaacggctrntgrgrtgncggrccnnnygagycctnnnattaggnngcygcgtgrcccgcr

SEQ ID NO: 795340 - RNA, 227 nt, unidentified
  source 1..227: mol_type = unassigned RNA; note = ISSfl8
  misc_difference 1: note = a, c, u, g, unknown, or other
  misc_difference 2: note = a, c, u, g, unknown, or other
  misc_difference 3: note = a, c, u, g, unknown, or other
  misc_difference 6: note = a, c, u, g, unknown, or other
  misc_difference 7: note = a, c, u, g, unknown, or other
  misc_difference 14: note = a, c, u, g, unknown, or other
  misc_difference 23: note = a, c, u, g, unknown, or other
  misc_difference 24: note = a, c, u, g, unknown, or other
  misc_difference 27: note = a, c, u, g, unknown, or other
  misc_difference 30: note = a, c, u, g, unknown, or other
  misc_difference 31: note = a, c, u, g, unknown, or other
  misc_difference 32: note = a, c, u, g, unknown, or other
  misc_difference 33: note = a, c, u, g, unknown, or other
  misc_difference 40: note = a, c, u, g, unknown, or other
  misc_difference 41: note = a, c, u, g, unknown, or other
  misc_difference 42: note = a, c, u, g, unknown, or other
  misc_difference 43: note = a, c, u, g, unknown, or other
  misc_difference 44: note = a, c, u, g, unknown, or other
  misc_difference 45: note = a, c, u, g, unknown, or other
  misc_difference 46: note = a, c, u, g, unknown, or other
  misc_difference 47: note = a, c, u, g, unknown, or other
  misc_difference 48: note = a, c, u, g, unknown, or other
  misc_difference 49: note = a, c, u, g, unknown, or other
  misc_difference 50: note = a, c, u, g, unknown, or other
  misc_difference 51: note = a, c, u, g, unknown, or other
  misc_difference 52: note = a, c, u, g, unknown, or other
  misc_difference 53: note = a, c, u, g, unknown, or other
  misc_difference 57: note = a, c, u, g, unknown, or other
  misc_difference 60: note = a, c, u, g, unknown, or other
  misc_difference 62: note = a, c, u, g, unknown, or other
  misc_difference 63: note = a, c, u, g, unknown, or other
  misc_difference 64: note = a, c, u, g, unknown, or other
  misc_difference 65: note = a, c, u, g, unknown, or other
  misc_difference 67: note = a, c, u, g, unknown, or other
  misc_difference 68: note = a, c, u, g, unknown, or other
  misc_difference 72: note = a, c, u, g, unknown, or other
  misc_difference 73: note = a, c, u, g, unknown, or other
  misc_difference 74: note = a, c, u, g, unknown, or other
  misc_difference 75: note = a, c, u, g, unknown, or other
  misc_difference 76: note = a, c, u, g, unknown, or other
  misc_difference 77: note = a, c, u, g, unknown, or other
  misc_difference 78: note = a, c, u, g, unknown, or other
  misc_difference 79: note = a, c, u, g, unknown, or other
  misc_difference 80: note = a, c, u, g, unknown, or other
  misc_difference 81: note = a, c, u, g, unknown, or other
  misc_difference 86: note = a, c, u, g, unknown, or other
  misc_difference 87: note = a, c, u, g, unknown, or other
  misc_difference 88: note = a, c, u, g, unknown, or other
  misc_difference 92: note = a, c, u, g, unknown, or other
  misc_difference 97: note = a, c, u, g, unknown, or other
  misc_difference 98: note = a, c, u, g, unknown, or other
  misc_difference 99: note = a, c, u, g, unknown, or other
  misc_difference 100: note = a, c, u, g, unknown, or other
  misc_difference 101: note = a, c, u, g, unknown, or other
  misc_difference 102: note = a, c, u, g, unknown, or other
  misc_difference 105: note = a, c, u, g, unknown, or other
  misc_difference 106: note = a, c, u, g, unknown, or other
  misc_difference 107: note = a, c, u, g, unknown, or other
  misc_difference 108: note = a, c, u, g, unknown, or other
  misc_difference 111: note = a, c, u, g, unknown, or other
  misc_difference 121: note = a, c, u, g, unknown, or other
  misc_difference 122: note = a, c, u, g, unknown, or other
  misc_difference 125: note = a, c, u, g, unknown, or other
  misc_difference 126: note = a, c, u, g, unknown, or other
  misc_difference 127: note = a, c, u, g, unknown, or other
  misc_difference 129: note = a, c, u, g, unknown, or other
  misc_difference 134: note = a, c, u, g, unknown, or other
  misc_difference 143: note = a, c, u, g, unknown, or other
  misc_difference 145: note = a, c, u, g, unknown, or other
  misc_difference 146: note = a, c, u, g, unknown, or other
  misc_difference 147: note = a, c, u, g, unknown, or other
  misc_difference 148: note = a, c, u, g, unknown, or other
  misc_difference 150: note = a, c, u, g, unknown, or other
  misc_difference 152: note = a, c, u, g, unknown, or other
  misc_difference 154: note = a, c, u, g, unknown, or other
  misc_difference 155: note = a, c, u, g, unknown, or other
  misc_difference 156: note = a, c, u, g, unknown, or other
  misc_difference 157: note = a, c, u, g, unknown, or other
  misc_difference 158: note = a, c, u, g, unknown, or other
  misc_difference 159: note = a, c, u, g, unknown, or other
  misc_difference 163: note = a, c, u, g, unknown, or other
  misc_difference 170: note = a, c, u, g, unknown, or other
  misc_difference 172: note = a, c, u, g, unknown, or other
  misc_difference 175: note = a, c, u, g, unknown, or other
  misc_difference 176: note = a, c, u, g, unknown, or other
  misc_difference 177: note = a, c, u, g, unknown, or other
  misc_difference 179: note = a, c, u, g, unknown, or other
  misc_difference 184: note = a, c, u, g, unknown, or other
  misc_difference 185: note = a, c, u, g, unknown, or other
  misc_difference 186: note = a, c, u, g, unknown, or other
  misc_difference 187: note = a, c, u, g, unknown, or other
  misc_difference 190: note = a, c, u, g, unknown, or other
  misc_difference 191: note = a, c, u, g, unknown, or other
  misc_difference 192: note = a, c, u, g, unknown, or other
  misc_difference 193: note = a, c, u, g, unknown, or other
  misc_difference 195: note = a, c, u, g, unknown, or other
  misc_difference 197: note = a, c, u, g, unknown, or other
  misc_difference 198: note = a, c, u, g, unknown, or other
  misc_difference 205: note = a, c, u, g, unknown, or other
  misc_difference 206: note = a, c, u, g, unknown, or other
  misc_difference 210: note = a, c, u, g, unknown, or other
  misc_difference 211: note = a, c, u, g, unknown, or other
  misc_difference 213: note = a, c, u, g, unknown, or other
  misc_difference 214: note = a, c, u, g, unknown, or other
  misc_difference 215: note = a, c, u, g, unknown, or other
  misc_difference 216: note = a, c, u, g, unknown, or other
  misc_difference 217: note = a, c, u, g, unknown, or other
  misc_difference 218: note = a, c, u, g, unknown, or other
  misc_difference 221: note = a, c, u, g, unknown, or other
  misc_difference 223: note = a, c, u, g, unknown, or other
  misc_difference 224: note = a, c, u, g, unknown, or other
  misc_difference 225: note = a, c, u, g, unknown, or other
  misc_difference 226: note = a, c, u, g, unknown, or other
  misc_difference 227: note = a, c, u, g, unknown, or other
nnnyrnnyrycygnyytyrcgannrcnrannnnrrtgrcnnnnnnnnnnnnnngrcnygnynnnnrnncygnnnnnnnnnnyggcnnnyrrngcygnnnnnnyynnnngrnyyrycrgrynnrrnnnynayyrngrcgcrrrnrnnnnynyncnnnnnnayrncgrryrnrnyynnncnrgyynnnnrynnnnynrnnryyrrynnygcnnrnnnnnnrrnrnnnnn

SEQ ID NO: 795341 - RNA, 237 nt, unidentified
  source 1..237: mol_type = unassigned RNA; note = ISPfa1
  misc_difference 10: note = a, c, u, g, unknown, or other
  misc_difference 22: note = a, c, u, g, unknown, or other
  misc_difference 25: note = a, c, u, g, unknown, or other
  misc_difference 43: note = a, c, u, g, unknown, or other
  misc_difference 45: note = a, c, u, g, unknown, or other
  misc_difference 51: note = a, c, u, g, unknown, or other
  misc_difference 76: note = a, c, u, g, unknown, or other
  misc_difference 77: note = a, c, u, g, unknown, or other
  misc_difference 78: note = a, c, u, g, unknown, or other
  misc_difference 79: note = a, c, u, g, unknown, or other
  misc_difference 80: note = a, c, u, g, unknown, or other
  misc_difference 81: note = a, c, u, g, unknown, or other
  misc_difference 82: note = a, c, u, g, unknown, or other
  misc_difference 83: note = a, c, u, g, unknown, or other
  misc_difference 84: note = a, c, u, g, unknown, or other
  misc_difference 90: note = a, c, u, g, unknown, or other
  misc_difference 91: note = a, c, u, g, unknown, or other
  misc_difference 100: note = a, c, u, g, unknown, or other
  misc_difference 101: note = a, c, u, g, unknown, or other
  misc_difference 102: note = a, c, u, g, unknown, or other
  misc_difference 103: note = a, c, u, g, unknown, or other
  misc_difference 104: note = a, c, u, g, unknown, or other
  misc_difference 133: note = a, c, u, g, unknown, or other
  misc_difference 140: note = a, c, u, g, unknown, or other
  misc_difference 146: note = a, c, u, g, unknown, or other
  misc_difference 147: note = a, c, u, g, unknown, or other
  misc_difference 149: note = a, c, u, g, unknown, or other
  misc_difference 150: note = a, c, u, g, unknown, or other
  misc_difference 151: note = a, c, u, g, unknown, or other
  misc_difference 152: note = a, c, u, g, unknown, or other
  misc_difference 159: note = a, c, u, g, unknown, or other
  misc_difference 160: note = a, c, u, g, unknown, or other
  misc_difference 186: note = a, c, u, g, unknown, or other
  misc_difference 187: note = a, c, u, g, unknown, or other
  misc_difference 194: note = a, c, u, g, unknown, or other
  misc_difference 196: note = a, c, u, g, unknown, or other
  misc_difference 198: note = a, c, u, g, unknown, or other
  misc_difference 199: note = a, c, u, g, unknown, or other
  misc_difference 200: note = a, c, u, g, unknown, or other
  misc_difference 205: note = a, c, u, g, unknown, or other
  misc_difference 209: note = a, c, u, g, unknown, or other
  misc_difference 210: note = a, c, u, g, unknown, or other
  misc_difference 211: note = a, c, u, g, unknown, or other
  misc_difference 214: note = a, c, u, g, unknown, or other
  misc_difference 215: note = a, c, u, g, unknown, or other
  misc_difference 227: note = a, c, u, g, unknown, or other
rygrrygtcnaaaggttgcgynrgnratcgrrygtgatgrcanrncaggtnggaccgrgactcrcyaarcctgrannnnnnnnngrgcynnragctcgynnnnnraatgaggygygrgtcagcggattycatngrggccngcagcnnrnnnnrctgcannaaggccgratatararyygcrrccynncctgtynrnynnnrcrynygrnnnyynnygyaarygggrnrcgtycatrt

SEQ ID NO: 795342 - RNA, 223 nt, unidentified
  source 1..223: mol_type = unassigned RNA; note = ISPye48
  misc_difference 1: note = a, c, u, g, unknown, or other
  misc_difference 2: note = a, c, u, g, unknown, or other
  misc_difference 3: note = a, c, u, g, unknown, or other
  misc_difference 4: note = a, c, u, g, unknown, or other
  misc_difference 5: note = a, c, u, g, unknown, or other
  misc_difference 9: note = a, c, u, g, unknown, or other
  misc_difference 10: note = a, c, u, g, unknown, or other
  misc_difference 14: note = a, c, u, g, unknown, or other
  misc_difference 17: note = a, c, u, g, unknown, or other
  misc_difference 18: note = a, c, u, g, unknown, or other
  misc_difference 22: note = a, c, u, g, unknown, or other
  misc_difference 26: note = a, c, u, g, unknown, or other
  misc_difference 28: note = a, c, u, g, unknown, or other
  misc_difference 39: note = a, c, u, g, unknown, or other
  misc_difference 40: note = a, c, u, g, unknown, or other
  misc_difference 41: note = a, c, u, g, unknown, or other
  misc_difference 54: note = a, c, u, g, unknown, or other
  misc_difference 68: note = a, c, u, g, unknown, or other
  misc_difference 69: note = a, c, u, g, unknown, or other
  misc_difference 70: note = a, c, u, g, unknown, or other
  misc_difference 71: note = a, c, u, g, unknown, or other
  misc_difference 72: note = a, c, u, g, unknown, or other
  misc_difference 73: note = a, c, u, g, unknown, or other
  misc_difference 74: note = a, c, u, g, unknown, or other
  misc_difference 75: note = a, c, u, g, unknown, or other
  misc_difference 76: note = a, c, u, g, unknown, or other
  misc_difference 78: note = a, c, u, g, unknown, or other
  misc_difference 81: note = a, c, u, g, unknown, or other
  misc_difference 86: note = a, c, u, g, unknown, or other
  misc_difference 87: note = a, c, u, g, unknown, or other
  misc_difference 88: note = a, c, u, g, unknown, or other
  misc_difference 89: note = a, c, u, g, unknown, or other
  misc_difference 90: note = a, c, u, g, unknown, or other
  misc_difference 91: note = a, c, u, g, unknown, or other
  misc_difference 92: note = a, c, u, g, unknown, or other
  misc_difference 103: note = a, c, u, g, unknown, or other
  misc_difference 104: note = a, c, u, g, unknown, or other
  misc_difference 105: note = a, c, u, g, unknown, or other
  misc_difference 106: note = a, c, u, g, unknown, or other
  misc_difference 107: note = a, c, u, g, unknown, or other
  misc_difference 112: note = a, c, u, g, unknown, or other
  misc_difference 118: note = a, c, u, g, unknown, or other
  misc_difference 120: note = a, c, u, g, unknown, or other
  misc_difference 124: note = a, c, u, g, unknown, or other
  misc_difference 128: note = a, c, u, g, unknown, or other
  misc_difference 129: note = a, c, u, g, unknown, or other
  misc_difference 136: note = a, c, u, g, unknown, or other
  misc_difference 137: note = a, c, u, g, unknown, or other
  misc_difference 138: note = a, c, u, g, unknown, or other
  misc_difference 143: note = a, c, u, g, unknown, or other
  misc_difference 145: note = a, c, u, g, unknown, or other
  misc_difference 155: note = a, c, u, g, unknown, or other
  misc_difference 156: note = a, c, u, g, unknown, or other
  misc_difference 157: note = a, c, u, g, unknown, or other
  misc_difference 173: note = a, c, u, g, unknown, or other
  misc_difference 181: note = a, c, u, g, unknown, or other
  misc_difference 182: note = a, c, u, g, unknown, or other
  misc_difference 183: note = a, c, u, g, unknown, or other
  misc_difference 184: note = a, c, u, g, unknown, or other
  misc_difference 189: note = a, c, u, g, unknown, or other
  misc_difference 191: note = a, c, u, g, unknown, or other
  misc_difference 192: note = a, c, u, g, unknown, or other
  misc_difference 195: note = a, c, u, g, unknown, or other
  misc_difference 196: note = a, c, u, g, unknown, or other
  misc_difference 197: note = a, c, u, g, unknown, or other
  misc_difference 198: note = a, c, u, g, unknown, or other
  misc_difference 199: note = a, c, u, g, unknown, or other
  misc_difference 200: note = a, c, u, g, unknown, or other
  misc_difference 201: note = a, c, u, g, unknown, or other
  misc_difference 204: note = a, c, u, g, unknown, or other
  misc_difference 207: note = a, c, u, g, unknown, or other
  misc_difference 208: note = a, c, u, g, unknown, or other
  misc_difference 209: note = a, c, u, g, unknown, or other
  misc_difference 210: note = a, c, u, g, unknown, or other
  misc_difference 212: note = a, c, u, g, unknown, or other
  misc_difference 213: note = a, c, u, g, unknown, or other
  misc_difference 214: note = a, c, u, g, unknown, or other
  misc_difference 215: note = a, c, u, g, unknown, or other
  misc_difference 216: note = a, c, u, g, unknown, or other
  misc_difference 217: note = a, c, u, g, unknown, or other
  misc_difference 220: note = a, c, u, g, unknown, or other
  misc_difference 221: note = a, c, u, g, unknown, or other
  misc_difference 222: note = a, c, u, g, unknown, or other
  misc_difference 223: note = a, c, u, g, unknown, or other
nnnnngcynngccngrnngyrnrgynynycgargtcccnnncygggacgyggynyccgrygaygccgnnnnnnnnnyngyngccrnnnnnnnyygagyrcgynnnnnagatnggcrcncngganyyrnnyygracnnngcatnrngtggcrgccnnngcgcygacyacggacngaagcaynnnnccggnrnngrnnnnnnnyynrrnnnnynnnnnnrcnnnn

SEQ ID NO: 795343 - RNA, 167 nt, unidentified
  source 1..167: mol_type = unassigned RNA; note = ISSde13
  misc_difference 1: note = a, c, u, g, unknown, or other
  misc_difference 2: note = a, c, u, g, unknown, or other
  misc_difference 3: note = a, c, u, g, unknown, or other
  misc_difference 4: note = a, c, u, g, unknown, or other
  misc_difference 5: note = a, c, u, g, unknown, or other
  misc_difference 14: note = a, c, u, g, unknown, or other
  misc_difference 24: note = a, c, u, g, unknown, or other
  misc_difference 25: note = a, c, u, g, unknown, or other
  misc_difference 33: note = a, c, u, g, unknown, or other
  misc_difference 36: note = a, c, u, g, unknown, or other
  misc_difference 44: note = a, c, u, g, unknown, or other
  misc_difference 46: note = a, c, u, g, unknown, or other
  misc_difference 47: note = a, c, u, g, unknown, or other
  misc_difference 51: note = a, c, u, g, unknown, or other
  misc_difference 66: note = a, c, u, g, unknown, or other
  misc_difference 67: note = a, c, u, g, unknown, or other
  misc_difference 68: note = a, c, u, g, unknown, or other
  misc_difference 69: note = a, c, u, g, unknown, or other
  misc_difference 70: note = a, c, u, g, unknown, or other
  misc_difference 71: note = a, c, u, g, unknown, or other
  misc_difference 72: note = a, c, u, g, unknown, or other
  misc_difference 73: note = a, c, u, g, unknown, or other
  misc_difference 82: note = a, c, u, g, unknown, or other
  misc_difference 83: note = a, c, u, g, unknown, or other
  misc_difference 85: note = a, c, u, g, unknown, or other
  misc_difference 86: note = a, c, u, g, unknown, or other
  misc_difference 95: note = a, c, u, g, unknown, or other
  misc_difference 105: note = a, c, u, g, unknown, or other
  misc_difference 116: note = a, c, u, g, unknown, or other
  misc_difference 117: note = a, c, u, g, unknown, or other
  misc_difference 118: note = a, c, u, g, unknown, or other
  misc_difference 119: note = a, c, u, g, unknown, or other
  misc_difference 129: note = a, c, u, g, unknown, or other
  misc_difference 130: note = a, c, u, g, unknown, or other
  misc_difference 131: note = a, c, u, g, unknown, or other
  misc_difference 132: note = a, c, u, g, unknown, or other
  misc_difference 146: note = a, c, u, g, unknown, or other
  misc_difference 147: note = a, c, u, g, unknown, or other
  misc_difference 148: note = a, c, u, g, unknown, or other
  misc_difference 163: note = a, c, u, g, unknown, or other
  misc_difference 166: note = a, c, u, g, unknown, or other
  misc_difference 167: note = a, c, u, g, unknown, or other
nnnnnyrggtaarntgagrcccanncttyrgynrcnacyrargnynnyyyntryrryagytcgrtnnnnnnnnggytcctynnynnagagaccgntaacaagyrngarcrcyryannnnactcyargynnnnactcgrayagtcrnnngggyctcgarcccgnatnn

SEQ ID NO: 795344 - RNA, 168 nt, unidentified
  source 1..168: mol_type = unassigned RNA; note = ISPpu10
  misc_difference 7: note = a, c, u, g, unknown, or other
  misc_difference 9: note = a, c, u, g, unknown, or other
  misc_difference 10: note = a, c, u, g, unknown, or other
  misc_difference 11: note = a, c, u, g, unknown, or other
  misc_difference 17: note = a, c, u, g, unknown, or other
  misc_difference 32: note = a, c, u, g, unknown, or other
  misc_difference 33: note = a, c, u, g, unknown, or other
  misc_difference 34: note = a, c, u, g, unknown, or other
  misc_difference 35: note = a, c, u, g, unknown, or other
  misc_difference 36: note = a, c, u, g, unknown, or other
  misc_difference 40: note = a, c, u, g, unknown, or other
  misc_difference 41: note = a, c, u, g, unknown, or other
  misc_difference 49: note = a, c, u, g, unknown, or other
  misc_difference 50: note = a, c, u, g, unknown, or other
  misc_difference 51: note = a, c, u, g, unknown, or other
  misc_difference 52: note = a, c, u, g, unknown, or other
  misc_difference 53: note = a, c, u, g, unknown, or other
  misc_difference 63: note = a, c, u, g, unknown, or other
  misc_difference 72: note = a, c, u, g, unknown, or other
  misc_difference 73: note = a, c, u, g, unknown, or other
  misc_difference 76: note = a, c, u, g, unknown, or other
  misc_difference 91: note = a, c, u, g, unknown, or other
  misc_difference 92: note = a, c, u, g, unknown, or other
  misc_difference 117: note = a, c, u, g, unknown, or other
  misc_difference 118: note = a, c, u, g, unknown, or other
  misc_difference 129: note = a, c, u, g, unknown, or other
  misc_difference 130: note = a, c, u, g, unknown, or other
  misc_difference 131: note = a, c, u, g, unknown, or other
  misc_difference 132: note = a, c, u, g, unknown, or other
  misc_difference 140: note = a, c, u, g, unknown, or other
  misc_difference 145: note = a, c, u, g, unknown, or other
  misc_difference 146: note = a, c, u, g, unknown, or other
  misc_difference 147: note = a, c, u, g, unknown, or other
  misc_difference 165: note = a, c, u, g, unknown, or other
  misc_difference 166: note = a, c, u, g, unknown, or other
  misc_difference 167: note = a, c, u, g, unknown, or other
  misc_difference 168: note = a, c, u, g, unknown, or other
tgtatgntnnnrcytgnyggggyggrgggacnnnnnyygnntctgrcynnnnnrgyacagacngtrggaganntcnycccrccccycaccnnagcgccrataargaatyyatcggynnraccgacgatnnnnrcaagccngcgcnnnggtgrrccccgrcarrynnnn

SEQ ID NO: 795345 - RNA, 246 nt, unidentified
  source 1..246: mol_type = unassigned RNA; note = ISSpo1
  misc_difference 1: note = a, c, u, g, unknown, or other
  misc_difference 2: note = a, c, u, g, unknown, or other
  misc_difference 3: note = a, c, u, g, unknown, or other
  misc_difference 4: note = a, c, u, g, unknown, or other
  misc_difference 5: note = a, c, u, g, unknown, or other
  misc_difference 9: note = a, c, u, g, unknown, or other
  misc_difference 11: note = a, c, u, g, unknown, or other
  misc_difference 12: note = a, c, u, g, unknown, or other
  misc_difference 15: note = a, c, u, g, unknown, or other
  misc_difference 22: note = a, c, u, g, unknown, or other
  misc_difference 23: note = a, c, u, g, unknown, or other
  misc_difference 24: note = a, c, u, g, unknown, or other
  misc_difference 25: note = a, c, u, g, unknown, or other
  misc_difference 26: note = a, c, u, g, unknown, or other
  misc_difference 27: note = a, c, u, g, unknown, or other
  misc_difference 28: note = a, c, u, g, unknown, or other
  misc_difference 29: note = a, c, u, g, unknown, or other
  misc_difference 33: note = a, c, u, g, unknown, or other
  misc_difference 36: note = a, c, u, g, unknown, or other
  misc_difference 37: note = a, c, u, g, unknown, or other
  misc_difference 38: note = a, c, u, g, unknown, or other
  misc_difference 49: note = a, c, u, g, unknown, or other
  misc_difference 50: note = a, c, u, g, unknown, or other
  misc_difference 53: note = a, c, u, g, unknown, or other
  misc_difference 55: note = a, c, u, g, unknown, or other
  misc_difference 56: note = a, c, u, g, unknown, or other
  misc_difference 58: note = a, c, u, g, unknown, or other
  misc_difference 59: note = a, c, u, g, unknown, or other
  misc_difference 72: note = a, c, u, g, unknown, or other
  misc_difference 73: note = a, c, u, g, unknown, or other
  misc_difference 74: note = a, c, u, g, unknown, or other
  misc_difference 75: note = a, c, u, g, unknown, or other
  misc_difference 76: note = a, c, u, g, unknown, or other
  misc_difference 77: note = a, c, u, g, unknown, or other
  misc_difference 78: note = a, c, u, g, unknown, or other
  misc_difference 83: note = a, c, u, g, unknown, or other
  misc_difference 96: note = a, c, u, g, unknown, or other
  misc_difference 102: note = a, c, u, g, unknown, or other
  misc_difference 103: note = a, c, u, g, unknown, or other
  misc_difference 104: note = a, c, u, g, unknown, or other
  misc_difference 110: note = a, c, u, g, unknown, or other
  misc_difference 111: note = a, c, u, g, unknown, or other
  misc_difference 112: note = a, c, u, g, unknown, or other
  misc_difference 113: note = a, c, u, g, unknown, or other
  misc_difference 115: note = a, c, u, g, unknown, or other
  misc_difference 116: note = a, c, u, g, unknown, or other
  misc_difference 121: note = a, c, u, g, unknown, or other
  misc_difference 122: note = a, c, u, g, unknown, or other
  misc_difference 123: note = a, c, u, g, unknown, or other
  misc_difference 127: note = a, c, u, g, unknown, or other
  misc_difference 139: note = a, c, u, g, unknown, or other
  misc_difference 152: note = a, c, u, g, unknown, or other
  misc_difference 153: note = a, c, u, g, unknown, or other
  misc_difference 158: note = a, c, u, g, unknown, or other
  misc_difference 159: note = a, c, u, g, unknown, or other
  misc_difference 161: note = a, c, u, g, unknown, or other
  misc_difference 176: note = a, c, u, g, unknown, or other
  misc_difference 184: note = a, c, u, g, unknown, or other
  misc_difference 186: note = a, c, u, g, unknown, or other
  misc_difference 202: note = a, c, u, g, unknown, or other
  misc_difference 203: note = a, c, u, g, unknown, or other
  misc_difference 214: note = a, c, u, g, unknown, or other
  misc_difference 215: note = a, c, u, g, unknown, or other
  misc_difference 216: note = a, c, u, g, unknown, or other
  misc_difference 217: note = a, c, u, g, unknown, or other
  misc_difference 219: note = a, c, u, g, unknown, or other
  misc_difference 220: note = a, c, u, g, unknown, or other
  misc_difference 223: note = a, c, u, g, unknown, or other
  misc_difference 224: note = a, c, u, g, unknown, or other
  misc_difference 225: note = a, c, u, g, unknown, or other
  misc_difference 227: note = a, c, u, g, unknown, or other
  misc_difference 228: note = a, c, u, g, unknown, or other
  misc_difference 229: note = a, c, u, g, unknown, or other
  misc_difference 232: note = a, c, u, g, unknown, or other
  misc_difference 240: note = a, c, u, g, unknown, or other
  misc_difference 241: note = a, c, u, g, unknown, or other
  misc_difference 242: note = a, c, u, g, unknown, or other
nnnnngrynrnngcnrtytrrnnnnnnnnrycnyrnnnrrgttcgcgannrrnrnnrnnryatggaacggannnnnnnrcgcncccrraryctgrnrrcccnnnyggyynnnnrnnrrccnnncyrntaatgagaycrnrgygcgygcgyanncccannanggccayggcycgcrngccgayynanaggccggatacatrynngcgacttccgnnnncnngynnnrnnnyynyttgcgrnnnrcrg

SEQ ID NO: 795346 - RNA, 216 nt, unidentified
  source 1..216: mol_type = unassigned RNA; note = ISRel7
  misc_difference 1: note = a, c, u, g, unknown, or other
  misc_difference 2: note = a, c, u, g, unknown, or other
  misc_difference 3: note = a, c, u, g, unknown, or other
  misc_difference 5: note = a, c, u, g, unknown, or other
  misc_difference 7: note = a, c, u, g, unknown, or other
  misc_difference 9: note = a, c, u, g, unknown, or other
  misc_difference 10: note = a, c, u, g, unknown, or other
  misc_difference 17: note = a, c, u, g, unknown, or other
  misc_difference 18: note = a, c, u, g, unknown, or other
  misc_difference 19: note = a, c, u, g, unknown, or other
  misc_difference 20: note = a, c, u, g, unknown, or other
  misc_difference 21: note = a, c, u, g, unknown, or other
  misc_difference 22: note = a, c, u, g, unknown, or other
  misc_difference 23: note = a, c, u, g, unknown, or other
  misc_difference 31: note = a, c, u, g, unknown, or other
  misc_difference 34: note = a, c, u, g, unknown, or other
  misc_difference 35: note = a, c, u, g, unknown, or other
  misc_difference 36: note = a, c, u, g, unknown, or other
  misc_difference 48: note = a, c, u, g, unknown, or other
  misc_difference 49: note = a, c, u, g, unknown, or other
  misc_difference 51: note = a, c, u, g, unknown, or other
  misc_difference 56: note = a, c, u, g, unknown, or other
  misc_difference 57: note = a, c, u, g, unknown, or other
  misc_difference 58: note = a, c, u, g, unknown, or other
  misc_difference 60: note = a, c, u, g, unknown, or other
  misc_difference 65: note = a, c, u, g, unknown, or other
  misc_difference 66: note = a, c, u, g, unknown, or other
  misc_difference 67: note = a, c, u, g, unknown, or other
  misc_difference 68: note = a, c, u, g, unknown, or other
  misc_difference 69: note = a, c, u, g, unknown, or other
  misc_difference 70: note = a, c, u, g, unknown, or other
  misc_difference 71: note = a, c, u, g, unknown, or other
  misc_difference 72: note = a, c, u, g, unknown, or other
  misc_difference 74: note = a, c, u, g, unknown, or other
  misc_difference 75: note = a, c, u, g, unknown, or other
  misc_difference 77: note = a, c, u, g, unknown, or other
  misc_difference 80: note = a, c, u, g, unknown, or other
  misc_difference 81: note = a, c, u, g, unknown, or other
  misc_difference 82: note = a, c, u, g, unknown, or other
  misc_difference 87: note = a, c, u, g, unknown, or other
  misc_difference 90: note = a, c, u, g, unknown, or other
  misc_difference 91: note = a, c, u, g, unknown, or other
  misc_difference 92: note = a, c, u, g, unknown, or other
  misc_difference 93: note = a, c, u, g, unknown, or other
  misc_difference 94: note = a, c, u, g, unknown, or other
  misc_difference 95: note = a, c, u, g, unknown, or other
  misc_difference 98: note = a, c, u, g, unknown, or other
  misc_difference 99: note = a, c, u, g, unknown, or other
  misc_difference 100: note = a, c, u, g, unknown, or other
  misc_difference 112: note = a, c, u, g, unknown, or other
  misc_difference 119: note = a, c, u, g, unknown, or other
  misc_difference 120: note = a, c, u, g, unknown, or other
  misc_difference 141: note = a, c, u, g, unknown, or other
  misc_difference 142: note = a, c, u, g, unknown, or other
  misc_difference 143: note = a, c, u, g, unknown, or other
  misc_difference 150: note = a, c, u, g, unknown, or other
  misc_difference 151: note = a, c, u, g, unknown, or other
  misc_difference 152: note = a, c, u, g, unknown, or other
  misc_difference 154: note = a, c, u, g, unknown, or other
  misc_difference 174: note = a, c, u, g, unknown, or other
  misc_difference 175: note = a, c, u, g, unknown, or other
  misc_difference 176: note = a, c, u, g, unknown, or other
  misc_difference 183: note = a, c, u, g, unknown, or other
  misc_difference 184: note = a, c, u, g, unknown, or other
  misc_difference 185: note = a, c, u, g, unknown, or other
  misc_difference 191: note = a, c, u, g, unknown, or other
  misc_difference 197: note = a, c, u, g, unknown, or other
  misc_difference 198: note = a, c, u, g, unknown, or other
  misc_difference 199: note = a, c, u, g, unknown, or other
  misc_difference 200: note = a, c, u, g, unknown, or other
  misc_difference 201: note = a, c, u, g, unknown, or other
  misc_difference 202: note = a, c, u, g, unknown, or other
  misc_difference 203: note = a, c, u, g, unknown, or other
  misc_difference 209: note = a, c, u, g, unknown, or other
  misc_difference 210: note = a, c, u, g, unknown, or other
  misc_difference 211: note = a, c, u, g, unknown, or other
  misc_difference 212: note = a, c, u, g, unknown, or other
  misc_difference 213: note = a, c, u, g, unknown, or other
  misc_difference 216: note = a, c, u, g, unknown, or other
nnnrnyngnnrrrgyrnnnnnnnygtratgncrnnnyggycgrrccrnngnyyrrnnnanyccgnnnnnnnnynngngcnnnrarcncgnnnnnntgnnngggryyyrrycngcggaynncatcarggccrgcggycryrnnnrcyrcrnnnanaggccgrryryatgrcygcnnncgrycrnnnygyyrnyryyrnnnnnnnctygcnnnnnrrn

SEQ ID NO: 795347 - RNA, 384 nt, unidentified
  source 1..384: mol_type = unassigned RNA; note = ISGsu5
  misc_difference 1: note = a, c, u, g, unknown, or other
  misc_difference 2: note = a, c, u, g, unknown, or other
  misc_difference 3: note = a, c, u, g, unknown, or other
  misc_difference 4: note = a, c, u, g, unknown, or other
  misc_difference 5: note = a, c, u, g, unknown, or other
  misc_difference 6: note = a, c, u, g, unknown, or other
  misc_difference 7: note = a, c, u, g, unknown, or other
  misc_difference 9: note = a, c, u, g, unknown, or other
  misc_difference 11: note = a, c, u, g, unknown, or other
  misc_difference 12: note = a, c, u, g, unknown, or other
  misc_difference 13: note = a, c, u, g, unknown, or other
  misc_difference 14: note = a, c, u, g, unknown, or other
  misc_difference 15: note = a, c, u, g, unknown, or other
  misc_difference 16: note = a, c, u, g, unknown, or other
  misc_difference 18: note = a, c, u, g, unknown, or other
  misc_difference 25: note = a, c, u, g, unknown, or other
  misc_difference 26: note = a, c, u, g, unknown, or other
  misc_difference 28: note = a, c, u, g, unknown, or other
  misc_difference 30: note = a, c, u, g, unknown, or other
  misc_difference 31: note = a, c, u, g, unknown, or other
  misc_difference 34: note = a, c, u, g, unknown, or other
  misc_difference 38: note = a, c, u, g, unknown, or other
  misc_difference 40: note = a, c, u, g, unknown, or other
  misc_difference 41: note = a, c, u, g, unknown, or other
  misc_difference 42: note = a, c, u, g, unknown, or other
  misc_difference 43: note = a, c, u, g, unknown, or other
  misc_difference 44: note = a, c, u, g, unknown, or other
  misc_difference 46: note = a, c, u, g, unknown, or other
  misc_difference 47: note = a, c, u, g, unknown, or other
  misc_difference 49: note = a, c, u, g, unknown, or other
  misc_difference 50: note = a, c, u, g, unknown, or other
  misc_difference 51: note = a, c, u, g, unknown, or other
  misc_difference 52: note = a, c, u, g, unknown, or other
  misc_difference 53: note = a, c, u, g, unknown, or other
  misc_difference 55: note = a, c, u, g, unknown, or other
  misc_difference 59: note = a, c, u, g, unknown, or other
  misc_difference 60: note = a, c, u, g, unknown, or other
  misc_difference 61: note = a, c, u, g, unknown, or other
  misc_difference 63: note = a, c, u, g, unknown, or other
  misc_difference 64: note = a, c, u, g, unknown, or other
  misc_difference 65: note = a, c, u, g, unknown, or other
  misc_difference 67: note = a, c, u, g, unknown, or other
  misc_difference 68: note = a, c, u, g, unknown, or other
  misc_difference 69: note = a, c, u, g, unknown, or other
  misc_difference 70: note = a, c, u, g, unknown, or other
  misc_difference 71: note = a, c, u, g, unknown, or other
  misc_difference 72: note = a, c, u, g, unknown, or other
  misc_difference 73: note = a, c, u, g, unknown, or other
  misc_difference 74: note = a, c, u, g, unknown, or other
  misc_difference 75: note = a, c, u, g, unknown, or other
  misc_difference 76: note = a, c, u, g, unknown, or other
  misc_difference 77: note = a, c, u, g, unknown, or other
  misc_difference 78: note = a, c, u, g, unknown, or other
  misc_difference 79: note = a, c, u, g, unknown, or other
  misc_difference 81: note = a, c, u, g, unknown, or other
  misc_difference 82: note = a, c, u, g, unknown, or other
  misc_difference 85: note = a, c, u, g, unknown, or other
  misc_difference 87: note = a, c, u, g, unknown, or other
  misc_difference 88: note = a, c, u, g, unknown, or other
  misc_difference 91: note = a, c, u, g, unknown, or other
  misc_difference 92: note = a, c, u, g, unknown, or other
  misc_difference 93: note = a, c, u, g, unknown, or other
  misc_difference 95: note = a, c, u, g, unknown, or other
  misc_difference 97: note = a, c, u, g, unknown, or other
  misc_difference 98: note = a, c, u, g, unknown, or other
  misc_difference 99: note = a, c, u, g, unknown, or other
  misc_difference 100: note = a, c, u, g, unknown, or other
  misc_difference 101: note = a, c, u, g, unknown, or other
  misc_difference 103: note = a, c, u, g, unknown, or other
  misc_difference 105: note = a, c, u, g, unknown, or other
  misc_difference 106: note = a, c, u, g, unknown, or other
  misc_difference 108: note = a, c, u, g, unknown, or other
  misc_difference 109: note = a, c, u, g, unknown, or other
  misc_difference 110: note = a, c, u, g, unknown, or other
  misc_difference 114: note = a, c, u, g, unknown, or other
  misc_difference 115: note = a, c, u, g, unknown, or other
  misc_difference 116: note = a, c, u, g, unknown, or other
  misc_difference 117: note = a, c, u, g, unknown, or other
  misc_difference 118: note = a, c, u, g, unknown, or other
  misc_difference 119: note = a, c, u, g, unknown, or other
  misc_difference 121: note = a, c, u, g, unknown, or other
  misc_difference 122: note = a, c, u, g, unknown, or other
  misc_difference 127: note = a, c, u, g, unknown, or other
  misc_difference 139: note = a, c, u, g, unknown, or other
  misc_difference 140: note = a, c, u, g, unknown, or other
  misc_difference 141: note = a, c, u, g, unknown, or other
  misc_difference 142: note = a, c, u, g, unknown, or other
  misc_difference 144: note = a, c, u, g, unknown, or other
  misc_difference 145: note = a, c, u, g, unknown, or other
  misc_difference 146: note = a, c, u, g, unknown, or other
  misc_difference 147: note = a, c, u, g, unknown, or other
  misc_difference 148: note = a, c, u, g, unknown, or other
  misc_difference 150: note = a, c, u, g, unknown, or other
  misc_difference 151: note = a, c, u, g, unknown, or other
  misc_difference 152: note = a, c, u, g, unknown, or other
  misc_difference 153: note = a, c, u, g, unknown, or other
  misc_difference 154: note = a, c, u, g, unknown, or other
  misc_difference 155: note = a, c, u, g, unknown, or other
  misc_difference 156: note = a, c, u, g, unknown, or other
  misc_difference 157: note = a, c, u, g, unknown, or other
  misc_difference 158: note = a, c, u, g, unknown, or other
  misc_difference 159: note = a, c, u, g, unknown, or other
  misc_difference 160: note = a, c, u, g, unknown, or other
  misc_difference 161: note = a, c, u, g, unknown, or other
  misc_difference 162: note = a, c, u, g, unknown, or other
  misc_difference 164: note = a, c, u, g, unknown, or other
  misc_difference 166: note = a, c, u, g, unknown, or other
  misc_difference 167: note = a, c, u, g, unknown, or other
  misc_difference 168: note = a, c, u, g, unknown, or other
  misc_difference 169: note = a, c, u, g, unknown, or other
  misc_difference 170: note = a, c, u, g, unknown, or other
  misc_difference 171: note = a, c, u, g, unknown, or other
  misc_difference 172: note = a, c, u, g, unknown, or other
  misc_difference 173: note = a, c, u, g, unknown, or other
  misc_difference 174: note = a, c, u, g, unknown, or other
  misc_difference 175: note = a, c, u, g, unknown, or other
  misc_difference 176: note = a, c, u, g, unknown, or other
  misc_difference 177: note = a, c, u, g, unknown, or other
  misc_difference 179: note = a, c, u, g, unknown, or other
  misc_difference 180: note = a, c, u, g, unknown, or other
  misc_difference 185: note = a, c, u, g, unknown, or other
  misc_difference 188: note = a, c, u, g, unknown, or other
  misc_difference 189: note = a, c, u, g, unknown, or other
  misc_difference 190: note = a, c, u, g, unknown, or other
  misc_difference 191: note = a, c, u, g, unknown, or other
  misc_difference 193: note = a, c, u, g, unknown, or other
  misc_difference 199: note = a, c, u, g, unknown, or other
  misc_difference 201: note = a, c, u, g, unknown, or other
  misc_difference 202: note = a, c, u, g, unknown, or other
  misc_difference 203: note = a, c, u, g, unknown, or other
  misc_difference 204: note = a, c, u, g, unknown, or other
  misc_difference 205: note = a, c, u, g, unknown, or other
  misc_difference 208: note = a, c, u, g, unknown, or other
  misc_difference 209: note = a, c, u, g, unknown, or other
  misc_difference 210: note = a, c, u, g, unknown, or other
  misc_difference 211: note = a, c, u, g, unknown, or other
  misc_difference 212: note = a, c, u, g, unknown, or other
  misc_difference 215: note = a, c, u, g, unknown, or other
  misc_difference 216: note = a, c, u, g, unknown, or other
  misc_difference 218: note = a, c, u, g, unknown, or other
  misc_difference 219: note = a, c, u, g, unknown, or other
  misc_difference 220: note = a, c, u, g, unknown, or other
  misc_difference 221: note = a, c, u, g, unknown, or other
  misc_difference 222: note = a, c, u, g, unknown, or other
  misc_difference 223: note = a, c, u, g, unknown, or other
  misc_difference 225: note = a, c, u, g, unknown, or other
  misc_difference 228: note = a, c, u, g, unknown, or other
  misc_difference 229: note = a, c, u, g, unknown, or other
  misc_difference 230: note = a, c, u, g, unknown, or other
  misc_difference 231: note = a, c, u, g, unknown, or other
  misc_difference 232: note = a, c, u, g, unknown, or other
  misc_difference 234: note = a, c, u, g, unknown, or other
  misc_difference 238: note = a, c, u, g, unknown, or other
  misc_difference 239: note = a, c, u, g, unknown, or other
  misc_difference 240: note = a, c, u, g, unknown, or other
  misc_difference 252: note = a, c, u, g, unknown, or other
  misc_difference 255: note = a, c, u, g, unknown, or other
  misc_difference 256: note = a, c, u, g, unknown, or other
  misc_difference 257: note = a, c, u, g, unknown, or other
  misc_difference 262: note = a, c, u, g, unknown, or other
  misc_difference 263: note = a, c, u, g, unknown, or other
  misc_difference 264: note = a, c, u, g, unknown, or other
  misc_difference 265: note = a, c, u, g, unknown, or other
  misc_difference 267: note = a, c, u, g, unknown, or other
  misc_difference 268: note = a, c, u, g, unknown, or other
  misc_difference 269: note = a, c, u, g, unknown, or other
  misc_difference 270: note = a, c, u, g, unknown, or other
  misc_difference 271: note = a, c, u, g, unknown, or other
  misc_difference 272: note = a, c, u, g, unknown, or other
  misc_difference 273: note = a, c, u, g, unknown, or other
  misc_difference 274: note = a, c, u, g, unknown, or other
  misc_difference 275: note = a, c, u, g, unknown, or other
  misc_difference 278: note = a, c, u, g, unknown, or other
  misc_difference 279: note = a, c, u, g, unknown, or other
  misc_difference 282: note = a, c, u, g, unknown, or other
  misc_difference 287: note = a, c, u, g, unknown, or other
  misc_difference 288: note = a, c, u, g, unknown, or other
  misc_difference 291: note = a, c, u, g, unknown, or other
  misc_difference 292: note = a, c, u, g, unknown, or other
  misc_difference 293: note = a, c, u, g, unknown, or other
  misc_difference 294: note = a, c, u, g, unknown, or other
  misc_difference 295: note = a, c, u, g, unknown, or other
  misc_difference 296: note = a, c, u, g, unknown, or other
  misc_difference 297: note = a, c, u, g, unknown, or other
  misc_difference 298: note = a, c, u, g, unknown, or other
  misc_difference 299: note = a, c, u, g, unknown, or other
  misc_difference 300: note = a, c, u, g, unknown, or other
  misc_difference 302: note = a, c, u, g, unknown, or other
  misc_difference 303: note = a, c, u, g, unknown, or other
  misc_difference 304: note = a, c, u, g, unknown, or other
  misc_difference 306: note = a, c, u, g, unknown, or other
  misc_difference 308: note = a, c, u, g, unknown, or other
  misc_difference 309: note = a, c, u, g, unknown, or other
  misc_difference 310: note = a, c, u, g, unknown, or other
  misc_difference 311: note = a, c, u, g, unknown, or other
  misc_difference 312: note = a, c, u, g, unknown, or other
  misc_difference 313: note = a, c, u, g, unknown, or other
  misc_difference 314: note = a, c, u, g, unknown, or other
  misc_difference 315: note = a, c, u, g, unknown, or other
  misc_difference 316: note = a, c, u, g, unknown, or other
  misc_difference 317: note = a, c, u, g, unknown, or other
  misc_difference 318: note = a, c, u, g, unknown, or other
  misc_difference 319: note = a, c, u, g, unknown, or other
  misc_difference 320: note = a, c, u, g, unknown, or other
  misc_difference 321: note = a, c, u, g, unknown, or other
  misc_difference 322: note = a, c, u, g, unknown, or other
  misc_difference 324: note = a, c, u, g, unknown, or other
  misc_difference 325: note = a, c, u, g, unknown, or other
  misc_difference 326: note = a, c, u, g, unknown, or other
  misc_difference 327: note = a, c, u, g, unknown, or other
  misc_difference 328: note = a, c, u, g, unknown, or other
  misc_difference 329: note = a, c, u, g, unknown, or other
  misc_difference 330: note = a, c, u, g, unknown, or other
  misc_difference 335: note = a, c, u, g, unknown, or other
  misc_difference 336: note = a, c, u, g, unknown, or other
  misc_difference 337: note = a, c, u, g, unknown, or other
  misc_difference 343: note = a, c, u, g, unknown, or other
  misc_difference 345: note = a, c, u, g, unknown, or other
  misc_difference 346: note = a, c, u, g, unknown, or other
  misc_difference 347: note = a, c, u, g, unknown, or other
  misc_difference 349: note = a, c, u, g, unknown, or other
  misc_difference 350: note = a, c, u, g, unknown, or other
  misc_difference 357: note = a, c, u, g, unknown, or other
  misc_difference 358: note = a, c, u, g, unknown, or other
  misc_difference 359: note = a, c, u, g, unknown, or other
  misc_difference 360: note = a, c, u, g, unknown, or other
  misc_difference 361: note = a, c, u, g, unknown, or other
  misc_difference 362: note = a, c, u, g, unknown, or other
  misc_difference 363: note = a, c, u, g, unknown, or other
  misc_difference 364: note = a, c, u, g, unknown, or other
  misc_difference 365: note = a, c, u, g, unknown, or other
  misc_difference 366: note = a, c, u, g, unknown, or other
  misc_difference 367: note = a, c, u, g, unknown, or other
  misc_difference 368: note = a, c, u, g, unknown, or other
  misc_difference 369: note = a, c, u, g, unknown, or other
  misc_difference 370: note = a, c, u, g, unknown, or other
  misc_difference 372: note = a, c, u, g, unknown, or other
  misc_difference 374: note = a, c, u, g, unknown, or other
  misc_difference 376: note = a, c, u, g, unknown, or other
  misc_difference 377: note = a, c, u, g, unknown, or other
  misc_difference 379: note = a, c, u, g, unknown, or other
  misc_difference 380: note = a, c, u, g, unknown, or other
  misc_difference 381: note = a, c, u, g, unknown, or other
  misc_difference 383: note = a, c, u, g, unknown, or other
nnnnnnnrnrnnnnnnrnyragcynnrnrnnyanctgnrnnnnnanngnnnnngnyygnnnrnnnynnnnnnnnnnnnnrnnrynrnnyynnnynynnnnnyngnnynnnrcynnnnnnynnyyygnytgattggayrnnnnynnnnnynnnnnnnnnnnnnrnynnnnnnnnnnnngnncygcnccnnnncngarccnrnnnnnrannnnnygnnynnnnnnrnrynnnnnrnycrnnnytttgrryrgrncrnnnygrrnnnncnnnnnnnnntcnnggnyrygnngynnnnnnnnnnynnncngnnnnnnnnnnnnnnnynnnnnnnyrygnnnctcranrnnnrnnyrrygynnnnnnnnnnnnnnrnrncnnynnnynr

SEQ ID NO: 795348 - RNA, 234 nt, unidentified
  source 1..234: mol_type = unassigned RNA; note = ISRhru3
  misc_difference 1: note = a, c, u, g, unknown, or other
  misc_difference 2: note = a, c, u, g, unknown, or other
  misc_difference 3: note = a, c, u, g, unknown, or other
  misc_difference 6: note = a, c, u, g, unknown, or other
  misc_difference 14: note = a, c, u, g, unknown, or other
  misc_difference 16: note = a, c, u, g, unknown, or other
  misc_difference 17: note = a, c, u, g, unknown, or other
  misc_difference 18: note = a, c, u, g, unknown, or other
  misc_difference 19: note = a, c, u, g, unknown, or other
  misc_difference 20: note = a, c, u, g, unknown, or other
  misc_difference 22: note = a, c, u, g, unknown, or other
  misc_difference 25: note = a, c, u, g, unknown, or other
  misc_difference 30: note = a, c, u, g, unknown, or other
  misc_difference 31: note = a, c, u, g, unknown, or other
  misc_difference 54: note = a, c, u, g, unknown, or other
  misc_difference 55: note = a, c, u, g, unknown, or other
  misc_difference 59: note = a, c, u, g, unknown, or other
  misc_difference 60: note = a, c, u, g, unknown, or other
  misc_difference 72: note = a, c, u, g, unknown, or other
  misc_difference 73: note = a, c, u, g, unknown, or other
  misc_difference 74: note = a, c, u, g, unknown, or other
  misc_difference 75: note = a, c, u, g, unknown, or other
  misc_difference 76: note = a, c, u, g, unknown, or other
  misc_difference 77: note = a, c, u, g, unknown, or other
  misc_difference 78: note = a, c, u, g, unknown, or other
  misc_difference 79: note = a, c, u, g, unknown, or other
  misc_difference 80: note = a, c, u, g, unknown, or other
  misc_difference 81: note = a, c, u, g, unknown, or other
  misc_difference 82: note = a, c, u, g, unknown, or other
  misc_difference 87: note = a, c, u, g, unknown, or other
  misc_difference 89: note = a, c, u, g, unknown, or other
  misc_difference 90: note = a, c, u, g, unknown, or other
  misc_difference 91: note = a, c, u, g, unknown, or other
  misc_difference 92: note = a, c, u, g, unknown, or other
  misc_difference 93: note = a, c, u, g, unknown, or other
  misc_difference 94: note = a, c, u, g, unknown, or other
  misc_difference 95: note = a, c, u, g, unknown, or other
  misc_difference 96: note = a, c, u, g, unknown, or other
  misc_difference 97: note = a, c, u, g, unknown, or other
  misc_difference 98: note = a, c, u, g, unknown, or other
  misc_difference 99: note = a, c, u, g, unknown, or other
  misc_difference 100: note = a, c, u, g, unknown, or other
  misc_difference 104: note = a, c, u, g, unknown, or other
  misc_difference 110: note = a, c, u, g, unknown, or other
  misc_difference 111: note = a, c, u, g, unknown, or other
  misc_difference 112: note = a, c, u, g, unknown, or other
  misc_difference 113: note = a, c, u, g, unknown, or other
  misc_difference 114: note = a, c, u, g, unknown, or other
  misc_difference 119: note = a, c, u, g, unknown, or other
  misc_difference 129: note = a, c, u, g, unknown, or other
  misc_difference 134: note = a, c, u, g, unknown, or other
  misc_difference 141: note = a, c, u, g, unknown, or other
  misc_difference 146: note = a, c, u, g, unknown, or other
  misc_difference 158: note = a, c, u, g, unknown, or other
  misc_difference 159: note = a, c, u, g, unknown, or other
  misc_difference 160: note = a, c, u, g, unknown, or other
  misc_difference 183: note = a, c, u, g, unknown, or other
  misc_difference 185: note = a, c, u, g, unknown, or other
  misc_difference 186: note = a, c, u, g, unknown, or other
  misc_difference 187: note = a, c, u, g, unknown, or other
  misc_difference 197: note = a, c, u, g, unknown, or other
  misc_difference 201: note = a, c, u, g, unknown, or other
  misc_difference 202: note = a, c, u, g, unknown, or other
  misc_difference 203: note = a, c, u, g, unknown, or other
  misc_difference 204: note = a, c, u, g, unknown, or other
  misc_difference 205: note = a, c, u, g, unknown, or other
  misc_difference 206: note = a, c, u, g, unknown, or other
  misc_difference 207: note = a, c, u, g, unknown, or other
  misc_difference 208: note = a, c, u, g, unknown, or other
  misc_difference 209: note = a, c, u, g, unknown, or other
  misc_difference 210: note = a, c, u, g, unknown, or other
  misc_difference 214: note = a, c, u, g, unknown, or other
  misc_difference 220: note = a, c, u, g, unknown, or other
  misc_difference 221: note = a, c, u, g, unknown, or other
  misc_difference 222: note = a, c, u, g, unknown, or other
  misc_difference 223: note = a, c, u, g, unknown, or other
  misc_difference 224: note = a, c, u, g, unknown, or other
  misc_difference 225: note = a, c, u, g, unknown, or other
  misc_difference 226: note = a, c, u, g, unknown, or other
  misc_difference 227: note = a, c, u, g, unknown, or other
nnnyynrrryrgrncnnnnnrnycngyyynnyygargtcccgtcgccgggacgnngrrnnyggyrargccgnnnnnnnnnnngtgrnynnnnnnnnnnnnrrancacgcnnnnnagatnggcycrcygnyycyntctgayngcatnrtgtggcggcynnnrygyygaccacgracrgaagcrngnnnyyggcgrcgngrynnnnnnnnnnrrrnyygrcnnnnnnnngcccryy

SEQ ID NO: 795349 - RNA, 231 nt, unidentified
  source 1..231: mol_type = unassigned RNA; note = ISAzvi4
  misc_difference 1: note = a, c, u, g, unknown, or other
  misc_difference 2: note = a, c, u, g, unknown, or other
  misc_difference 3: note = a, c, u, g, unknown, or other
  misc_difference 4: note = a, c, u, g, unknown, or other
  misc_difference 5: note = a, c, u, g, unknown, or other
  misc_difference 8: note = a, c, u, g, unknown, or other
  misc_difference 11: note = a, c, u, g, unknown, or other
  misc_difference 14: note = a, c, u, g, unknown, or other
  misc_difference 26: note = a, c, u, g, unknown, or other
  misc_difference 32: note = a, c, u, g, unknown, or other
  misc_difference 33: note = a, c, u, g, unknown, or other
  misc_difference 34: note = a, c, u, g, unknown, or other
  misc_difference 36: note = a, c, u, g, unknown, or other
  misc_difference 52: note = a, c, u, g, unknown, or other
  misc_difference 55: note = a, c, u, g, unknown, or other
  misc_difference 68: note = a, c, u, g, unknown, or other
  misc_difference 70: note = a, c, u, g, unknown, or other
  misc_difference 76: note = a, c, u, g, unknown, or other
  misc_difference 77: note = a, c, u, g, unknown, or other
  misc_difference 78: note = a, c, u, g, unknown, or other
  misc_difference 79: note = a, c, u, g, unknown, or other
  misc_difference 80: note = a, c, u, g, unknown, or other
  misc_difference 84: note = a, c, u, g, unknown, or other
  misc_difference 85: note = a, c, u, g, unknown, or other
  misc_difference 91: note = a, c, u, g, unknown, or other
  misc_difference 100: note = a, c, u, g, unknown, or other
  misc_difference 101: note = a, c, u, g, unknown, or other
  misc_difference 102: note = a, c, u, g, unknown, or other
  misc_difference 103: note = a, c, u, g, unknown, or other
  misc_difference 104: note = a, c, u, g, unknown, or other
  misc_difference 110: note = a, c, u, g, unknown, or other
  misc_difference 114: note = a, c, u, g, unknown, or other
  misc_difference 128: note = a, c, u, g, unknown, or other
  misc_difference 143: note = a, c, u, g, unknown, or other
  misc_difference 148: note = a, c, u, g, unknown, or other
  misc_difference 149: note = a, c, u, g, unknown, or other
  misc_difference 150: note = a, c, u, g, unknown, or other
  misc_difference 151: note = a, c, u, g, unknown, or other
  misc_difference 153: note = a, c, u, g, unknown, or other
  misc_difference 158: note = a, c, u, g, unknown, or other
  misc_difference 159: note = a, c, u, g, unknown, or other
  misc_difference 160: note = a, c, u, g, unknown, or other
  misc_difference 161: note = a, c, u, g, unknown, or other
  misc_difference 179: note = a, c, u, g, unknown, or other
  misc_difference 187: note = a, c, u, g, unknown, or other
  misc_difference 188: note = a, c, u, g, unknown, or other
  misc_difference 189: note = a, c, u, g, unknown, or other
  misc_difference 193: note = a, c, u, g, unknown, or other
  misc_difference 194: note = a, c, u, g, unknown, or other
  misc_difference 196: note = a, c, u, g, unknown, or other
  misc_difference 197: note = a, c, u, g, unknown, or other
  misc_difference 198: note = a, c, u, g, unknown, or other
  misc_difference 200: note = a, c, u, g, unknown, or other
  misc_difference 201: note = a, c, u, g, unknown, or other
  misc_difference 202: note = a, c, u, g, unknown, or other
  misc_difference 203: note = a, c, u, g, unknown, or other
  misc_difference 206: note = a, c, u, g, unknown, or other
  misc_difference 208: note = a, c, u, g, unknown, or other
  misc_difference 209: note = a, c, u, g, unknown, or other
  misc_difference 219: note = a, c, u, g, unknown, or other
  misc_difference 225: note = a, c, u, g, unknown, or other
nnnnnyrnyynycnggttttgcgaynrctgannnyngatgacrtraacggcnyancggcctgryrrrnancctgrnnnnnraannggcyynyrargcygnnnnnyttttnaggnyyrycrggcgcgrnyctcatcgtggcgcngrrrnnnnynyccannnngacgccggatagatttrngcaagccnnnyaynnynnnrnnnnycngnnttgcaaaarnrgggrngaccat

SEQ ID NO: 795350 - RNA, 184 nt, unidentified
  source 1..184: mol_type = unassigned RNA; note = ISAzo22
  misc_difference 11: note = a, c, u, g, unknown, or other
  misc_difference 12: note = a, c, u, g, unknown, or other
  misc_difference 15: note = a, c, u, g, unknown, or other
  misc_difference 22: note = a, c, u, g, unknown, or other
  misc_difference 23: note = a, c, u, g, unknown, or other
  misc_difference 33: note = a, c, u, g, unknown, or other
  misc_difference 34: note = a, c, u, g, unknown, or other
  misc_difference 35: note = a, c, u, g, unknown, or other
  misc_difference 37: note = a, c, u, g, unknown, or other
  misc_difference 40: note = a, c, u, g, unknown, or other
  misc_difference 47: note = a, c, u, g, unknown, or other
  misc_difference 48: note = a, c, u, g, unknown, or other
  misc_difference 49: note = a, c, u, g, unknown, or other
  misc_difference 50: note = a, c, u, g, unknown, or other
  misc_difference 57: note = a, c, u, g, unknown, or other
  misc_difference 58: note = a, c, u, g, unknown, or other
  misc_difference 59: note = a, c, u, g, unknown, or other
  misc_difference 60: note = a, c, u, g, unknown, or other
  misc_difference 62: note = a, c, u, g, unknown, or other
  misc_difference 72: note = a, c, u, g, unknown, or other
  misc_difference 73: note = a, c, u, g, unknown, or other
  misc_difference 78: note = a, c, u, g, unknown, or other
  misc_difference 85: note = a, c, u, g, unknown, or other
  misc_difference 101: note = a, c, u, g, unknown, or other
  misc_difference 102: note = a, c, u, g, unknown, or other
  misc_difference 103: note = a, c, u, g, unknown, or other
  misc_difference 104: note = a, c, u, g, unknown, or other
  misc_difference 106: note = a, c, u, g, unknown, or other
  misc_difference 107: note = a, c, u, g, unknown, or other
  misc_difference 108: note = a, c, u, g, unknown, or other
  misc_difference 109: note = a, c, u, g, unknown, or other
  misc_difference 110: note = a, c, u, g, unknown, or other
  misc_difference 111: note = a, c, u, g, unknown, or other
  misc_difference 112: note = a, c, u, g, unknown, or other
  misc_difference 113: note = a, c, u, g, unknown, or other
  misc_difference 114: note = a, c, u, g, unknown, or other
  misc_difference 115: note = a, c, u, g, unknown, or other
  misc_difference 116: note = a, c, u, g, unknown, or other
  misc_difference 117: note = a, c, u, g, unknown, or other
  misc_difference 118: note = a, c, u, g, unknown, or other
  misc_difference 119: note = a, c, u, g, unknown, or other
  misc_difference 121: note = a, c, u, g, unknown, or other
  misc_difference 122: note = a, c, u, g, unknown, or other
  misc_difference 141: note = a, c, u, g, unknown, or other
  misc_difference 145: note = a, c, u, g, unknown, or other
  misc_difference 147: note = a, c, u, g, unknown, or other
  misc_difference 148: note = a, c, u, g, unknown, or other
  misc_difference 163: note = a, c, u, g, unknown, or other
  misc_difference 164: note = a, c, u, g, unknown, or other
  misc_difference 171: note = a, c, u, g, unknown, or other
  misc_difference 174: note = a, c, u, g, unknown, or other
  misc_difference 180: note = a, c, u, g, unknown, or other
  misc_difference 181: note = a, c, u, g, unknown, or other
  misc_difference 183: note = a, c, u, g, unknown, or other
  misc_difference 184: note = a, c, u, g, unknown, or other
ryarrgtrrrnngyngygcygnnraagaccgannnrncantggtgcnnnntgcccgnnnnynagcrtggtcnngggynrcgtcrncgacaytggtgaryynnnnynnnnnnnnnnnnnnrnngryatcccgtttragagantganynnracgacgtrcccranncggcgcnrcnytycrnnynn

SEQ ID NO: 795351 - RNA, 221 nt, unidentified
  source 1..221: mol_type = unassigned RNA; note = ISYen1
  misc_difference 10: note = a, c, u, g, unknown, or other
  misc_difference 20: note = a, c, u, g, unknown, or other
  misc_difference 24: note = a, c, u, g, unknown, or other
  misc_difference 42: note = a, c, u, g, unknown, or other
  misc_difference 49: note = a, c, u, g, unknown, or other
  misc_difference 56: note = a, c, u, g, unknown, or other
  misc_difference 57: note = a, c, u, g, unknown, or other
  misc_difference 58: note = a, c, u, g, unknown, or other
  misc_difference 65: note = a, c, u, g, unknown, or other
  misc_difference 66: note = a, c, u, g, unknown, or other
  misc_difference 67: note = a, c, u, g, unknown, or other
  misc_difference 68: note = a, c, u, g, unknown, or other
  misc_difference 69: note = a, c, u, g, unknown, or other
  misc_difference 70: note = a, c, u, g, unknown, or other
  misc_difference 71: note = a, c, u, g, unknown, or other
  misc_difference 72: note = a, c, u, g, unknown, or other
  misc_difference 73: note = a, c, u, g, unknown, or other
  misc_difference 74: note = a, c, u, g, unknown, or other
  misc_difference 75: note = a, c, u, g, unknown, or other
  misc_difference 77: note = a, c, u, g, unknown, or other
  misc_difference 81: note = a, c, u, g, unknown, or other
  misc_difference 82: note = a, c, u, g, unknown, or other
  misc_difference 83: note = a, c, u, g, unknown, or other
  misc_difference 87: note = a, c, u, g, unknown, or other
  misc_difference 90: note = a, c, u, g, unknown, or other
  misc_difference 91: note = a, c, u, g, unknown, or other
  misc_difference 92: note = a, c, u, g, unknown, or other
  misc_difference 93: note = a, c, u, g, unknown, or other
  misc_difference 94: note = a, c, u, g, unknown, or other
  misc_difference 95: note = a, c, u, g, unknown, or other
  misc_difference 98: note = a, c, u, g, unknown, or other
  misc_difference 100: note = a, c, u, g, unknown, or other
  misc_difference 104: note = a, c, u, g, unknown, or other
  misc_difference 105: note = a, c, u, g, unknown, or other
  misc_difference 116: note = a, c, u, g, unknown, or other
  misc_difference 129: note = a, c, u, g, unknown, or other
  misc_difference 131: note = a, c, u, g, unknown, or other
  misc_difference 133: note = a, c, u, g, unknown, or other
  misc_difference 137: note = a, c, u, g, unknown, or other
  misc_difference 138: note = a, c, u, g, unknown, or other
  misc_difference 139: note = a, c, u, g, unknown, or other
  misc_difference 140: note = a, c, u, g, unknown, or other
  misc_difference 144: note = a, c, u, g, unknown, or other
  misc_difference 147: note = a, c, u, g, unknown, or other
  misc_difference 148: note = a, c, u, g, unknown, or other
  misc_difference 149: note = a, c, u, g, unknown, or other
  misc_difference 150: note = a, c, u, g, unknown, or other
  misc_difference 151: note = a, c, u, g, unknown, or other
  misc_difference 154: note = a, c, u, g, unknown, or other
  misc_difference 161: note = a, c, u, g, unknown, or other
  misc_difference 173: note = a, c, u, g, unknown, or other
  misc_difference 175: note = a, c, u, g, unknown, or other
  misc_difference 176: note = a, c, u, g, unknown, or other
  misc_difference 177: note = a, c, u, g, unknown, or other
  misc_difference 182: note = a, c, u, g, unknown, or other
  misc_difference 184: note = a, c, u, g, unknown, or other
  misc_difference 185: note = a, c, u, g, unknown, or other
  misc_difference 191: note = a, c, u, g, unknown, or other
  misc_difference 194: note = a, c, u, g, unknown, or other
  misc_difference 195: note = a, c, u, g, unknown, or other
  misc_difference 197: note = a, c, u, g, unknown, or other
  misc_difference 198: note = a, c, u, g, unknown, or other
  misc_difference 201: note = a, c, u, g, unknown, or other
  misc_difference 202: note = a, c, u, g, unknown, or other
  misc_difference 207: note = a, c, u, g, unknown, or other
  misc_difference 208: note = a, c, u, g, unknown, or other
  misc_difference 211: note = a, c, u, g, unknown, or other
  misc_difference 212: note = a, c, u, g, unknown, or other
  misc_difference 213: note = a, c, u, g, unknown, or other
  misc_difference 214: note = a, c, u, g, unknown, or other
  misc_difference 215: note = a, c, u, g, unknown, or other
  misc_difference 216: note = a, c, u, g, unknown, or other
  misc_difference 217: note = a, c, u, g, unknown, or other
  misc_difference 219: note = a, c, u, g, unknown, or other
ryygattgcnyrggcrryynyrrnrtgatggcrarayrggtnrgaccgngryygrnnnarccygnnnnnnnnnnngnrcynnnagyncgnnnnnnygntnrgrnnycrryyrgcrnayyccatcarggncngngrynnnnrycncrnnnnnagnccggatnyayggyygcarnynnnrccynynnryyrynrynnrnnrannrctynnyrnnnnnnnrnyg

SEQ ID NO: 795352 - RNA, 230 nt, unidentified
  source 1..230: mol_type = unassigned RNA; note = ISAs24
  misc_difference 1: note = a, c, u, g, unknown, or other
  misc_difference 2: note = a, c, u, g, unknown, or other
  misc_difference 3: note = a, c, u, g, unknown, or other
  misc_difference 4: note = a, c, u, g, unknown, or other
  misc_difference 5: note = a, c, u, g, unknown, or other
  misc_difference 6: note = a, c, u, g, unknown, or other
  misc_difference 25: note = a, c, u, g, unknown, or other
  misc_difference 28: note = a, c, u, g, unknown, or other
  misc_difference 31: note = a, c, u, g, unknown, or other
  misc_difference 32: note = a, c, u, g, unknown, or other
  misc_difference 33: note = a, c, u, g, unknown, or other
  misc_difference 34: note = a, c, u, g, unknown, or other
  misc_difference 35: note = a, c, u, g, unknown, or other
  misc_difference 51: note = a, c, u, g, unknown, or other
  misc_difference 54: note = a, c, u, g, unknown, or other
  misc_difference 67: note = a, c, u, g, unknown, or other
  misc_difference 69: note = a, c, u, g, unknown, or other
  misc_difference 75: note = a, c, u, g, unknown, or other
  misc_difference 76: note = a, c, u, g, unknown, or other
  misc_difference 77: note = a, c, u, g, unknown, or other
  misc_difference 78: note = a, c, u, g, unknown, or other
  misc_difference 79: note = a, c, u, g, unknown, or other
  misc_difference 83: note = a, c, u, g, unknown, or other
  misc_difference 91: note = a, c, u, g, unknown, or other
  misc_difference 99: note = a, c, u, g, unknown, or other
  misc_difference 100: note = a, c, u, g, unknown, or other
  misc_difference 101: note = a, c, u, g, unknown, or other
  misc_difference 102: note = a, c, u, g, unknown, or other
  misc_difference 103: note = a, c, u, g, unknown, or other
  misc_difference 104: note = a, c, u, g, unknown, or other
  misc_difference 109: note = a, c, u, g, unknown, or other
  misc_difference 113: note = a, c, u, g, unknown, or other
  misc_difference 136: note = a, c, u, g, unknown, or other
  misc_difference 139: note = a, c, u, g, unknown, or other
  misc_difference 145: note = a, c, u, g, unknown, or other
  misc_difference 146: note = a, c, u, g, unknown, or other
  misc_difference 147: note = a, c, u, g, unknown, or other
  misc_difference 148: note = a, c, u, g, unknown, or other
  misc_difference 149: note = a, c, u, g, unknown, or other
  misc_difference 150: note = a, c, u, g, unknown, or other
  misc_difference 152: note = a, c, u, g, unknown, or other
  misc_difference 157: note = a, c, u, g, unknown, or other
  misc_difference 158: note = a, c, u, g, unknown, or other
  misc_difference 159: note = a, c, u, g, unknown, or other
  misc_difference 160: note = a, c, u, g, unknown, or other
  misc_difference 164: note = a, c, u, g, unknown, or other
  misc_difference 178: note = a, c, u, g, unknown, or other
  misc_difference 186: note = a, c, u, g, unknown, or other
  misc_difference 187: note = a, c, u, g, unknown, or other
  misc_difference 188: note = a, c, u, g, unknown, or other
  misc_difference 190: note = a, c, u, g, unknown, or other
  misc_difference 192: note = a, c, u, g, unknown, or other
  misc_difference 193: note = a, c, u, g, unknown, or other
  misc_difference 199: note = a, c, u, g, unknown, or other
  misc_difference 200: note = a, c, u, g, unknown, or other
  misc_difference 201: note = a, c, u, g, unknown, or other
  misc_difference 207: note = a, c, u, g, unknown, or other
  misc_difference 208: note = a, c, u, g, unknown, or other
  misc_difference 218: note = a, c, u, g, unknown, or other
  misc_difference 219: note = a, c, u, g, unknown, or other
  misc_difference 223: note = a, c, u, g, unknown, or other
  misc_difference 224: note = a, c, u, g, unknown, or other
nnnnnncyyrycygrttttgcgaynrcngannnnngatgacrtraacggcnyancggccygrcrrrnancctgrnnnnnaaanyrgcyyynrargcygnnnnnnttttnaggnyyrycrggcgcgrytctcatcrnggngcgggnnnnnnyncccannnngacnccggatagattyrngcaagccnnnynynnyrycrnnnrycrrnnttgcaaaarnnrggnngaccat

SEQ ID NO: 795353 - RNA, 225 nt, unidentified
  source 1..225: mol_type = unassigned RNA; note = ISSm1
  misc_difference 1: note = a, c, u, g, unknown, or other
  misc_difference 2: note = a, c, u, g, unknown, or other
  misc_difference 3: note = a, c, u, g, unknown, or other
  misc_difference 4: note = a, c, u, g, unknown, or other
  misc_difference 5: note = a, c, u, g, unknown, or other
  misc_difference 6: note = a, c, u, g, unknown, or other
  misc_difference 7: note = a, c, u, g, unknown, or other
  misc_difference 8: note = a, c, u, g, unknown, or other
  misc_difference 9: note = a, c, u, g, unknown, or other
  misc_difference 10: note = a, c, u, g, unknown, or other
  misc_difference 11: note = a, c, u, g, unknown, or other
  misc_difference 12: note = a, c, u, g, unknown, or other
  misc_difference 13: note = a, c, u, g, unknown, or other
  misc_difference 14: note = a, c, u, g, unknown, or other
  misc_difference 15: note = a, c, u, g, unknown, or other
  misc_difference 16: note = a, c, u, g, unknown, or other
  misc_difference 17: note = a, c, u, g, unknown, or other
  misc_difference 18: note = a, c, u, g, unknown, or other
  misc_difference 19: note = a, c, u, g, unknown, or other
  misc_difference 20: note = a, c, u, g, unknown, or other
  misc_difference 21: note = a, c, u, g, unknown, or other
  misc_difference 22: note = a, c, u, g, unknown, or other
  misc_difference 23: note = a, c, u, g, unknown, or other
  misc_difference 24: note = a, c, u, g, unknown, or other
  misc_difference 25: note = a, c, u, g, unknown, or other
  misc_difference 31: note = a, c, u, g, unknown, or other
  misc_difference 32: note = a, c, u, g, unknown, or other
  misc_difference 35: note = a, c, u, g, unknown, or other
  misc_difference 38: note = a, c, u, g, unknown, or other
  misc_difference 41: note = a, c, u, g, unknown, or other
  misc_difference 42: note = a, c, u, g, unknown, or other
  misc_difference 52: note = a, c, u, g, unknown, or other
  misc_difference 54: note = a, c, u, g, unknown, or other
  misc_difference 55: note = a, c, u, g, unknown, or other
  misc_difference 56: note = a, c, u, g, unknown, or other
  misc_difference 57: note = a, c, u, g, unknown, or other
  misc_difference 73: note = a, c, u, g, unknown, or other
  misc_difference 77: note = a, c, u, g, unknown, or other
  misc_difference 79: note = a, c, u, g, unknown, or other
  misc_difference 85: note = a, c, u, g, unknown, or other
  misc_difference 87: note = a, c, u, g, unknown, or other
  misc_difference 89: note = a, c, u, g, unknown, or other
  misc_difference 90: note = a, c, u, g, unknown, or other
  misc_difference 91: note = a, c, u, g, unknown, or other
  misc_difference 93: note = a, c, u, g, unknown, or other
  misc_difference 94: note = a, c, u, g, unknown, or other
  misc_difference 95: note = a, c, u, g, unknown, or other
  misc_difference 100: note = a, c, u, g, unknown, or other
  misc_difference 101: note = a, c, u, g, unknown, or other
  misc_difference 102: note = a, c, u, g, unknown, or other
  misc_difference 103: note = a, c, u, g, unknown, or other
  misc_difference 104: note = a, c, u, g, unknown, or other
  misc_difference 106: note = a, c, u, g, unknown, or other
  misc_difference 107: note = a, c, u, g, unknown, or other
  misc_difference 120: note = a, c, u, g, unknown, or other
  misc_difference 130: note = a, c, u, g, unknown, or other
  misc_difference 155: note = a, c, u, g, unknown, or other
  misc_difference 158: note = a, c, u, g, unknown, or other
  misc_difference 159: note = a, c, u, g, unknown, or other
  misc_difference 160: note = a, c, u, g, unknown, or other
  misc_difference 161: note = a, c, u, g, unknown, or other
  misc_difference 162: note = a, c, u, g, unknown, or other
  misc_difference 165: note = a, c, u, g, unknown, or other
  misc_difference 168: note = a, c, u, g, unknown, or other
  misc_difference 177: note = a, c, u, g, unknown, or other
  misc_difference 185: note = a, c, u, g, unknown, or other
  misc_difference 195: note = a, c, u, g, unknown, or other
  misc_difference 197: note = a, c, u, g, unknown, or other
  misc_difference 198: note = a, c, u, g, unknown, or other
  misc_difference 202: note = a, c, u, g, unknown, or other
  misc_difference 204: note = a, c, u, g, unknown, or other
  misc_difference 207: note = a, c, u, g, unknown, or other
  misc_difference 208: note = a, c, u, g, unknown, or other
  misc_difference 209: note = a, c, u, g, unknown, or other
  misc_difference 213: note = a, c, u, g, unknown, or other
  misc_difference 214: note = a, c, u, g, unknown, or other
  misc_difference 215: note = a, c, u, g, unknown, or other
  misc_difference 218: note = a, c, u, g, unknown, or other
  misc_difference 220: note = a, c, u, g, unknown, or other
  misc_difference 221: note = a, c, u, g, unknown, or other
  misc_difference 222: note = a, c, u, g, unknown, or other
  misc_difference 224: note = a, c, u, g, unknown, or other
  misc_difference 225: note = a, c, u, g, unknown, or other
nnnnnnnnnnnnnnnnnnnnnnnnnycryynntgnrcngcnngcgttgatgngnnnngggttggaccygcgynrggnrnryctgnynannnynnnrggrnnnnnrnnyycgrctarcganygaggyccyngcgygcgtctttcatcagggtccgngynnnnngcncanyatgaccgnttgtagtnyygcrgtccnynnyctnynyrnnnrrynnnrynrnnnrnn

SEQ ID NO: 795354 - RNA, 195 nt, unidentified
  source 1..195: mol_type = unassigned RNA; note = ISMno29
  misc_difference 1: note = a, c, u, g, unknown, or other
  misc_difference 2: note = a, c, u, g, unknown, or other
  misc_difference 3: note = a, c, u, g, unknown, or other
  misc_difference 4: note = a, c, u, g, unknown, or other
  misc_difference 17: note = a, c, u, g, unknown, or other
  misc_difference 19: note = a, c, u, g, unknown, or other
  misc_difference 20: note = a, c, u, g, unknown, or other
  misc_difference 21: note = a, c, u, g, unknown, or other
  misc_difference 22: note = a, c, u, g, unknown, or other
  misc_difference 24: note = a, c, u, g, unknown, or other
  misc_difference 28: note = a, c, u, g, unknown, or other
  misc_difference 32: note = a, c, u, g, unknown, or other
  misc_difference 35: note = a, c, u, g, unknown, or other
  misc_difference 36: note = a, c, u, g, unknown, or other
  misc_difference 37: note = a, c, u, g, unknown, or other
  misc_difference 39: note = a, c, u, g, unknown, or other
  misc_difference 40: note = a, c, u, g, unknown, or other
  misc_difference 41: note = a, c, u, g, unknown, or other
  misc_difference 42: note = a, c, u, g, unknown, or other
  misc_difference 44: note = a, c, u, g, unknown, or other
  misc_difference 46: note = a, c, u, g, unknown, or other
  misc_difference 49: note = a, c, u, g, unknown, or other
  misc_difference 50: note = a, c, u, g, unknown, or other
  misc_difference 53: note = a, c, u, g, unknown, or other
  misc_difference 54: note = a, c, u, g, unknown, or other
  misc_difference 57: note = a, c, u, g, unknown, or other
  misc_difference 58: note = a, c, u, g, unknown, or other
  misc_difference 69: note = a, c, u, g, unknown, or other
  misc_difference 70: note = a, c, u, g, unknown, or other
  misc_difference 73: note = a, c, u, g, unknown, or other
  misc_difference 74: note = a, c, u, g, unknown, or other
  misc_difference 77: note = a, c, u, g, unknown, or other
  misc_difference 78: note = a, c, u, g, unknown, or other
  misc_difference 96: note = a, c, u, g, unknown, or other
  misc_difference 97: note = a, c, u, g, unknown, or other
  misc_difference 98: note = a, c, u, g, unknown, or other
  misc_difference 99: note = a, c, u, g, unknown, or other
  misc_difference 104: note = a, c, u, g, unknown, or other
  misc_difference 108: note = a, c, u, g, unknown, or other
  misc_difference 109: note = a, c, u, g, unknown, or other
  misc_difference 110: note = a, c, u, g, unknown, or other
  misc_difference 111: note = a, c, u, g, unknown, or other
  misc_difference 113: note = a, c, u, g, unknown, or other
  misc_difference 122: note = a, c, u, g, unknown, or other
  misc_difference 127: note = a, c, u, g, unknown, or other
  misc_difference 144: note = a, c, u, g, unknown, or other
  misc_difference 147: note = a, c, u, g, unknown, or other
  misc_difference 175: note = a, c, u, g, unknown, or other
nnnncccttgcatgttnrnnnnrncgantcrnygnnnrnnnnrngnygnnycnnggnnggyggccrycnnccnngrnncggryggrcgggaccgynnnncccynggynnnngnrccgyggrngagcntggtccgyccgyccytngcncttgtcctgaacagatgayrgggagcrngtcccgcatgcaaggcaagg

SEQ ID NO: 795355 - RNA, 177 nt, unidentified
  source 1..177: mol_type = unassigned RNA; note = ISAli16
  misc_difference 1: note = a, c, u, g, unknown, or other
  misc_difference 2: note = a, c, u, g, unknown, or other
  misc_difference 3: note = a, c, u, g, unknown, or other
  misc_difference 4: note = a, c, u, g, unknown, or other
  misc_difference 5: note = a, c, u, g, unknown, or other
  misc_difference 6: note = a, c, u, g, unknown, or other
  misc_difference 7: note = a, c, u, g, unknown, or other
  misc_difference 8: note = a, c, u, g, unknown, or other
  misc_difference 9: note = a, c, u, g, unknown, or other
  misc_difference 11: note = a, c, u, g, unknown, or other
  misc_difference 12: note = a, c, u, g, unknown, or other
  misc_difference 13: note = a, c, u, g, unknown, or other
  misc_difference 14: note = a, c, u, g, unknown, or other
  misc_difference 15: note = a, c, u, g, unknown, or other
  misc_difference 17: note = a, c, u, g, unknown, or other
  misc_difference 18: note = a, c, u, g, unknown, or other
  misc_difference 19: note = a, c, u, g, unknown, or other
  misc_difference 20: note = a, c, u, g, unknown, or other
  misc_difference 21: note = a, c, u, g, unknown, or other
  misc_difference 22: note = a, c, u, g, unknown, or other
  misc_difference 23: note = a, c, u, g, unknown, or other
  misc_difference 24: note = a, c, u, g, unknown, or other
  misc_difference 25: note = a, c, u, g, unknown, or other
  misc_difference 26: note = a, c, u, g, unknown, or other
  misc_difference 27: note = a, c, u, g, unknown, or other
  misc_difference 28: note = a, c, u, g, unknown, or other
  misc_difference 29: note = a, c, u, g, unknown, or other
  misc_difference 30: note = a, c, u, g, unknown, or other
  misc_difference 31: note = a, c, u, g, unknown, or other
  misc_difference 32: note = a, c, u, g, unknown, or other
  misc_difference 33: note = a, c, u, g, unknown, or other
  misc_difference 34: note = a, c, u, g, unknown, or other
  misc_difference 35: note = a, c, u, g, unknown, or other
  misc_difference 37: note = a, c, u, g, unknown, or other
  misc_difference 40: note = a, c, u, g, unknown, or other
  misc_difference 44: note = a, c, u, g, unknown, or other
  misc_difference 47: note = a, c, u, g, unknown, or other
  misc_difference 51: note = a, c, u, g, unknown, or other
  misc_difference 52: note = a, c, u, g, unknown, or other
  misc_difference 53: note = a, c, u, g, unknown, or other
  misc_difference 54: note = a, c, u, g, unknown, or other
  misc_difference 55: note = a, c, u, g, unknown, or other
  misc_difference 56: note = a, c, u, g, unknown, or other
  misc_difference 59: note = a, c, u, g, unknown, or other
  misc_difference 60: note = a, c, u, g, unknown, or other
  misc_difference 63: note = a, c, u, g, unknown, or other
  misc_difference 64: note = a, c, u, g, unknown, or other
  misc_difference 65: note = a, c, u, g, unknown, or other
  misc_difference 66: note = a, c, u, g, unknown, or other
  misc_difference 67: note = a, c, u, g, unknown, or other
  misc_difference 68: note = a, c, u, g, unknown, or other
  misc_difference 72: note = a, c, u, g, unknown, or other
  misc_difference 77: note = a, c, u, g, unknown, or other
  misc_difference 78: note = a, c, u, g, unknown, or other
  misc_difference 79: note = a, c, u, g, unknown, or other
  misc_difference 80: note = a, c, u, g, unknown, or other
  misc_difference 81: note = a, c, u, g, unknown, or other
  misc_difference 85: note = a, c, u, g, unknown, or other
  misc_difference 86: note = a, c, u, g, unknown, or other
  misc_difference 89: note = a, c, u, g, unknown, or other
  misc_difference 90: note = a, c, u, g, unknown, or other
  misc_difference 92: note = a, c, u, g, unknown, or other
  misc_difference 95: note = a, c, u, g, unknown, or other
  misc_difference 96: note = a, c, u, g, unknown, or other
  misc_difference 101: note = a, c, u, g, unknown, or other
  misc_difference 102: note = a, c, u, g, unknown, or other
  misc_difference 104: note = a, c, u, g, unknown, or other
  misc_difference 108: note = a, c, u, g, unknown, or other
  misc_difference 110: note = a, c, u, g, unknown, or other
  misc_difference 128: note = a, c, u, g, unknown, or other
  misc_difference 134: note = a, c, u, g, unknown, or other
  misc_difference 135: note = a, c, u, g, unknown, or other
  misc_difference 136: note = a, c, u, g, unknown, or other
  misc_difference 144: note = a, c, u, g, unknown, or other
  misc_difference 145: note = a, c, u, g, unknown, or other
  misc_difference 147: note = a, c, u, g, unknown, or other
  misc_difference 148: note = a, c, u, g, unknown, or other
  misc_difference 155: note = a, c, u, g, unknown, or other
  misc_difference 156: note = a, c, u, g, unknown, or other
  misc_difference 160: note = a, c, u, g, unknown, or other
  misc_difference 161: note = a, c, u, g, unknown, or other
  misc_difference 162: note = a, c, u, g, unknown, or other
  misc_difference 163: note = a, c, u, g, unknown, or other
  misc_difference 164: note = a, c, u, g, unknown, or other
  misc_difference 166: note = a, c, u, g, unknown, or other
  misc_difference 169: note = a, c, u, g, unknown, or other
  misc_difference 172: note = a, c, u, g, unknown, or other
  misc_difference 173: note = a, c, u, g, unknown, or other
  misc_difference 175: note = a, c, u, g, unknown, or other
  misc_difference 176: note = a, c, u, g, unknown, or other
  misc_difference 177: note = a, c, u, g, unknown, or other
nnnnnnnnnrnnnnngnnnnnnnnnnnnnnnnnnnrnrrnygrnagnccgnnnnnnyynnggnnnnnnrarnccgynnnnnagcnnggnncnyynnyyrynnynyycnynrarcccgaacagtygcyngggyynnnragcccgnnynngcaaggnngggnnnnnrngrnggnnynnn

SEQ ID NO: 795356 - RNA, 229 nt, unidentified
  source 1..229: mol_type = unassigned RNA; note = ISPa21
  misc_difference 1: note = a, c, u, g, unknown, or other
  misc_difference 4: note = a, c, u, g, unknown, or other
  misc_difference 5: note = a, c, u, g, unknown, or other
  misc_difference 6: note = a, c, u, g, unknown, or other
  misc_difference 13: note = a, c, u, g, unknown, or other
  misc_difference 14: note = a, c, u, g, unknown, or other
  misc_difference 15: note = a, c, u, g, unknown, or other
  misc_difference 17: note = a, c, u, g, unknown, or other
  misc_difference 19: note = a, c, u, g, unknown, or other
  misc_difference 20: note = a, c, u, g, unknown, or other
  misc_difference 21: note = a, c, u, g, unknown, or other
  misc_difference 22: note = a, c, u, g, unknown, or other
  misc_difference 25: note = a, c, u, g, unknown, or other
  misc_difference 26: note = a, c, u, g, unknown, or other
  misc_difference 27: note = a, c, u, g, unknown, or other
  misc_difference 28: note = a, c, u, g, unknown, or other
  misc_difference 29: note = a, c, u, g, unknown, or other
  misc_difference 36: note = a, c, u, g, unknown, or other
  misc_difference 37: note = a, c, u, g, unknown, or other
  misc_difference 38: note = a, c, u, g, unknown, or other
  misc_difference 40: note = a, c, u, g, unknown, or other
  misc_difference 44: note = a, c, u, g, unknown, or other
  misc_difference 45: note = a, c, u, g, unknown, or other
  misc_difference 47: note = a, c, u, g, unknown, or other
  misc_difference 55: note = a, c, u, g, unknown, or other
  misc_difference 59: note = a, c, u, g, unknown, or other
  misc_difference 60: note = a, c, u, g, unknown, or other
  misc_difference 72: note = a, c, u, g, unknown, or other
  misc_difference 73: note = a, c, u, g, unknown, or other
  misc_difference 74: note = a, c, u, g, unknown, or other
  misc_difference 75: note = a, c, u, g, unknown, or other
  misc_difference 76: note = a, c, u, g, unknown, or other
  misc_difference 83: note = a, c, u, g, unknown, or other
  misc_difference 84: note = a, c, u, g, unknown, or other
  misc_difference 85: note = a, c, u, g, unknown, or other
  misc_difference 93: note = a, c, u, g, unknown, or other
  misc_difference 95: note = a, c, u, g, unknown, or other
  misc_difference 96: note = a, c, u, g, unknown, or other
  misc_difference 97: note = a, c, u, g, unknown, or other
  misc_difference 112: note = a, c, u, g, unknown, or other
  misc_difference 121: note = a, c, u, g, unknown, or other
  misc_difference 128: note = a, c, u, g, unknown, or other
  misc_difference 135: note = a, c, u, g, unknown, or other
  misc_difference 139: note = a, c, u, g, unknown, or other
  misc_difference 140: note = a, c, u, g, unknown, or other
  misc_difference 141: note = a, c, u, g, unknown, or other
  misc_difference 142: note = a, c, u, g, unknown, or other
  misc_difference 143: note = a, c, u, g, unknown, or other
  misc_difference 144: note = a, c, u, g, unknown, or other
  misc_difference 145: note = a, c, u, g, unknown, or other
  misc_difference 146: note = a, c, u, g, unknown, or other
  misc_difference 148: note = a, c, u, g, unknown, or other
  misc_difference 153: note = a, c, u, g, unknown, or other
  misc_difference 154: note = a, c, u, g, unknown, or other
  misc_difference 155: note = a, c, u, g, unknown, or other
  misc_difference 156: note = a, c, u, g, unknown, or other
  misc_difference 157: note = a, c, u, g, unknown, or other
  misc_difference 166: note = a, c, u, g, unknown, or other
  misc_difference 173: note = a, c, u, g, unknown, or other
  misc_difference 181: note = a, c, u, g, unknown, or other
  misc_difference 182: note = a, c, u, g, unknown, or other
  misc_difference 183: note = a, c, u, g, unknown, or other
  misc_difference 186: note = a, c, u, g, unknown, or other
  misc_difference 187: note = a, c, u, g, unknown, or other
  misc_difference 188: note = a, c, u, g, unknown, or other
  misc_difference 189: note = a, c, u, g, unknown, or other
  misc_difference 194: note = a, c, u, g, unknown, or other
  misc_difference 195: note = a, c, u, g, unknown, or other
  misc_difference 196: note = a, c, u, g, unknown, or other
  misc_difference 197: note = a, c, u, g, unknown, or other
  misc_difference 198: note = a, c, u, g, unknown, or other
  misc_difference 200: note = a, c, u, g, unknown, or other
  misc_difference 201: note = a, c, u, g, unknown, or other
  misc_difference 202: note = a, c, u, g, unknown, or other
  misc_difference 203: note = a, c, u, g, unknown, or other
  misc_difference 205: note = a, c, u, g, unknown, or other
  misc_difference 207: note = a, c, u, g, unknown, or other
  misc_difference 208: note = a, c, u, g, unknown, or other
  misc_difference 209: note = a, c, u, g, unknown, or other
  misc_difference 211: note = a, c, u, g, unknown, or other
  misc_difference 212: note = a, c, u, g, unknown, or other
  misc_difference 213: note = a, c, u, g, unknown, or other
  misc_difference 214: note = a, c, u, g, unknown, or other
  misc_difference 218: note = a, c, u, g, unknown, or other
nycnnnrrytgynnngnrnnnncrnnnnnatgrcrnnnyngrynngnccrryrynrgrnnargccgataacnnnnntggycynnnraggycgnynnnarcgattggcycccnrygcgcgrnytycatnrtggccnggrnnnnnnnnrnyccannnnnaggccgranatacgrntgcarycnnnyynnnnygycnnnnnynnnnynynnnrnnnnyygnrrgrggagycc

SEQ ID NO: 795357 - RNA, 190 nt, unidentified
  source 1..190: mol_type = unassigned RNA; note = ISCARN57
  misc_difference 3: note = a, c, u, g, unknown, or other
  misc_difference 4: note = a, c, u, g, unknown, or other
  misc_difference 5: note = a, c, u, g, unknown, or other
  misc_difference 6: note = a, c, u, g, unknown, or other
  misc_difference 7: note = a, c, u, g, unknown, or other
  misc_difference 9: note = a, c, u, g, unknown, or other
  misc_difference 11: note = a, c, u, g, unknown, or other
  misc_difference 13: note = a, c, u, g, unknown, or other
  misc_difference 14: note = a, c, u, g, unknown, or other
  misc_difference 15: note = a, c, u, g, unknown, or other
  misc_difference 16: note = a, c, u, g, unknown, or other
  misc_difference 17: note = a, c, u, g, unknown, or other
  misc_difference 18: note = a, c, u, g, unknown, or other
  misc_difference 19: note = a, c, u, g, unknown, or other
  misc_difference 21: note = a, c, u, g, unknown, or other
  misc_difference 22: note = a, c, u, g, unknown, or other
  misc_difference 24: note = a, c, u, g, unknown, or other
  misc_difference 25: note = a, c, u, g, unknown, or other
  misc_difference 27: note = a, c, u, g, unknown, or other
  misc_difference 28: note = a, c, u, g, unknown, or other
  misc_difference 29: note = a, c, u, g, unknown, or other
  misc_difference 30: note = a, c, u, g, unknown, or other
  misc_difference 31: note = a, c, u, g, unknown, or other
  misc_difference 32: note = a, c, u, g, unknown, or other
  misc_difference 33: note = a, c, u, g, unknown, or other
  misc_difference 35: note = a, c, u, g, unknown, or other
  misc_difference 37: note = a, c, u, g, unknown, or other
  misc_difference 41: note = a, c, u, g, unknown, or other
  misc_difference 42: note = a, c, u, g, unknown, or other
  misc_difference 44: note = a, c, u, g, unknown, or other
  misc_difference 49: note = a, c, u, g, unknown, or other
  misc_difference 50: note = a, c, u, g, unknown, or other
  misc_difference 51: note = a, c, u, g, unknown, or other
  misc_difference 52: note = a, c, u, g, unknown, or other
  misc_difference 53: note = a, c, u, g, unknown, or other
  misc_difference 54: note = a, c, u, g, unknown, or other
  misc_difference 55: note = a, c, u, g, unknown, or other
  misc_difference 56: note = a, c, u, g, unknown, or other
  misc_difference 59: note = a, c, u, g, unknown, or other
  misc_difference 65: note = a, c, u, g, unknown, or other
  misc_difference 66: note = a, c, u, g, unknown, or other
  misc_difference 74: note = a, c, u, g, unknown, or other
  misc_difference 75: note = a, c, u, g, unknown, or other
  misc_difference 76: note = a, c, u, g, unknown, or other
  misc_difference 77: note = a, c, u, g, unknown, or other
  misc_difference 78: note = a, c, u, g, unknown, or other
  misc_difference 79: note = a, c, u, g, unknown, or other
  misc_difference 84: note = a, c, u, g, unknown, or other
  misc_difference 88: note = a, c, u, g, unknown, or other
  misc_difference 89: note = a, c, u, g, unknown, or other
  misc_difference 93: note = a, c, u, g, unknown, or other
  misc_difference 95: note = a, c, u, g, unknown, or other
  misc_difference 96: note = a, c, u, g, unknown, or other
  misc_difference 98: note = a, c, u, g, unknown, or other
  misc_difference 99: note = a, c, u, g, unknown, or other
  misc_difference 100: note = a, c, u, g, unknown, or other
  misc_difference 101: note = a, c, u, g, unknown, or other
  misc_difference 102: note = a, c, u, g, unknown, or other
  misc_difference 103: note = a, c, u, g, unknown, or other
  misc_difference 104: note = a, c, u, g, unknown, or other
  misc_difference 108: note = a, c, u, g, unknown, or other
  misc_difference 109: note = a, c, u, g, unknown, or other
  misc_difference 110: note = a, c, u, g, unknown, or other
  misc_difference 111: note = a, c, u, g, unknown, or other
  misc_difference 112: note = a, c, u, g, unknown, or other
  misc_difference 129: note = a, c, u, g, unknown, or other
  misc_difference 130: note = a, c, u, g, unknown, or other
  misc_difference 135: note = a, c, u, g, unknown, or other
  misc_difference 136: note = a, c, u, g, unknown, or other
  misc_difference 138: note = a, c, u, g, unknown, or other
  misc_difference 140: note = a, c, u, g, unknown, or other
  misc_difference 141: note = a, c, u, g, unknown, or other
  misc_difference 142: note = a, c, u, g, unknown, or other
  misc_difference 143: note = a, c, u, g, unknown, or other
  misc_difference 144: note = a, c, u, g, unknown, or other
  misc_difference 145: note = a, c, u, g, unknown, or other
  misc_difference 147: note = a, c, u, g, unknown, or other
  misc_difference 148: note = a, c, u, g, unknown, or other
  misc_difference 156: note = a, c, u, g, unknown, or other
  misc_difference 159: note = a, c, u, g, unknown, or other
  misc_difference 160: note = a, c, u, g, unknown, or other
  misc_difference 163: note = a, c, u, g, unknown, or other
  misc_difference 167: note = a, c, u, g, unknown, or other
  misc_difference 173: note = a, c, u, g, unknown, or other
  misc_difference 174: note = a, c, u, g, unknown, or other
  misc_difference 175: note = a, c, u, g, unknown, or other
  misc_difference 176: note = a, c, u, g, unknown, or other
  misc_difference 180: note = a, c, u, g, unknown, or other
  misc_difference 181: note = a, c, u, g, unknown, or other
  misc_difference 182: note = a, c, u, g, unknown, or other
  misc_difference 183: note = a, c, u, g, unknown, or other
  misc_difference 186: note = a, c, u, g, unknown, or other
  misc_difference 187: note = a, c, u, g, unknown, or other
  misc_difference 188: note = a, c, u, g, unknown, or other
  misc_difference 189: note = a, c, u, g, unknown, or other
  misc_difference 190: note = a, c, u, g, unknown, or other
rrnnnnnrnynrnnnnnnnynnynnynnnnnnnrnrnyggnnanryygnnnnnnnnytnrgrcynngagyyygnnnnnnagatnrgynnccrnynnynnnnnnnygynnnnnragrycgracrgtatcnnrrgcnnynynnnnnnrnnragcyygnatnnrynagrnygrycnnnnryrnnnnrynnnnn

SEQ ID NO: 795358 - RNA, 221 nt, unidentified
  source 1..221: mol_type = unassigned RNA; note = ISPye25
  misc_difference 1: note = a, c, u, g, unknown, or other
  misc_difference 2: note = a, c, u, g, unknown, or other
  misc_difference 3: note = a, c, u, g, unknown, or other
  misc_difference 5: note = a, c, u, g, unknown, or other
  misc_difference 7: note = a, c, u, g, unknown, or other
  misc_difference 9: note = a, c, u, g, unknown, or other
  misc_difference 11: note = a, c, u, g, unknown, or other
  misc_difference 12: note = a, c, u, g, unknown, or other
  misc_difference 15: note = a, c, u, g, unknown, or other
  misc_difference 16: note = a, c, u, g, unknown, or other
  misc_difference 17: note = a, c, u, g, unknown, or other
  misc_difference 18: note = a, c, u, g, unknown, or other
  misc_difference 19: note = a, c, u, g, unknown, or other
  misc_difference 23: note = a, c, u, g, unknown, or other
  misc_difference 25: note = a, c, u, g, unknown, or other
  misc_difference 27: note = a, c, u, g, unknown, or other
  misc_difference 29: note = a, c, u, g, unknown, or other
  misc_difference 31: note = a, c, u, g, unknown, or other
  misc_difference 42: note = a, c, u, g, unknown, or other
  misc_difference 43: note = a, c, u, g, unknown, or other
  misc_difference 44: note = a, c, u, g, unknown, or other
  misc_difference 70: note = a, c, u, g, unknown, or other
  misc_difference 71: note = a, c, u, g, unknown, or other
  misc_difference 72: note = a, c, u, g, unknown, or other
  misc_difference 73: note = a, c, u, g, unknown, or other
  misc_difference 74: note = a, c, u, g, unknown, or other
  misc_difference 75: note = a, c, u, g, unknown, or other
  misc_difference 76: note = a, c, u, g, unknown, or other
  misc_difference 77: note = a, c, u, g, unknown, or other
  misc_difference 78: note = a, c, u, g, unknown, or other
  misc_difference 80: note = a, c, u, g, unknown, or other
  misc_difference 83: note = a, c, u, g, unknown, or other
  misc_difference 89: note = a, c, u, g, unknown, or other
  misc_difference 90: note = a, c, u, g, unknown, or other
  misc_difference 91: note = a, c, u, g, unknown, or other
  misc_difference 92: note = a, c, u, g, unknown, or other
  misc_difference 93: note = a, c, u, g, unknown, or other
  misc_difference 94: note = a, c, u, g, unknown, or other
  misc_difference 95: note = a, c, u, g, unknown, or other
  misc_difference 96: note = a, c, u, g, unknown, or other
  misc_difference 107: note = a, c, u, g, unknown, or other
  misc_difference 108: note = a, c, u, g, unknown, or other
  misc_difference 109: note = a, c, u, g, unknown, or other
  misc_difference 110: note = a, c, u, g, unknown, or other
  misc_difference 111: note = a, c, u, g, unknown, or other
  misc_difference 116: note = a, c, u, g, unknown, or other
  misc_difference 122: note = a, c, u, g, unknown, or other
  misc_difference 124: note = a, c, u, g, unknown, or other
  misc_difference 128: note = a, c, u, g, unknown, or other
  misc_difference 133: note = a, c, u, g, unknown, or other
  misc_difference 134: note = a, c, u, g, unknown, or other
  misc_difference 140: note = a, c, u, g, unknown, or other
  misc_difference 146: note = a, c, u, g, unknown, or other
  misc_difference 158: note = a, c, u, g, unknown, or other
  misc_difference 159: note = a, c, u, g, unknown, or other
  misc_difference 160: note = a, c, u, g, unknown, or other
  misc_difference 184: note = a, c, u, g, unknown, or other
  misc_difference 185: note = a, c, u, g, unknown, or other
  misc_difference 186: note = a, c, u, g, unknown, or other
  misc_difference 187: note = a, c, u, g, unknown, or other
  misc_difference 192: note = a, c, u, g, unknown, or other
  misc_difference 194: note = a, c, u, g, unknown, or other
  misc_difference 195: note = a, c, u, g, unknown, or other
  misc_difference 199: note = a, c, u, g, unknown, or other
  misc_difference 200: note = a, c, u, g, unknown, or other
  misc_difference 204: note = a, c, u, g, unknown, or other
  misc_difference 205: note = a, c, u, g, unknown, or other
  misc_difference 206: note = a, c, u, g, unknown, or other
  misc_difference 207: note = a, c, u, g, unknown, or other
  misc_difference 208: note = a, c, u, g, unknown, or other
  misc_difference 209: note = a, c, u, g, unknown, or other
  misc_difference 210: note = a, c, u, g, unknown, or other
  misc_difference 211: note = a, c, u, g, unknown, or other
  misc_difference 212: note = a, c, u, g, unknown, or other
  misc_difference 213: note = a, c, u, g, unknown, or other
  misc_difference 214: note = a, c, u, g, unknown, or other
  misc_difference 217: note = a, c, u, g, unknown, or other
  misc_difference 220: note = a, c, u, g, unknown, or other
  misc_difference 221: note = a, c, u, g, unknown, or other
nnnyngnrnynngcnnnnnrrynyngnynynycgargtcccnnncygggacgyggtyccgrygaygccgnnnnnnnnnyngyngycrrnnnnnnnnyygagyacgcnnnnnagatnggcrcncnggrnyyrynnyrracnrgcatnrygtggcrgccnnngcgcygacyacggacrgaagcaynnnnccggngnngrannyyrnnnnnnnnnnngynrynn

SEQ ID NO: 795359 - RNA, 236 nt, unidentified
  source 1..236: mol_type = unassigned RNA; note = ISMdi9
  misc_difference 1: note = a, c, u, g, unknown, or other
  misc_difference 2: note = a, c, u, g, unknown, or other
  misc_difference 3: note = a, c, u, g, unknown, or other
  misc_difference 4: note = a, c, u, g, unknown, or other
  misc_difference 10: note = a, c, u, g, unknown, or other
  misc_difference 11: note = a, c, u, g, unknown, or other
  misc_difference 14: note = a, c, u, g, unknown, or other
  misc_difference 16: note = a, c, u, g, unknown, or other
  misc_difference 17: note = a, c, u, g, unknown, or other
  misc_difference 18: note = a, c, u, g, unknown, or other
  misc_difference 19: note = a, c, u, g, unknown, or other
  misc_difference 20: note = a, c, u, g, unknown, or other
  misc_difference 24: note = a, c, u, g, unknown, or other
  misc_difference 32: note = a, c, u, g, unknown, or other
  misc_difference 33: note = a, c, u, g, unknown, or other
  misc_difference 55: note = a, c, u, g, unknown, or other
  misc_difference 56: note = a, c, u, g, unknown, or other
  misc_difference 60: note = a, c, u, g, unknown, or other
  misc_difference 73: note = a, c, u, g, unknown, or other
  misc_difference 74: note = a, c, u, g, unknown, or other
  misc_difference 75: note = a, c, u, g, unknown, or other
  misc_difference 76: note = a, c, u, g, unknown, or other
  misc_difference 77: note = a, c, u, g, unknown, or other
  misc_difference 78: note = a, c, u, g, unknown, or other
  misc_difference 79: note = a, c, u, g, unknown, or other
  misc_difference 80: note = a, c, u, g, unknown, or other
  misc_difference 83: note = a, c, u, g, unknown, or other
  misc_difference 88: note = a, c, u, g, unknown, or other
  misc_difference 89: note = a, c, u, g, unknown, or other
  misc_difference 90: note = a, c, u, g, unknown, or other
  misc_difference 91: note = a, c, u, g, unknown, or other
  misc_difference 92: note = a, c, u, g, unknown, or other
  misc_difference 93: note = a, c, u, g, unknown, or other
  misc_difference 94: note = a, c, u, g, unknown, or other
  misc_difference 95: note = a, c, u, g, unknown, or other
  misc_difference 96: note = a, c, u, g, unknown, or other
  misc_difference 97: note = a, c, u, g, unknown, or other
  misc_difference 98: note = a, c, u, g, unknown, or other
  misc_difference 99: note = a, c, u, g, unknown, or other
  misc_difference 100: note = a, c, u, g, unknown, or other
  misc_difference 110: note = a, c, u, g, unknown, or other
  misc_difference 112: note = a, c, u, g, unknown, or other
  misc_difference 119: note = a, c, u, g, unknown, or other
  misc_difference 129: note = a, c, u, g, unknown, or other
  misc_difference 134: note = a, c, u, g, unknown, or other
  misc_difference 135: note = a, c, u, g, unknown, or other
  misc_difference 142: note = a, c, u, g, unknown, or other
  misc_difference 159: note = a, c, u, g, unknown, or other
  misc_difference 160: note = a, c, u, g, unknown, or other
  misc_difference 161: note = a, c, u, g, unknown, or other
  misc_difference 187: note = a, c, u, g, unknown, or other
  misc_difference 188: note = a, c, u, g, unknown, or other
  misc_difference 198: note = a, c, u, g, unknown, or other
  misc_difference 202: note = a, c, u, g, unknown, or other
  misc_difference 203: note = a, c, u, g, unknown, or other
  misc_difference 204: note = a, c, u, g, unknown, or other
  misc_difference 207: note = a, c, u, g, unknown, or other
  misc_difference 208: note = a, c, u, g, unknown, or other
  misc_difference 209: note = a, c, u, g, unknown, or other
  misc_difference 211: note = a, c, u, g, unknown, or other
  misc_difference 223: note = a, c, u, g, unknown, or other
  misc_difference 224: note = a, c, u, g, unknown, or other
  misc_difference 225: note = a, c, u, g, unknown, or other
  misc_difference 226: note = a, c, u, g, unknown, or other
  misc_difference 227: note = a, c, u, g, unknown, or other
  misc_difference 228: note = a, c, u, g, unknown, or other
nnnnygrrgnnggnynnnnnrrynyygyyyynnygargtcccgtcgcygggacgnngrrnyyggyrargccgnnnnnnnnryngtggnnnnnnnnnnnnnrraycacgcnynyyagatnggcycrccgnytcynntctgayngcatrrtgtggcggcynnnrygcygaccacggacrgaagcaygannccggcgrcgngaynnnyrnnnrnrrrryttgacrnnnnnnrgcccryt

SEQ ID NO: 795360 - RNA, 274 nt, unidentified
  source 1..274: mol_type = unassigned RNA; note = ISPye46
  misc_difference 2: note = a, c, u, g, unknown, or other
  misc_difference 28: note = a, c, u, g, unknown, or other
  misc_difference 38: note = a, c, u, g, unknown, or other
  misc_difference 39: note = a, c, u, g, unknown, or other
  misc_difference 44: note = a, c, u, g, unknown, or other
  misc_difference 51: note = a, c, u, g, unknown, or other
  misc_difference 62: note = a, c, u, g, unknown, or other
  misc_difference 64: note = a, c, u, g, unknown, or other
  misc_difference 67: note = a, c, u, g, unknown, or other
  misc_difference 69: note = a, c, u, g, unknown, or other
  misc_difference 73: note = a, c, u, g, unknown, or other
  misc_difference 91: note = a, c, u, g, unknown, or other
  misc_difference 116: note = a, c, u, g, unknown, or other
  misc_difference 117: note = a, c, u, g, unknown, or other
  misc_difference 118: note = a, c, u, g, unknown, or other
  misc_difference 121: note = a, c, u, g, unknown, or other
  misc_difference 122: note = a, c, u, g, unknown, or other
  misc_difference 123: note = a, c, u, g, unknown, or other
  misc_difference 124: note = a, c, u, g, unknown, or other
  misc_difference 126: note = a, c, u, g, unknown, or other
  misc_difference 142: note = a, c, u, g, unknown, or other
  misc_difference 144: note = a, c, u, g, unknown, or other
  misc_difference 145: note = a, c, u, g, unknown, or other
  misc_difference 146: note = a, c, u, g, unknown, or other
  misc_difference 151: note = a, c, u, g, unknown, or other
  misc_difference 170: note = a, c, u, g, unknown, or other
  misc_difference 171: note = a, c, u, g, unknown, or other
  misc_difference 183: note = a, c, u, g, unknown, or other
  misc_difference 189: note = a, c, u, g, unknown, or other
  misc_difference 190: note = a, c, u, g, unknown, or other
  misc_difference 191: note = a, c, u, g, unknown, or other
  misc_difference 193: note = a, c, u, g, unknown, or other
  misc_difference 194: note = a, c, u, g, unknown, or other
  misc_difference 195: note = a, c, u, g, unknown, or other
  misc_difference 196: note = a, c, u, g, unknown, or other
  misc_difference 197: note = a, c, u, g, unknown, or other
  misc_difference 204: note = a, c, u, g, unknown, or other
  misc_difference 222: note = a, c, u, g, unknown, or other
  misc_difference 233: note = a, c, u, g, unknown, or other
  misc_difference 234: note = a, c, u, g, unknown, or other
  misc_difference 235: note = a, c, u, g, unknown, or other
  misc_difference 241: note = a, c, u, g, unknown, or other
  misc_difference 243: note = a, c, u, g, unknown, or other
  misc_difference 244: note = a, c, u, g, unknown, or other
  misc_difference 246: note = a, c, u, g, unknown, or other
  misc_difference 247: note = a, c, u, g, unknown, or other
  misc_difference 251: note = a, c, u, g, unknown, or other
  misc_difference 252: note = a, c, u, g, unknown, or other
  misc_difference 255: note = a, c, u, g, unknown, or other
  misc_difference 256: note = a, c, u, g, unknown, or other
  misc_difference 257: note = a, c, u, g, unknown, or other
  misc_difference 260: note = a, c, u, g, unknown, or other
  misc_difference 266: note = a, c, u, g, unknown, or other
  misc_difference 268: note = a, c, u, g, unknown, or other
  misc_difference 269: note = a, c, u, g, unknown, or other
  misc_difference 270: note = a, c, u, g, unknown, or other
  misc_difference 271: note = a, c, u, g, unknown, or other
  misc_difference 272: note = a, c, u, g, unknown, or other
ynrrgctccggyygyggcrgcrtarrynryyryrryynngrggnygtcgrnrrygyrrgrrngncrnrngrrnrgtatggcgcaacrgtcnrygagacgggrtcrgraraaccagnnnrynnnnrngygcyyygagcrcgynrnnnygryntggaycygrycyrcgaacnnccatacrggccngcggcnnnynnnnngycgcanyrraggccgracayatgncagcaycygannnygygcnrnnynnyyynnrrnnncyncttgcnynnnnnrg

SEQ ID NO: 795361 - RNA, 271 nt, unidentified
  source 1..271: mol_type = unassigned RNA; note = ISRsp4
  misc_difference 13: note = a, c, u, g, unknown, or other
  misc_difference 15: note = a, c, u, g, unknown, or other
  misc_difference 21: note = a, c, u, g, unknown, or other
  misc_difference 27: note = a, c, u, g, unknown, or other
  misc_difference 28: note = a, c, u, g, unknown, or other
  misc_difference 29: note = a, c, u, g, unknown, or other
  misc_difference 30: note = a, c, u, g, unknown, or other
  misc_difference 31: note = a, c, u, g, unknown, or other
  misc_difference 32: note = a, c, u, g, unknown, or other
  misc_difference 33: note = a, c, u, g, unknown, or other
  misc_difference 37: note = a, c, u, g, unknown, or other
  misc_difference 56: note = a, c, u, g, unknown, or other
  misc_difference 57: note = a, c, u, g, unknown, or other
  misc_difference 60: note = a, c, u, g, unknown, or other
  misc_difference 70: note = a, c, u, g, unknown, or other
  misc_difference 73: note = a, c, u, g, unknown, or other
  misc_difference 101: note = a, c, u, g, unknown, or other
  misc_difference 108: note = a, c, u, g, unknown, or other
  misc_difference 113: note = a, c, u, g, unknown, or other
  misc_difference 118: note = a, c, u, g, unknown, or other
  misc_difference 119: note = a, c, u, g, unknown, or other
  misc_difference 120: note = a, c, u, g, unknown, or other
  misc_difference 121: note = a, c, u, g, unknown, or other
  misc_difference 122: note = a, c, u, g, unknown, or other
  misc_difference 123: note = a, c, u, g, unknown, or other
  misc_difference 124: note = a, c, u, g, unknown, or other
  misc_difference 127: note = a, c, u, g, unknown, or other
  misc_difference 133: note = a, c, u, g, unknown, or other
  misc_difference 134: note = a, c, u, g, unknown, or other
  misc_difference 135: note = a, c, u, g, unknown, or other
  misc_difference 136: note = a, c, u, g, unknown, or other
  misc_difference 137: note = a, c, u, g, unknown, or other
  misc_difference 145: note = a, c, u, g, unknown, or other
  misc_difference 146: note = a, c, u, g, unknown, or other
  misc_difference 147: note = a, c, u, g, unknown, or other
  misc_difference 148: note = a, c, u, g, unknown, or other
  misc_difference 149: note = a, c, u, g, unknown, or other
  misc_difference 154: note = a, c, u, g, unknown, or other
  misc_difference 189: note = a, c, u, g, unknown, or other
  misc_difference 200: note = a, c, u, g, unknown, or other
  misc_difference 205: note = a, c, u, g, unknown, or other
  misc_difference 206: note = a, c, u, g, unknown, or other
  misc_difference 207: note = a, c, u, g, unknown, or other
  misc_difference 209: note = a, c, u, g, unknown, or other
  misc_difference 216: note = a, c, u, g, unknown, or other
  misc_difference 225: note = a, c, u, g, unknown, or other
  misc_difference 226: note = a, c, u, g, unknown, or other
  misc_difference 243: note = a, c, u, g, unknown, or other
  misc_difference 245: note = a, c, u, g, unknown, or other
  misc_difference 252: note = a, c, u, g, unknown, or other
  misc_difference 253: note = a, c, u, g, unknown, or other
  misc_difference 254: note = a, c, u, g, unknown, or other
  misc_difference 255: note = a, c, u, g, unknown, or other
  misc_difference 256: note = a, c, u, g, unknown, or other
  misc_difference 257: note = a, c, u, g, unknown, or other
  misc_difference 267: note = a, c, u, g, unknown, or other
  misc_difference 268: note = a, c, u, g, unknown, or other
trragatcrgccngncrcgrngrgcrnnnnnnnygcnrycgyrcygrgcygatgcnngancttgcargrnranragcagrtggygygatcgatcgatccrngrcrygngayanyccgnnnnnnncantggccnnnnnaggycgynnnnntgttnggarcycrygyygcggaaaccatcttggccrgcgnycryrtgygrncgcrnnnanaggccgnacatatgrnngcaagcgatcygrtcrnanyrcygynnnnnnycttgcrrgnnggr

SEQ ID NO: 795362 - RNA, 280 nt, unidentified
  source 1..280: mol_type = unassigned RNA; note = ISAar29
  misc_difference 1: note = a, c, u, g, unknown, or other
  misc_difference 2: note = a, c, u, g, unknown, or other
  misc_difference 5: note = a, c, u, g, unknown, or other
  misc_difference 6: note = a, c, u, g, unknown, or other
  misc_difference 7: note = a, c, u, g, unknown, or other
  misc_difference 8: note = a, c, u, g, unknown, or other
  misc_difference 36: note = a, c, u, g, unknown, or other
  misc_difference 37: note = a, c, u, g, unknown, or other
  misc_difference 54: note = a, c, u, g, unknown, or other
  misc_difference 56: note = a, c, u, g, unknown, or other
  misc_difference 57: note = a, c, u, g, unknown, or other
  misc_difference 60: note = a, c, u, g, unknown, or other
  misc_difference 69: note = a, c, u, g, unknown, or other
  misc_difference 70: note = a, c, u, g, unknown, or other
  misc_difference 71: note = a, c, u, g, unknown, or other
  misc_difference 72: note = a, c, u, g, unknown, or other
  misc_difference 73: note = a, c, u, g, unknown, or other
  misc_difference 74: note = a, c, u, g, unknown, or other
  misc_difference 75: note = a, c, u, g, unknown, or other
  misc_difference 76: note = a, c, u, g, unknown, or other
  misc_difference 77: note = a, c, u, g, unknown, or other
  misc_difference 78: note = a, c, u, g, unknown, or other
  misc_difference 85: note = a, c, u, g, unknown, or other
  misc_difference 86: note = a, c, u, g, unknown, or other
  misc_difference 87: note = a, c, u, g, unknown, or other
  misc_difference 88: note = a, c, u, g, unknown, or other
  misc_difference 89: note = a, c, u, g, unknown, or other
  misc_difference 98: note = a, c, u, g, unknown, or other
  misc_difference 99: note = a, c, u, g, unknown, or other
  misc_difference 100: note = a, c, u, g, unknown, or other
  misc_difference 101: note = a, c, u, g, unknown, or other
  misc_difference 102: note = a, c, u, g, unknown, or other
  misc_difference 103: note = a, c, u, g, unknown, or other
  misc_difference 106: note = a, c, u, g, unknown, or other
  misc_difference 114: note = a, c, u, g, unknown, or other
  misc_difference 115: note = a, c, u, g, unknown, or other
  misc_difference 117: note = a, c, u, g, unknown, or other
  misc_difference 118: note = a, c, u, g, unknown, or other
  misc_difference 121: note = a, c, u, g, unknown, or other
  misc_difference 122: note = a, c, u, g, unknown, or other
  misc_difference 125: note = a, c, u, g, unknown, or other
  misc_difference 137: note = a, c, u, g, unknown, or other
  misc_difference 138: note = a, c, u, g, unknown, or other
  misc_difference 177: note = a, c, u, g, unknown, or other
  misc_difference 181: note = a, c, u, g, unknown, or other
  misc_difference 182: note = a, c, u, g, unknown, or other
  misc_difference 183: note = a, c, u, g, unknown, or other
  misc_difference 184: note = a, c, u, g, unknown, or other
  misc_difference 188: note = a, c, u, g, unknown, or other
  misc_difference 204: note = a, c, u, g, unknown, or other
  misc_difference 205: note = a, c, u, g, unknown, or other
  misc_difference 225: note = a, c, u, g, unknown, or other
  misc_difference 245: note = a, c, u, g, unknown, or other
  misc_difference 246: note = a, c, u, g, unknown, or other
  misc_difference 247: note = a, c, u, g, unknown, or other
  misc_difference 255: note = a, c, u, g, unknown, or other
  misc_difference 256: note = a, c, u, g, unknown, or other
  misc_difference 259: note = a, c, u, g, unknown, or other
  misc_difference 260: note = a, c, u, g, unknown, or other
  misc_difference 265: note = a, c, u, g, unknown, or other
  misc_difference 267: note = a, c, u, g, unknown, or other
  misc_difference 268: note = a, c, u, g, unknown, or other
  misc_difference 269: note = a, c, u, g, unknown, or other
  misc_difference 270: note = a, c, u, g, unknown, or other
  misc_difference 278: note = a, c, u, g, unknown, or other
  misc_difference 279: note = a, c, u, g, unknown, or other
  misc_difference 280: note = a, c, u, g, unknown, or other
nntynnnnyggctggtcygggacyggctgrcrrgrnngryryyggycgyyyyrnynngrnygtgactcnnnnnnnnnntgrccynnnnnrgtgycytnnnnnnganytgtccrnnynnrrnnrgnyggccgryrccnnycyggcccacytcggtrrcytgatyagaagrytgyccrncyynnnnrrgnygtgrcycrtcacagnnytgyyccgrrgtgayyycyncccrgrcyggyrccggccrnnnrcggccrnnycnnryccnynnnnrgraaggnnn

SEQ ID NO: 795363 - RNA, 199 nt, unidentified
  source 1..199: mol_type = unassigned RNA; note = ISCARN26
  misc_difference 1: note = a, c, u, g, unknown, or other
  misc_difference 2: note = a, c, u, g, unknown, or other
  misc_difference 3: note = a, c, u, g, unknown, or other
  misc_difference 4: note = a, c, u, g, unknown, or other
  misc_difference 5: note = a, c, u, g, unknown, or other
  misc_difference 6: note = a, c, u, g, unknown, or other
  misc_difference 19: note = a, c, u, g, unknown, or other
  misc_difference 20: note = a, c, u, g, unknown, or other
  misc_difference 21: note = a, c, u, g, unknown, or other
  misc_difference 22: note = a, c, u, g, unknown, or other
  misc_difference 25: note = a, c, u, g, unknown, or other
  misc_difference 28: note = a, c, u, g, unknown, or other
  misc_difference 30: note = a, c, u, g, unknown, or other
  misc_difference 31: note = a, c, u, g, unknown, or other
  misc_difference 32: note = a, c, u, g, unknown, or other
  misc_difference 33: note = a, c, u, g, unknown, or other
  misc_difference 34: note = a, c, u, g, unknown, or other
  misc_difference 35: note = a, c, u, g, unknown, or other
  misc_difference 36: note = a, c, u, g, unknown, or other
  misc_difference 37: note = a, c, u, g, unknown, or other
  misc_difference 38: note = a, c, u, g, unknown, or other
  misc_difference 39: note = a, c, u, g, unknown, or other
  misc_difference 40: note = a, c, u, g, unknown, or other
  misc_difference 41: note = a, c, u, g, unknown, or other
  misc_difference 42: note = a, c, u, g, unknown, or other
  misc_difference 48: note = a, c, u, g, unknown, or other
  misc_difference 52: note = a, c, u, g, unknown, or other
  misc_difference 65: note = a, c, u, g, unknown, or other
  misc_difference 67: note = a, c, u, g, unknown, or other
  misc_difference 68: note = a, c, u, g, unknown, or other
  misc_difference 69: note = a, c, u, g, unknown, or other
  misc_difference 70: note = a, c, u, g, unknown, or other
  misc_difference 71: note = a, c, u, g, unknown, or other
  misc_difference 74: note = a, c, u, g, unknown, or other
  misc_difference 79: note = a, c, u, g, unknown, or other
  misc_difference 80: note = a, c, u, g, unknown, or other
  misc_difference 81: note = a, c, u, g, unknown, or other
  misc_difference 82: note = a, c, u, g, unknown, or other
  misc_difference 91: note = a, c, u, g, unknown, or other
  misc_difference 92: note = a, c, u, g, unknown, or other
  misc_difference 100: note = a, c, u, g, unknown, or other
  misc_difference 102: note = a, c, u, g, unknown, or other
  misc_difference 103: note = a, c, u, g, unknown, or other
  misc_difference 112: note = a, c, u, g, unknown, or other
  misc_difference 113: note = a, c, u, g, unknown, or other
  misc_difference 114: note = a, c, u, g, unknown, or other
  misc_difference 129: note = a, c, u, g, unknown, or other
  misc_difference 131: note = a, c, u, g, unknown, or other
  misc_difference 148: note = a, c, u, g, unknown, or other
  misc_difference 149: note = a, c, u, g, unknown, or other
  misc_difference 151: note = a, c, u, g, unknown, or other
  misc_difference 154: note = a, c, u, g, unknown, or other
  misc_difference 155: note = a, c, u, g, unknown, or other
  misc_difference 156: note = a, c, u, g, unknown, or other
  misc_difference 157: note = a, c, u, g, unknown, or other
  misc_difference 158: note = a, c, u, g, unknown, or other
  misc_difference 159: note = a, c, u, g, unknown, or other
  misc_difference 165: note = a, c, u, g, unknown, or other
  misc_difference 171: note = a, c, u, g, unknown, or other
  misc_difference 172: note = a, c, u, g, unknown, or other
  misc_difference 178: note = a, c, u, g, unknown, or other
  misc_difference 180: note = a, c, u, g, unknown, or other
  misc_difference 185: note = a, c, u, g, unknown, or other
  misc_difference 186: note = a, c, u, g, unknown, or other
nnnnnngrcyrgyrcgrtnnnntyngrnynnnnnnnnnnnnnyyrgrnyggnycgygcagcytgnynnnnncyngggynnnnragcccgtnnyygagyrnanngcgcrcgrnnnccgygcyggtcttcnynragcccgaacggttrynngnrcnnnnnnyragyncgcatnnacaagnangggannygaagaycatgtc

SEQ ID NO: 795364 - RNA, 215 nt, unidentified
  source 1..215: mol_type = unassigned RNA; note = ISCps4
  misc_difference 1: note = a, c, u, g, unknown, or other
  misc_difference 5: note = a, c, u, g, unknown, or other
  misc_difference 7: note = a, c, u, g, unknown, or other
  misc_difference 12: note = a, c, u, g, unknown, or other
  misc_difference 14: note = a, c, u, g, unknown, or other
  misc_difference 15: note = a, c, u, g, unknown, or other
  misc_difference 16: note = a, c, u, g, unknown, or other
  misc_difference 17: note = a, c, u, g, unknown, or other
  misc_difference 20: note = a, c, u, g, unknown, or other
  misc_difference 21: note = a, c, u, g, unknown, or other
  misc_difference 22: note = a, c, u, g, unknown, or other
  misc_difference 23: note = a, c, u, g, unknown, or other
  misc_difference 24: note = a, c, u, g, unknown, or other
  misc_difference 25: note = a, c, u, g, unknown, or other
  misc_difference 26: note = a, c, u, g, unknown, or other
  misc_difference 27: note = a, c, u, g, unknown, or other
  misc_difference 28: note = a, c, u, g, unknown, or other
  misc_difference 29: note = a, c, u, g, unknown, or other
  misc_difference 30: note = a, c, u, g, unknown, or other
  misc_difference 31: note = a, c, u, g, unknown, or other
  misc_difference 32: note = a, c, u, g, unknown, or other
  misc_difference 33: note = a, c, u, g, unknown, or other
  misc_difference 36: note = a, c, u, g, unknown, or other
  misc_difference 39: note = a, c, u, g, unknown, or other
  misc_difference 40: note = a, c, u, g, unknown, or other
  misc_difference 41: note = a, c, u, g, unknown, or other
  misc_difference 42: note = a, c, u, g, unknown, or other
  misc_difference 43: note = a, c, u, g, unknown, or other
  misc_difference 44: note = a, c, u, g, unknown, or other
  misc_difference 45: note = a, c, u, g, unknown, or other
  misc_difference 47: note = a, c, u, g, unknown, or other
  misc_difference 49: note = a, c, u, g, unknown, or other
  misc_difference 51: note = a, c, u, g, unknown, or other
  misc_difference 52: note = a, c, u, g, unknown, or other
  misc_difference 53: note = a, c, u, g, unknown, or other
  misc_difference 54: note = a, c, u, g, unknown, or other
  misc_difference 55: note = a, c, u, g, unknown, or other
  misc_difference 56: note = a, c, u, g, unknown, or other
  misc_difference 61: note = a, c, u, g, unknown, or other
  misc_difference 73: note = a, c, u, g, unknown, or other
  misc_difference 74: note = a, c, u, g, unknown, or other
  misc_difference 75: note = a, c, u, g, unknown, or other
  misc_difference 76: note = a, c, u, g, unknown, or other
  misc_difference 85: note = a, c, u, g, unknown, or other
  misc_difference 87: note = a, c, u, g, unknown, or other
  misc_difference 88: note = a, c, u, g, unknown, or other
  misc_difference 90: note = a, c, u, g, unknown, or other
  misc_difference 91: note = a, c, u, g, unknown, or other
  misc_difference 92: note = a, c, u, g, unknown, or other
  misc_difference 93: note = a, c, u, g, unknown, or other
  misc_difference 94: note = a, c, u, g, unknown, or other
  misc_difference 100: note = a, c, u, g, unknown, or other
  misc_difference 101: note = a, c, u, g, unknown, or other
  misc_difference 106: note = a, c, u, g, unknown, or other
  misc_difference 109: note = a, c, u, g, unknown, or other
  misc_difference 118: note = a, c, u, g, unknown, or other
  misc_difference 125: note = a, c, u, g, unknown, or other
  misc_difference 126: note = a, c, u, g, unknown, or other
  misc_difference 128: note = a, c, u, g, unknown, or other
  misc_difference 141: note = a, c, u, g, unknown, or other
  misc_difference 142: note = a, c, u, g, unknown, or other
  misc_difference 148: note = a, c, u, g, unknown, or other
  misc_difference 170: note = a, c, u, g, unknown, or other
  misc_difference 171: note = a, c, u, g, unknown, or other
  misc_difference 172: note = a, c, u, g, unknown, or other
  misc_difference 173: note = a, c, u, g, unknown, or other
  misc_difference 174: note = a, c, u, g, unknown, or other
  misc_difference 175: note = a, c, u, g, unknown, or other
  misc_difference 177: note = a, c, u, g, unknown, or other
  misc_difference 178: note = a, c, u, g, unknown, or other
  misc_difference 179: note = a, c, u, g, unknown, or other
  misc_difference 183: note = a, c, u, g, unknown, or other
  misc_difference 184: note = a, c, u, g, unknown, or other
  misc_difference 192: note = a, c, u, g, unknown, or other
  misc_difference 193: note = a, c, u, g, unknown, or other
  misc_difference 199: note = a, c, u, g, unknown, or other
  misc_difference 205: note = a, c, u, g, unknown, or other
  misc_difference 210: note = a, c, u, g, unknown, or other
  misc_difference 211: note = a, c, u, g, unknown, or other
nytynrncyyrnynnnnrynnnnnnnnnnnnnnyrnyannnnnnnrnynrnnnnnnyrrgnyatgyryyyrynnnntacgaatanynnrnnnnnarcrynngatgntyncygctttrnyttcgannynryrggtrcryytnnrytcrnyaacgaatactcagggctygcnnnnnnannngctnnctatattnnyttcgnagarynyrrgnnyrca

SEQ ID NO: 795365 - RNA, 272 nt, unidentified
  source 1..272: mol_type = unassigned RNA; note = ISShsp1
  misc_difference 13: note = a, c, u, g, unknown, or other
  misc_difference 15: note = a, c, u, g, unknown, or other
  misc_difference 21: note = a, c, u, g, unknown, or other
  misc_difference 27: note = a, c, u, g, unknown, or other
  misc_difference 28: note = a, c, u, g, unknown, or other
  misc_difference 29: note = a, c, u, g, unknown, or other
  misc_difference 30: note = a, c, u, g, unknown, or other
  misc_difference 31: note = a, c, u, g, unknown, or other
  misc_difference 33: note = a, c, u, g, unknown, or other
  misc_difference 37: note = a, c, u, g, unknown, or other
  misc_difference 60: note = a, c, u, g, unknown, or other
  misc_difference 70: note = a, c, u, g, unknown, or other
  misc_difference 73: note = a, c, u, g, unknown, or other
  misc_difference 101: note = a, c, u, g, unknown, or other
  misc_difference 108: note = a, c, u, g, unknown, or other
  misc_difference 111: note = a, c, u, g, unknown, or other
  misc_difference 118: note = a, c, u, g, unknown, or other
  misc_difference 119: note = a, c, u, g, unknown, or other
  misc_difference 120: note = a, c, u, g, unknown, or other
  misc_difference 121: note = a, c, u, g, unknown, or other
  misc_difference 122: note = a, c, u, g, unknown, or other
  misc_difference 123: note = a, c, u, g, unknown, or other
  misc_difference 124: note = a, c, u, g, unknown, or other
  misc_difference 127: note = a, c, u, g, unknown, or other
  misc_difference 133: note = a, c, u, g, unknown, or other
  misc_difference 136: note = a, c, u, g, unknown, or other
  misc_difference 137: note = a, c, u, g, unknown, or other
  misc_difference 145: note = a, c, u, g, unknown, or other
  misc_difference 146: note = a, c, u, g, unknown, or other
  misc_difference 147: note = a, c, u, g, unknown, or other
  misc_difference 148: note = a, c, u, g, unknown, or other
  misc_difference 149: note = a, c, u, g, unknown, or other
  misc_difference 154: note = a, c, u, g, unknown, or other
  misc_difference 189: note = a, c, u, g, unknown, or other
  misc_difference 200: note = a, c, u, g, unknown, or other
  misc_difference 205: note = a, c, u, g, unknown, or other
  misc_difference 207: note = a, c, u, g, unknown, or other
  misc_difference 209: note = a, c, u, g, unknown, or other
  misc_difference 225: note = a, c, u, g, unknown, or other
  misc_difference 226: note = a, c, u, g, unknown, or other
  misc_difference 245: note = a, c, u, g, unknown, or other
  misc_difference 246: note = a, c, u, g, unknown, or other
  misc_difference 247: note = a, c, u, g, unknown, or other
  misc_difference 252: note = a, c, u, g, unknown, or other
  misc_difference 253: note = a, c, u, g, unknown, or other
  misc_difference 254: note = a, c, u, g, unknown, or other
  misc_difference 255: note = a, c, u, g, unknown, or other
  misc_difference 256: note = a, c, u, g, unknown, or other
  misc_difference 257: note = a, c, u, g, unknown, or other
  misc_difference 258: note = a, c, u, g, unknown, or other
  misc_difference 268: note = a, c, u, g, unknown, or other
  misc_difference 269: note = a, c, u, g, unknown, or other
tagaratyrgccngncrcgrngagcrnnnnnrnygynrycgygyygrgcygaygcyrgancttgcaagrnrrnragcagatggygygatcgatcgatccrngrcrygnganaytccgnnnnnnncantggccnyynnaggycgynnnnntgttnggaacycrygyygcggaarccatcttggccagcgntcatrygygrncgcrnynanaggccgracatatgrnngcaagcgatcygrtcrrrnnnyygynnnnnnnycttgyrrgnnggr

SEQ ID NO: 795366 - RNA, 199 nt, unidentified
  source 1..199: mol_type = unassigned RNA; note = ISPye59
  misc_difference 2: note = a, c, u, g, unknown, or other
  misc_difference 3: note = a, c, u, g, unknown, or other
  misc_difference 4: note = a, c, u, g, unknown, or other
  misc_difference 5: note = a, c, u, g, unknown, or other
  misc_difference 6: note = a, c, u, g, unknown, or other
  misc_difference 7: note = a, c, u, g, unknown, or other
  misc_difference 9: note = a, c, u, g, unknown, or other
  misc_difference 13: note = a, c, u, g, unknown, or other
  misc_difference 14: note = a, c, u, g, unknown, or other
  misc_difference 16: note = a, c, u, g, unknown, or other
  misc_difference 17: note = a, c, u, g, unknown, or other
  misc_difference 19: note = a, c, u, g, unknown, or other
  misc_difference 20: note = a, c, u, g, unknown, or other
  misc_difference 22: note = a, c, u, g, unknown, or other
  misc_difference 24: note = a, c, u, g, unknown, or other
  misc_difference 25: note = a, c, u, g, unknown, or other
  misc_difference 26: note = a, c, u, g, unknown, or other
  misc_difference 36: note = a, c, u, g, unknown, or other
  misc_difference 37: note = a, c, u, g, unknown, or other
  misc_difference 38: note = a, c, u, g, unknown, or other
  misc_difference 40: note = a, c, u, g, unknown, or other
  misc_difference 41: note = a, c, u, g, unknown, or other
  misc_difference 43: note = a, c, u, g, unknown, or other
  misc_difference 46: note = a, c, u, g, unknown, or other
  misc_difference 47: note = a, c, u, g, unknown, or other
  misc_difference 48: note = a, c, u, g, unknown, or other
  misc_difference 51: note = a, c, u, g, unknown, or other
  misc_difference 52: note = a, c, u, g, unknown, or other
  misc_difference 54: note = a, c, u, g, unknown, or other
  misc_difference 55: note = a, c, u, g, unknown, or other
  misc_difference 56: note = a, c, u, g, unknown, or other
  misc_difference 69: note = a, c, u, g, unknown, or other
  misc_difference 77: note = a, c, u, g, unknown, or other
  misc_difference 78: note = a, c, u, g, unknown, or other
  misc_difference 79: note = a, c, u, g, unknown, or other
  misc_difference 80: note = a, c, u, g, unknown, or other
  misc_difference 81: note = a, c, u, g, unknown, or other
  misc_difference 82: note = a, c, u, g, unknown, or other
  misc_difference 83: note = a, c, u, g, unknown, or other
  misc_difference 84: note = a, c, u, g, unknown, or other
  misc_difference 91: note = a, c, u, g, unknown, or other
  misc_difference 93: note = a, c, u, g, unknown, or other
  misc_difference 94: note = a, c, u, g, unknown, or other
  misc_difference 95: note = a, c, u, g, unknown, or other
  misc_difference 102: note = a, c, u, g, unknown, or other
  misc_difference 103: note = a, c, u, g, unknown, or other
  misc_difference 104: note = a, c, u, g, unknown, or other
  misc_difference 105: note = a, c, u, g, unknown, or other
  misc_difference 106: note = a, c, u, g, unknown, or other
  misc_difference 111: note = a, c, u, g, unknown, or other
  misc_difference 112: note = a, c, u, g, unknown, or other
  misc_difference 123: note = a, c, u, g, unknown, or other
  misc_difference 130: note = a, c, u, g, unknown, or other
  misc_difference 132: note = a, c, u, g, unknown, or other
  misc_difference 133: note = a, c, u, g, unknown, or other
  misc_difference 134: note = a, c, u, g, unknown, or other
  misc_difference 135: note = a, c, u, g, unknown, or other
  misc_difference 151: note = a, c, u, g, unknown, or other
  misc_difference 156: note = a, c, u, g, unknown, or other
  misc_difference 157: note = a, c, u, g, unknown, or other
  misc_difference 158: note = a, c, u, g, unknown, or other
  misc_difference 159: note = a, c, u, g, unknown, or other
  misc_difference 160: note = a, c, u, g, unknown, or other
  misc_difference 161: note = a, c, u, g, unknown, or other
  misc_difference 168: note = a, c, u, g, unknown, or other
  misc_difference 177: note = a, c, u, g, unknown, or other
  misc_difference 178: note = a, c, u, g, unknown, or other
  misc_difference 179: note = a, c, u, g, unknown, or other
  misc_difference 183: note = a, c, u, g, unknown, or other
  misc_difference 184: note = a, c, u, g, unknown, or other
  misc_difference 186: note = a, c, u, g, unknown, or other
  misc_difference 199: note = a, c, u, g, unknown, or other
rnnnnnnyngyynnynngnnrnrnnngrrycrcyrnnngnnrnyrnnnyynncnnnyrgyggcrrgggnyggrtcgnnnnnnnnyyggycnynnnggrccgnnnnnragtnngrtcrcccycnycttttncnnnngrcctgaacggatacnygggnnnnnngrcccgnaygacaagnnnaggnnrnggraaagayrayn

SEQ ID NO: 795367 - RNA, 175 nt, unidentified
  source 1..175: mol_type = unassigned RNA; note = ISPsy35
  misc_difference 5: note = a, c, u, g, unknown, or other
  misc_difference 6: note = a, c, u, g, unknown, or other
  misc_difference 11: note = a, c, u, g, unknown, or other
  misc_difference 12: note = a, c, u, g, unknown, or other
  misc_difference 13: note = a, c, u, g, unknown, or other
  misc_difference 14: note = a, c, u, g, unknown, or other
  misc_difference 15: note = a, c, u, g, unknown, or other
  misc_difference 20: note = a, c, u, g, unknown, or other
  misc_difference 22: note = a, c, u, g, unknown, or other
  misc_difference 23: note = a, c, u, g, unknown, or other
  misc_difference 32: note = a, c, u, g, unknown, or other
  misc_difference 33: note = a, c, u, g, unknown, or other
  misc_difference 34: note = a, c, u, g, unknown, or other
  misc_difference 35: note = a, c, u, g, unknown, or other
  misc_difference 36: note = a, c, u, g, unknown, or other
  misc_difference 37: note = a, c, u, g, unknown, or other
  misc_difference 40: note = a, c, u, g, unknown, or other
  misc_difference 49: note = a, c, u, g, unknown, or other
  misc_difference 50: note = a, c, u, g, unknown, or other
  misc_difference 58: note = a, c, u, g, unknown, or other
  misc_difference 59: note = a, c, u, g, unknown, or other
  misc_difference 61: note = a, c, u, g, unknown, or other
  misc_difference 62: note = a, c, u, g, unknown, or other
  misc_difference 72: note = a, c, u, g, unknown, or other
  misc_difference 78: note = a, c, u, g, unknown, or other
  misc_difference 85: note = a, c, u, g, unknown, or other
  misc_difference 88: note = a, c, u, g, unknown, or other
  misc_difference 98: note = a, c, u, g, unknown, or other
  misc_difference 99: note = a, c, u, g, unknown, or other
  misc_difference 104: note = a, c, u, g, unknown, or other
  misc_difference 105: note = a, c, u, g, unknown, or other
  misc_difference 106: note = a, c, u, g, unknown, or other
  misc_difference 107: note = a, c, u, g, unknown, or other
  misc_difference 108: note = a, c, u, g, unknown, or other
  misc_difference 109: note = a, c, u, g, unknown, or other
  misc_difference 110: note = a, c, u, g, unknown, or other
  misc_difference 111: note = a, c, u, g, unknown, or other
  misc_difference 116: note = a, c, u, g, unknown, or other
  misc_difference 117: note = a, c, u, g, unknown, or other
  misc_difference 125: note = a, c, u, g, unknown, or other
  misc_difference 139: note = a, c, u, g, unknown, or other
  misc_difference 140: note = a, c, u, g, unknown, or other
  misc_difference 141: note = a, c, u, g, unknown, or other
  misc_difference 142: note = a, c, u, g, unknown, or other
  misc_difference 145: note = a, c, u, g, unknown, or other
  misc_difference 153: note = a, c, u, g, unknown, or other
  misc_difference 154: note = a, c, u, g, unknown, or other
  misc_difference 155: note = a, c, u, g, unknown, or other
  misc_difference 156: note = a, c, u, g, unknown, or other
  misc_difference 158: note = a, c, u, g, unknown, or other
  misc_difference 163: note = a, c, u, g, unknown, or other
  misc_difference 164: note = a, c, u, g, unknown, or other
  misc_difference 166: note = a, c, u, g, unknown, or other
  misc_difference 168: note = a, c, u, g, unknown, or other
  misc_difference 170: note = a, c, u, g, unknown, or other
  misc_difference 171: note = a, c, u, g, unknown, or other
  misc_difference 172: note = a, c, u, g, unknown, or other
  misc_difference 173: note = a, c, u, g, unknown, or other
  misc_difference 174: note = a, c, u, g, unknown, or other
  misc_difference 175: note = a, c, u, g, unknown, or other
ryarnntrgrnnnnngygcngnnrragrccgnnnnnncantggtgyrynnyrcccgynnrnnagygtggtcnygrrynryrtcrncgncrttgrtgrnncrrynnnnnnnnryygnnaycycgtntragagartgarynnnncgncgyryyynnnncngcgcnncnynynnnnnn

SEQ ID NO: 795368 - RNA, 169 nt, unidentified
  source 1..169: mol_type = unassigned RNA; note = ISChy2
  misc_difference 1: note = a, c, u, g, unknown, or other
  misc_difference 2: note = a, c, u, g, unknown, or other
  misc_difference 3: note = a, c, u, g, unknown, or other
  misc_difference 4: note = a, c, u, g, unknown, or other
  misc_difference 5: note = a, c, u, g, unknown, or other
  misc_difference 9: note = a, c, u, g, unknown, or other
  misc_difference 10: note = a, c, u, g, unknown, or other
  misc_difference 11: note = a, c, u, g, unknown, or other
  misc_difference 12: note = a, c, u, g, unknown, or other
  misc_difference 17: note = a, c, u, g, unknown, or other
  misc_difference 18: note = a, c, u, g, unknown, or other
  misc_difference 23: note = a, c, u, g, unknown, or other
  misc_difference 24: note = a, c, u, g, unknown, or other
  misc_difference 27: note = a, c, u, g, unknown, or other
  misc_difference 28: note = a, c, u, g, unknown, or other
  misc_difference 30: note = a, c, u, g, unknown, or other
  misc_difference 31: note = a, c, u, g, unknown, or other
  misc_difference 32: note = a, c, u, g, unknown, or other
  misc_difference 33: note = a, c, u, g, unknown, or other
  misc_difference 34: note = a, c, u, g, unknown, or other
  misc_difference 35: note = a, c, u, g, unknown, or other
  misc_difference 42: note = a, c, u, g, unknown, or other
  misc_difference 45: note = a, c, u, g, unknown, or other
  misc_difference 46: note = a, c, u, g, unknown, or other
  misc_difference 49: note = a, c, u, g, unknown, or other
  misc_difference 50: note = a, c, u, g, unknown, or other
  misc_difference 53: note = a, c, u, g, unknown, or other
  misc_difference 54: note = a, c, u, g, unknown, or other
  misc_difference 56: note = a, c, u, g, unknown, or other
  misc_difference 59: note = a, c, u, g, unknown, or other
  misc_difference 60: note = a, c, u, g, unknown, or other
  misc_difference 61: note = a, c, u, g, unknown, or other
  misc_difference 62: note = a, c, u, g, unknown, or other
  misc_difference 68: note = a, c, u, g, unknown, or other
  misc_difference 69: note = a, c, u, g, unknown, or other
  misc_difference 70: note = a, c, u, g, unknown, or other
  misc_difference 71: note = a, c, u, g, unknown, or other
  misc_difference 74: note = a, c, u, g, unknown, or other
  misc_difference 75: note = a, c, u, g, unknown, or other
  misc_difference 83: note = a, c, u, g, unknown, or other
  misc_difference 84: note = a, c, u, g, unknown, or other
  misc_difference 86: note = a, c, u, g, unknown, or other
  misc_difference 88: note = a, c, u, g, unknown, or other
  misc_difference 89: note = a, c, u, g, unknown, or other
  misc_difference 90: note = a, c, u, g, unknown, or other
  misc_difference 92: note = a, c, u, g, unknown, or other
  misc_difference 97: note = a, c, u, g, unknown, or other
  misc_difference 99: note = a, c, u, g, unknown, or other
  misc_difference 112: note = a, c, u, g, unknown, or other
  misc_difference 118: note = a, c, u, g, unknown, or other
  misc_difference 119: note = a, c, u, g, unknown, or other
  misc_difference 120: note = a, c, u, g, unknown, or other
  misc_difference 121: note = a, c, u, g, unknown, or other
  misc_difference 122: note = a, c, u, g, unknown, or other
  misc_difference 127: note = a, c, u, g, unknown, or other
  misc_difference 129: note = a, c, u, g, unknown, or other
  misc_difference 139: note = a, c, u, g, unknown, or other
  misc_difference 145: note = a, c, u, g, unknown, or other
  misc_difference 151: note = a, c, u, g, unknown, or other
  misc_difference 153: note = a, c, u, g, unknown, or other
  misc_difference 156: note = a, c, u, g, unknown, or other
  misc_difference 157: note = a, c, u, g, unknown, or other
  misc_difference 158: note = a, c, u, g, unknown, or other
  misc_difference 159: note = a, c, u, g, unknown, or other
  misc_difference 160: note = a, c, u, g, unknown, or other
  misc_difference 162: note = a, c, u, g, unknown, or other
  misc_difference 165: note = a, c, u, g, unknown, or other
  misc_difference 166: note = a, c, u, g, unknown, or other
  misc_difference 167: note = a, c, u, g, unknown, or other
  misc_difference 168: note = a, c, u, g, unknown, or other
  misc_difference 169: note = a, c, u, g, unknown, or other
nnnnnryynnnnrrgynnggrrnnagnngnnnnnnyyccatnagnncannganncngynnnnragyannnnyrnncyyyrccnnynynnnrnarryngnacgaaggaatgtnrgrrcnnnnnacycngngagryatgrnagggtnrryyynrngrnnnnnyngynnnnn

SEQ ID NO: 795369 - RNA, 211 nt, unidentified
  source 1..211: mol_type = unassigned RNA; note = ISCARN97
  misc_difference 1: note = a, c, u, g, unknown, or other
  misc_difference 3: note = a, c, u, g, unknown, or other
  misc_difference 4: note = a, c, u, g, unknown, or other
  misc_difference 5: note = a, c, u, g, unknown, or other
  misc_difference 6: note = a, c, u, g, unknown, or other
  misc_difference 10: note = a, c, u, g, unknown, or other
  misc_difference 12: note = a, c, u, g, unknown, or other
  misc_difference 18: note = a, c, u, g, unknown, or other
  misc_difference 23: note = a, c, u, g, unknown, or other
  misc_difference 24: note = a, c, u, g, unknown, or other
  misc_difference 32: note = a, c, u, g, unknown, or other
  misc_difference 34: note = a, c, u, g, unknown, or other
  misc_difference 35: note = a, c, u, g, unknown, or other
  misc_difference 37: note = a, c, u, g, unknown, or other
  misc_difference 38: note = a, c, u, g, unknown, or other
  misc_difference 41: note = a, c, u, g, unknown, or other
  misc_difference 54: note = a, c, u, g, unknown, or other
  misc_difference 57: note = a, c, u, g, unknown, or other
  misc_difference 58: note = a, c, u, g, unknown, or other
  misc_difference 59: note = a, c, u, g, unknown, or other
  misc_difference 60: note = a, c, u, g, unknown, or other
  misc_difference 66: note = a, c, u, g, unknown, or other
  misc_difference 77: note = a, c, u, g, unknown, or other
  misc_difference 81: note = a, c, u, g, unknown, or other
  misc_difference 102: note = a, c, u, g, unknown, or other
  misc_difference 104: note = a, c, u, g, unknown, or other
  misc_difference 106: note = a, c, u, g, unknown, or other
  misc_difference 114: note = a, c, u, g, unknown, or other
  misc_difference 123: note = a, c, u, g, unknown, or other
  misc_difference 134: note = a, c, u, g, unknown, or other
  misc_difference 135: note = a, c, u, g, unknown, or other
  misc_difference 136: note = a, c, u, g, unknown, or other
  misc_difference 137: note = a, c, u, g, unknown, or other
  misc_difference 138: note = a, c, u, g, unknown, or other
  misc_difference 139: note = a, c, u, g, unknown, or other
  misc_difference 140: note = a, c, u, g, unknown, or other
  misc_difference 141: note = a, c, u, g, unknown, or other
  misc_difference 142: note = a, c, u, g, unknown, or other
  misc_difference 143: note = a, c, u, g, unknown, or other
  misc_difference 146: note = a, c, u, g, unknown, or other
  misc_difference 147: note = a, c, u, g, unknown, or other
  misc_difference 153: note = a, c, u, g, unknown, or other
  misc_difference 154: note = a, c, u, g, unknown, or other
  misc_difference 155: note = a, c, u, g, unknown, or other
  misc_difference 157: note = a, c, u, g, unknown, or other
  misc_difference 158: note = a, c, u, g, unknown, or other
  misc_difference 160: note = a, c, u, g, unknown, or other
  misc_difference 161: note = a, c, u, g, unknown, or other
  misc_difference 162: note = a, c, u, g, unknown, or other
  misc_difference 178: note = a, c, u, g, unknown, or other
  misc_difference 180: note = a, c, u, g, unknown, or other
  misc_difference 181: note = a, c, u, g, unknown, or other
  misc_difference 182: note = a, c, u, g, unknown, or other
  misc_difference 184: note = a, c, u, g, unknown, or other
  misc_difference 185: note = a, c, u, g, unknown, or other
  misc_difference 186: note = a, c, u, g, unknown, or other
  misc_difference 189: note = a, c, u, g, unknown, or other
  misc_difference 191: note = a, c, u, g, unknown, or other
  misc_difference 194: note = a, c, u, g, unknown, or other
  misc_difference 195: note = a, c, u, g, unknown, or other
  misc_difference 196: note = a, c, u, g, unknown, or other
  misc_difference 197: note = a, c, u, g, unknown, or other
  misc_difference 200: note = a, c, u, g, unknown, or other
  misc_difference 201: note = a, c, u, g, unknown, or other
  misc_difference 207: note = a, c, u, g, unknown, or other
  misc_difference 208: note = a, c, u, g, unknown, or other
  misc_difference 209: note = a, c, u, g, unknown, or other
  misc_difference 210: note = a, c, u, g, unknown, or other
ntnnnnggyngnrgryrncrgrnngaggtcgnrnnrnnyyntgryggyyraccncgnnnnctaacntgacccgcyrnryynactcgyaccccggattgcytnynynrrgagcgnacrytaaanrrgccgyyggnnnnnnnnnnccnncaggcnnntnnrnnnyggcrycygyyrycyncnnnynnnrantntrnnnnrrnngraggnnnna

SEQ ID NO: 795370 - RNA, 262 nt, unidentified
  source 1..262: mol_type = unassigned RNA; note = ISAfe3 or ISAar41
  misc_difference 2: note = a, c, u, g, unknown, or other
  misc_difference 3: note = a, c, u, g, unknown, or other
  misc_difference 4: note = a, c, u, g, unknown, or other
  misc_difference 36: note = a, c, u, g, unknown, or other
  misc_difference 44: note = a, c, u, g, unknown, or other
  misc_difference 45: note = a, c, u, g, unknown, or other
  misc_difference 46: note = a, c, u, g, unknown, or other
  misc_difference 47: note = a, c, u, g, unknown, or other
  misc_difference 48: note = a, c, u, g, unknown, or other
  misc_difference 59: note = a, c, u, g, unknown, or other
  misc_difference 60: note = a, c, u, g, unknown, or other
  misc_difference 61: note = a, c, u, g, unknown, or other
  misc_difference 62: note = a, c, u, g, unknown, or other
  misc_difference 63: note = a, c, u, g, unknown, or other
  misc_difference 64: note = a, c, u, g, unknown, or other
  misc_difference 65: note = a, c, u, g, unknown, or other
  misc_difference 66: note = a, c, u, g, unknown, or other
  misc_difference 67: note = a, c, u, g, unknown, or other
  misc_difference 74: note = a, c, u, g, unknown, or other
  misc_difference 75: note = a, c, u, g, unknown, or other
  misc_difference 76: note = a, c, u, g, unknown, or other
  misc_difference 77: note = a, c, u, g, unknown, or other
  misc_difference 78: note = a, c, u, g, unknown, or other
  misc_difference 79: note = a, c, u, g, unknown, or other
  misc_difference 80: note = a, c, u, g, unknown, or other
  misc_difference 81: note = a, c, u, g, unknown, or other
  misc_difference 82: note = a, c, u, g, unknown, or other
  misc_difference 91: note = a, c, u, g, unknown, or other
  misc_difference 92: note = a, c, u, g, unknown, or other
  misc_difference 93: note = a, c, u, g, unknown, or other
  misc_difference 94: note = a, c, u, g, unknown, or other
  misc_difference 95: note = a, c, u, g, unknown, or other
  misc_difference 96: note = a, c, u, g, unknown, or other
  misc_difference 100: note = a, c, u, g, unknown, or other
  misc_difference 108: note = a, c, u, g, unknown, or other
  misc_difference 109: note = a, c, u, g, unknown, or other
  misc_difference 111: note = a, c, u, g, unknown, or other
  misc_difference 112: note = a, c, u, g, unknown, or other
  misc_difference 114: note = a, c, u, g, unknown, or other
  misc_difference 116: note = a, c, u, g, unknown, or other
  misc_difference 118: note = a, c, u, g, unknown, or other
  misc_difference 131: note = a, c, u, g, unknown, or other
  misc_difference 134: note = a, c, u, g, unknown, or other
  misc_difference 137: note = a, c, u, g, unknown, or other
  misc_difference 138: note = a, c, u, g, unknown, or other
  misc_difference 139: note = a, c, u, g, unknown, or other
  misc_difference 150: note = a, c, u, g, unknown, or other
  misc_difference 157: note = a, c, u, g, unknown, or other
  misc_difference 165: note = a, c, u, g, unknown, or other
  misc_difference 166: note = a, c, u, g, unknown, or other
  misc_difference 167: note = a, c, u, g, unknown, or other
  misc_difference 169: note = a, c, u, g, unknown, or other
  misc_difference 170: note = a, c, u, g, unknown, or other
  misc_difference 171: note = a, c, u, g, unknown, or other
  misc_difference 172: note = a, c, u, g, unknown, or other
  misc_difference 173: note = a, c, u, g, unknown, or other
  misc_difference 174: note = a, c, u, g, unknown, or other
  misc_difference 176: note = a, c, u, g, unknown, or other
  misc_difference 178: note = a, c, u, g, unknown, or other
  misc_difference 191: note = a, c, u, g, unknown, or other
  misc_difference 194: note = a, c, u, g, unknown, or other
  misc_difference 195: note = a, c, u, g, unknown, or other
  misc_difference 196: note = a, c, u, g, unknown, or other
  misc_difference 203: note = a, c, u, g, unknown, or other
  misc_difference 204: note = a, c, u, g, unknown, or other
  misc_difference 205: note = a, c, u, g, unknown, or other
  misc_difference 210: note = a, c, u, g, unknown, or other
  misc_difference 214: note = a, c, u, g, unknown, or other
  misc_difference 215: note = a, c, u, g, unknown, or other
  misc_difference 216: note = a, c, u, g, unknown, or other
  misc_difference 226: note = a, c, u, g, unknown, or other
  misc_difference 231: note = a, c, u, g, unknown, or other
  misc_difference 233: note = a, c, u, g, unknown, or other
  misc_difference 234: note = a, c, u, g, unknown, or other
  misc_difference 235: note = a, c, u, g, unknown, or other
  misc_difference 236: note = a, c, u, g, unknown, or other
  misc_difference 241: note = a, c, u, g, unknown, or other
  misc_difference 243: note = a, c, u, g, unknown, or other
  misc_difference 244: note = a, c, u, g, unknown, or other
  misc_difference 245: note = a, c, u, g, unknown, or other
  misc_difference 248: note = a, c, u, g, unknown, or other
  misc_difference 249: note = a, c, u, g, unknown, or other
  misc_difference 250: note = a, c, u, g, unknown, or other
  misc_difference 259: note = a, c, u, g, unknown, or other
  misc_difference 260: note = a, c, u, g, unknown, or other
  misc_difference 261: note = a, c, u, g, unknown, or other
rnnnyggcyggycygrgrcyggctgrcrrgyygrynyyggyyynnnnnrrygtgactcnnnnnnnnnyygrccnnnnnnnnnrgtgycytnnnnnngayntgtccrynnrnnrnrnyngryrycrrycygnycnrcnnngrtgrcytganyagaagnytgyccrnnnynnnnnnrnrnygtgrcycrtyanagnnntgccycnnnryganyyynnnycrgrccgrnrccrnynnnnygrynynnnyynnnrrrrgrrrnnnr

SEQ ID NO: 795371 - RNA, 243 nt, unidentified
  source 1..243: mol_type = unassigned RNA; note = ISBth13
  misc_difference 2: note = a, c, u, g, unknown, or other
  misc_difference 3: note = a, c, u, g, unknown, or other
  misc_difference 4: note = a, c, u, g, unknown, or other
  misc_difference 5: note = a, c, u, g, unknown, or other
  misc_difference 10: note = a, c, u, g, unknown, or other
  misc_difference 11: note = a, c, u, g, unknown, or other
  misc_difference 12: note = a, c, u, g, unknown, or other
  misc_difference 13: note = a, c, u, g, unknown, or other
  misc_difference 14: note = a, c, u, g, unknown, or other
  misc_difference 16: note = a, c, u, g, unknown, or other
  misc_difference 17: note = a, c, u, g, unknown, or other
  misc_difference 18: note = a, c, u, g, unknown, or other
  misc_difference 19: note = a, c, u, g, unknown, or other
  misc_difference 20: note = a, c, u, g, unknown, or other
  misc_difference 21: note = a, c, u, g, unknown, or other
  misc_difference 22: note = a, c, u, g, unknown, or other
  misc_difference 23: note = a, c, u, g, unknown, or other
  misc_difference 24: note = a, c, u, g, unknown, or other
  misc_difference 26: note = a, c, u, g, unknown, or other
  misc_difference 27: note = a, c, u, g, unknown, or other
  misc_difference 29: note = a, c, u, g, unknown, or other
  misc_difference 31: note = a, c, u, g, unknown, or other
  misc_difference 32: note = a, c, u, g, unknown, or other
  misc_difference 33: note = a, c, u, g, unknown, or other
  misc_difference 34: note = a, c, u, g, unknown, or other
  misc_difference 35: note = a, c, u, g, unknown, or other
  misc_difference 36: note = a, c, u, g, unknown, or other
  misc_difference 37: note = a, c, u, g, unknown, or other
  misc_difference 38: note = a, c, u, g, unknown, or other
  misc_difference 39: note = a, c, u, g, unknown, or other
  misc_difference 40: note = a, c, u, g, unknown, or other
  misc_difference 41: note = a, c, u, g, unknown, or other
  misc_difference 42: note = a, c, u, g, unknown, or other
  misc_difference 45: note = a, c, u, g, unknown, or other
  misc_difference 46: note = a, c, u, g, unknown, or other
  misc_difference 47: note = a, c, u, g, unknown, or other
  misc_difference 48: note = a, c, u, g, unknown, or other
  misc_difference 49: note = a, c, u, g, unknown, or other
  misc_difference 50: note = a, c, u, g, unknown, or other
  misc_difference 51: note = a, c, u, g, unknown, or other
  misc_difference 52: note = a, c, u, g, unknown, or other
  misc_difference 53: note = a, c, u, g, unknown, or other
  misc_difference 54: note = a, c, u, g, unknown, or other
  misc_difference 55: note = a, c, u, g, unknown, or other
  misc_difference 57: note = a, c, u, g, unknown, or other
  misc_difference 63: note = a, c, u, g, unknown, or other
  misc_difference 64: note = a, c, u, g, unknown, or other
  misc_difference 65: note = a, c, u, g, unknown, or other
  misc_difference 66: note = a, c, u, g, unknown, or other
  misc_difference 67: note = a, c, u, g, unknown, or other
  misc_difference 70: note = a, c, u, g, unknown, or other
  misc_difference 80: note = a, c, u, g, unknown, or other
  misc_difference 82: note = a, c, u, g, unknown, or other
  misc_difference 88: note = a, c, u, g, unknown, or other
  misc_difference 89: note = a, c, u, g, unknown, or other
  misc_difference 101: note = a, c, u, g, unknown, or other
  misc_difference 102: note = a, c, u, g, unknown, or other
  misc_difference 103: note = a, c, u, g, unknown, or other
  misc_difference 104: note = a, c, u, g, unknown, or other
  misc_difference 105: note = a, c, u, g, unknown, or other
  misc_difference 107: note = a, c, u, g, unknown, or other
  misc_difference 108: note = a, c, u, g, unknown, or other
  misc_difference 114: note = a, c, u, g, unknown, or other
  misc_difference 115: note = a, c, u, g, unknown, or other
  misc_difference 116: note = a, c, u, g, unknown, or other
  misc_difference 117: note = a, c, u, g, unknown, or other
  misc_difference 124: note = a, c, u, g, unknown, or other
  misc_difference 135: note = a, c, u, g, unknown, or other
  misc_difference 139: note = a, c, u, g, unknown, or other
  misc_difference 140: note = a, c, u, g, unknown, or other
  misc_difference 146: note = a, c, u, g, unknown, or other
  misc_difference 147: note = a, c, u, g, unknown, or other
  misc_difference 148: note = a, c, u, g, unknown, or other
  misc_difference 171: note = a, c, u, g, unknown, or other
  misc_difference 172: note = a, c, u, g, unknown, or other
  misc_difference 174: note = a, c, u, g, unknown, or other
  misc_difference 175: note = a, c, u, g, unknown, or other
  misc_difference 177: note = a, c, u, g, unknown, or other
  misc_difference 178: note = a, c, u, g, unknown, or other
  misc_difference 179: note = a, c, u, g, unknown, or other
  misc_difference 180: note = a, c, u, g, unknown, or other
  misc_difference 181: note = a, c, u, g, unknown, or other
  misc_difference 182: note = a, c, u, g, unknown, or other
  misc_difference 183: note = a, c, u, g, unknown, or other
  misc_difference 184: note = a, c, u, g, unknown, or other
  misc_difference 185: note = a, c, u, g, unknown, or other
  misc_difference 191: note = a, c, u, g, unknown, or other
  misc_difference 194: note = a, c, u, g, unknown, or other
  misc_difference 196: note = a, c, u, g, unknown, or other
  misc_difference 197: note = a, c, u, g, unknown, or other
  misc_difference 198: note = a, c, u, g, unknown, or other
  misc_difference 206: note = a, c, u, g, unknown, or other
  misc_difference 212: note = a, c, u, g, unknown, or other
  misc_difference 214: note = a, c, u, g, unknown, or other
  misc_difference 217: note = a, c, u, g, unknown, or other
  misc_difference 218: note = a, c, u, g, unknown, or other
  misc_difference 219: note = a, c, u, g, unknown, or other
  misc_difference 221: note = a, c, u, g, unknown, or other
  misc_difference 222: note = a, c, u, g, unknown, or other
  misc_difference 223: note = a, c, u, g, unknown, or other
  misc_difference 226: note = a, c, u, g, unknown, or other
  misc_difference 230: note = a, c, u, g, unknown, or other
  misc_difference 231: note = a, c, u, g, unknown, or other
  misc_difference 232: note = a, c, u, g, unknown, or other
  misc_difference 240: note = a, c, u, g, unknown, or other
  misc_difference 242: note = a, c, u, g, unknown, or other
annnnrgttnnnnnrnnnnnnnnnrnnynynnnnnnnnnnnnrynnnnnnnnnnnrnataatnnnnnyrnyrgryrgagngnyryygnnyyytccttgrrnnnnnrnnytcgtnnnnrraagantgryrcctctnyyynnyrrrynnnytrcgaatragytggatgyygrnnrnnynnnnnnnnncyycgnatntnnnacraggyngtrrynynyannngnnnrgnggrnnncyrycyrnant

SEQ ID NO: 795372 - RNA, 269 nt, unidentified
  source 1..269: mol_type = unassigned RNA; note = ISBth166
  misc_difference 1: note = a, c, u, g, unknown, or other
  misc_difference 2: note = a, c, u, g, unknown, or other
  misc_difference 3: note = a, c, u, g, unknown, or other
  misc_difference 4: note = a, c, u, g, unknown, or other
  misc_difference 5: note = a, c, u, g, unknown, or other
  misc_difference 6: note = a, c, u, g, unknown, or other
  misc_difference 7: note = a, c, u, g, unknown, or other
  misc_difference 15: note = a, c, u, g, unknown, or other
  misc_difference 18: note = a, c, u, g, unknown, or other
  misc_difference 19: note = a, c, u, g, unknown, or other
  misc_difference 21: note = a, c, u, g, unknown, or other
  misc_difference 40: note = a, c, u, g, unknown, or other
  misc_difference 41: note = a, c, u, g, unknown, or other
  misc_difference 44: note = a, c, u, g, unknown, or other
  misc_difference 45: note = a, c, u, g, unknown, or other
  misc_difference 52: note = a, c, u, g, unknown, or other
  misc_difference 53: note = a, c, u, g, unknown, or other
  misc_difference 59: note = a, c, u, g, unknown, or other
  misc_difference 60: note = a, c, u, g, unknown, or other
  misc_difference 63: note = a, c, u, g, unknown, or other
  misc_difference 66: note = a, c, u, g, unknown, or other
  misc_difference 67: note = a, c, u, g, unknown, or other
  misc_difference 80: note = a, c, u, g, unknown, or other
  misc_difference 81: note = a, c, u, g, unknown, or other
  misc_difference 82: note = a, c, u, g, unknown, or other
  misc_difference 89: note = a, c, u, g, unknown, or other
  misc_difference 90: note = a, c, u, g, unknown, or other
  misc_difference 92: note = a, c, u, g, unknown, or other
  misc_difference 93: note = a, c, u, g, unknown, or other
  misc_difference 94: note = a, c, u, g, unknown, or other
  misc_difference 98: note = a, c, u, g, unknown, or other
  misc_difference 103: note = a, c, u, g, unknown, or other
  misc_difference 104: note = a, c, u, g, unknown, or other
  misc_difference 108: note = a, c, u, g, unknown, or other
  misc_difference 112: note = a, c, u, g, unknown, or other
  misc_difference 113: note = a, c, u, g, unknown, or other
  misc_difference 114: note = a, c, u, g, unknown, or other
  misc_difference 117: note = a, c, u, g, unknown, or other
  misc_difference 119: note = a, c, u, g, unknown, or other
  misc_difference 120: note = a, c, u, g, unknown, or other
  misc_difference 121: note = a, c, u, g, unknown, or other
  misc_difference 125: note = a, c, u, g, unknown, or other
  misc_difference 127: note = a, c, u, g, unknown, or other
  misc_difference 128: note = a, c, u, g, unknown, or other
  misc_difference 131: note = a, c, u, g, unknown, or other
  misc_difference 135: note = a, c, u, g, unknown, or other
  misc_difference 142: note = a, c, u, g, unknown, or other
  misc_difference 144: note = a, c, u, g, unknown, or other
  misc_difference 146: note = a, c, u, g, unknown, or other
  misc_difference 148: note = a, c, u, g, unknown, or other
  misc_difference 149: note = a, c, u, g, unknown, or other
  misc_difference 150: note = a, c, u, g, unknown, or other
  misc_difference 152: note = a, c, u, g, unknown, or other
  misc_difference 153: note = a, c, u, g, unknown, or other
  misc_difference 154: note = a, c, u, g, unknown, or other
  misc_difference 156: note = a, c, u, g, unknown, or other
  misc_difference 158: note = a, c, u, g, unknown, or other
  misc_difference 159: note = a, c, u, g, unknown, or other
  misc_difference 162: note = a, c, u, g, unknown, or other
  misc_difference 163: note = a, c, u, g, unknown, or other
  misc_difference 164: note = a, c, u, g, unknown, or other
  misc_difference 165: note = a, c, u, g, unknown, or other
  misc_difference 166: note = a, c, u, g, unknown, or other
  misc_difference 167: note = a, c, u, g, unknown, or other
  misc_difference 174: note = a, c, u, g, unknown, or other
  misc_difference 175: note = a, c, u, g, unknown, or other
  misc_difference 176: note = a, c, u, g, unknown, or other
  misc_difference 177: note = a, c, u, g, unknown, or other
  misc_difference 178: note = a, c, u, g, unknown, or other
  misc_difference 187: note = a, c, u, g, unknown, or other
  misc_difference 188: note = a, c, u, g, unknown, or other
  misc_difference 189: note = a, c, u, g, unknown, or other
  misc_difference 190: note = a, c, u, g, unknown, or other
  misc_difference 191: note = a, c, u, g, unknown, or other
  misc_difference 192: note = a, c, u, g, unknown, or other
  misc_difference 193: note = a, c, u, g, unknown, or other
  misc_difference 194: note = a, c, u, g, unknown, or other
  misc_difference 195: note = a, c, u, g, unknown, or other
  misc_difference 196: note = a, c, u, g, unknown, or other
  misc_difference 199: note = a, c, u, g, unknown, or other
  misc_difference 200: note = a, c, u, g, unknown, or other
  misc_difference 201: note = a, c, u, g, unknown, or other
  misc_difference 205: note = a, c, u, g, unknown, or other
  misc_difference 208: note = a, c, u, g, unknown, or other
  misc_difference 212: note = a, c, u, g, unknown, or other
  misc_difference 219: note = a, c, u, g, unknown, or other
  misc_difference 222: note = a, c, u, g, unknown, or other
  misc_difference 225: note = a, c, u, g, unknown, or other
  misc_difference 226: note = a, c, u, g, unknown, or other
  misc_difference 227: note = a, c, u, g, unknown, or other
  misc_difference 228: note = a, c, u, g, unknown, or other
  misc_difference 229: note = a, c, u, g, unknown, or other
  misc_difference 230: note = a, c, u, g, unknown, or other
  misc_difference 232: note = a, c, u, g, unknown, or other
  misc_difference 233: note = a, c, u, g, unknown, or other
  misc_difference 234: note = a, c, u, g, unknown, or other
  misc_difference 235: note = a, c, u, g, unknown, or other
  misc_difference 237: note = a, c, u, g, unknown, or other
  misc_difference 251: note = a, c, u, g, unknown, or other
  misc_difference 252: note = a, c, u, g, unknown, or other
  misc_difference 264: note = a, c, u, g, unknown, or other
  misc_difference 265: note = a, c, u, g, unknown, or other
  misc_difference 266: note = a, c, u, g, unknown, or other
  misc_difference 268: note = a, c, u, g, unknown, or other
nnnnnnnyytrgaynytnnrnratryyyyyrrayaatrrnnyynnggryyannyrggrnnrynctnnyyyyycytgtagnnnrrctrcnnynnnaagnctgtnncccnrrynnnyrnynnnrctncnnacncrcnrgctgtnynynynnnynnnynrnnyynnnnnntagyagnnnnnrggyrgcynnnnnnnnnnrrnnnrrtnctnatanrcgaggntgnygnnnnnnrnnnnynyyrgggryatcyynnagyrycyrrrynnnynr

SEQ ID NO: 795373 - RNA, 237 nt, unidentified
  source 1..237: mol_type = unassigned RNA; note = ISPa25
  misc_difference 4: note = a, c, u, g, unknown, or other
  misc_difference 7: note = a, c, u, g, unknown, or other
  misc_difference 8: note = a, c, u, g, unknown, or other
  misc_difference 9: note = a, c, u, g, unknown, or other
  misc_difference 16: note = a, c, u, g, unknown, or other
  misc_difference 17: note = a, c, u, g, unknown, or other
  misc_difference 18: note = a, c, u, g, unknown, or other
  misc_difference 20: note = a, c, u, g, unknown, or other
  misc_difference 22: note = a, c, u, g, unknown, or other
  misc_difference 23: note = a, c, u, g, unknown, or other
  misc_difference 24: note = a, c, u, g, unknown, or other
  misc_difference 25: note = a, c, u, g, unknown, or other
  misc_difference 27: note = a, c, u, g, unknown, or other
  misc_difference 28: note = a, c, u, g, unknown, or other
  misc_difference 29: note = a, c, u, g, unknown, or other
  misc_difference 30: note = a, c, u, g, unknown, or other
  misc_difference 32: note = a, c, u, g, unknown, or other
  misc_difference 38: note = a, c, u, g, unknown, or other
  misc_difference 39: note = a, c, u, g, unknown, or other
  misc_difference 41: note = a, c, u, g, unknown, or other
  misc_difference 50: note = a, c, u, g, unknown, or other
  misc_difference 53: note = a, c, u, g, unknown, or other
  misc_difference 54: note = a, c, u, g, unknown, or other
  misc_difference 55: note = a, c, u, g, unknown, or other
  misc_difference 58: note = a, c, u, g, unknown, or other
  misc_difference 59: note = a, c, u, g, unknown, or other
  misc_difference 62: note = a, c, u, g, unknown, or other
  misc_difference 63: note = a, c, u, g, unknown, or other
  misc_difference 75: note = a, c, u, g, unknown, or other
  misc_difference 76: note = a, c, u, g, unknown, or other
  misc_difference 77: note = a, c, u, g, unknown, or other
  misc_difference 78: note = a, c, u, g, unknown, or other
  misc_difference 79: note = a, c, u, g, unknown, or other
  misc_difference 85: note = a, c, u, g, unknown, or other
  misc_difference 86: note = a, c, u, g, unknown, or other
  misc_difference 87: note = a, c, u, g, unknown, or other
  misc_difference 88: note = a, c, u, g, unknown, or other
  misc_difference 98: note = a, c, u, g, unknown, or other
  misc_difference 99: note = a, c, u, g, unknown, or other
  misc_difference 100: note = a, c, u, g, unknown, or other
  misc_difference 102: note = a, c, u, g, unknown, or other
  misc_difference 111: note = a, c, u, g, unknown, or other
  misc_difference 114: note = a, c, u, g, unknown, or other
  misc_difference 115: note = a, c, u, g, unknown, or other
  misc_difference 118: note = a, c, u, g, unknown, or other
  misc_difference 119: note = a, c, u, g, unknown, or other
  misc_difference 124: note = a, c, u, g, unknown, or other
  misc_difference 131: note = a, c, u, g, unknown, or other
  misc_difference 138: note = a, c, u, g, unknown, or other
  misc_difference 142: note = a, c, u, g, unknown, or other
  misc_difference 143: note = a, c, u, g, unknown, or other
  misc_difference 144: note = a, c, u, g, unknown, or other
  misc_difference 145: note = a, c, u, g, unknown, or other
  misc_difference 146: note = a, c, u, g, unknown, or other
  misc_difference 147: note = a, c, u, g, unknown, or other
  misc_difference 148: note = a, c, u, g, unknown, or other
  misc_difference 149: note = a, c, u, g, unknown, or other
  misc_difference 150: note = a, c, u, g, unknown, or other
  misc_difference 151: note = a, c, u, g, unknown, or other
  misc_difference 157: note = a, c, u, g, unknown, or other
  misc_difference 158: note = a, c, u, g, unknown, or other
  misc_difference 159: note = a, c, u, g, unknown, or other
  misc_difference 160: note = a, c, u, g, unknown, or other
  misc_difference 169: note = a, c, u, g, unknown, or other
  misc_difference 185: note = a, c, u, g, unknown, or other
  misc_difference 186: note = a, c, u, g, unknown, or other
  misc_difference 187: note = a, c, u, g, unknown, or other
  misc_difference 189: note = a, c, u, g, unknown, or other
  misc_difference 190: note = a, c, u, g, unknown, or other
  misc_difference 191: note = a, c, u, g, unknown, or other
  misc_difference 196: note = a, c, u, g, unknown, or other
  misc_difference 197: note = a, c, u, g, unknown, or other
  misc_difference 198: note = a, c, u, g, unknown, or other
  misc_difference 199: note = a, c, u, g, unknown, or other
  misc_difference 200: note = a, c, u, g, unknown, or other
  misc_difference 201: note = a, c, u, g, unknown, or other
  misc_difference 202: note = a, c, u, g, unknown, or other
  misc_difference 203: note = a, c, u, g, unknown, or other
  misc_difference 204: note = a, c, u, g, unknown, or other
  misc_difference 205: note = a, c, u, g, unknown, or other
  misc_difference 207: note = a, c, u, g, unknown, or other
  misc_difference 209: note = a, c, u, g, unknown, or other
  misc_difference 211: note = a, c, u, g, unknown, or other
  misc_difference 213: note = a, c, u, g, unknown, or other
  misc_difference 214: note = a, c, u, g, unknown, or other
  misc_difference 215: note = a, c, u, g, unknown, or other
  misc_difference 216: note = a, c, u, g, unknown, or other
  misc_difference 217: note = a, c, u, g, unknown, or other
  misc_difference 218: note = a, c, u, g, unknown, or other
  misc_difference 219: note = a, c, u, g, unknown, or other
  misc_difference 220: note = a, c, u, g, unknown, or other
  misc_difference 221: note = a, c, u, g, unknown, or other
  misc_difference 222: note = a, c, u, g, unknown, or other
  misc_difference 227: note = a, c, u, g, unknown, or other
cyynycnnnrrytgcnnnrngnnnncnnnntnatgrcnnrnyrgrycrgnccnnnrynnrrnnargccgataacnnnnntggccnnnnraggccgyynnnancgattggcnccnnrynngcgrnttycatnatggccngrrnnnnnnnnnnyycaynnnnaggccgranayacgrytgcarycrnnnynnnygyynnnnnnnnnnynrnyngnnnnnnnnnnyygynrgrggagtcc

SEQ ID NO: 795374 - RNA, 232 nt, unidentified
  source 1..232: mol_type = unassigned RNA; note = ISPa49
  misc_difference 1: note = a, c, u, g, unknown, or other
  misc_difference 2: note = a, c, u, g, unknown, or other
  misc_difference 4: note = a, c, u, g, unknown, or other
  misc_difference 5: note = a, c, u, g, unknown, or other
  misc_difference 10: note = a, c, u, g, unknown, or other
  misc_difference 22: note = a, c, u, g, unknown, or other
  misc_difference 27: note = a, c, u, g, unknown, or other
  misc_difference 30: note = a, c, u, g, unknown, or other
  misc_difference 56: note = a, c, u, g, unknown, or other
  misc_difference 72: note = a, c, u, g, unknown, or other
  misc_difference 75: note = a, c, u, g, unknown, or other
  misc_difference 76: note = a, c, u, g, unknown, or other
  misc_difference 77: note = a, c, u, g, unknown, or other
  misc_difference 78: note = a, c, u, g, unknown, or other
  misc_difference 79: note = a, c, u, g, unknown, or other
  misc_difference 80: note = a, c, u, g, unknown, or other
  misc_difference 81: note = a, c, u, g, unknown, or other
  misc_difference 82: note = a, c, u, g, unknown, or other
  misc_difference 89: note = a, c, u, g, unknown, or other
  misc_difference 96: note = a, c, u, g, unknown, or other
  misc_difference 98: note = a, c, u, g, unknown, or other
  misc_difference 99: note = a, c, u, g, unknown, or other
  misc_difference 102: note = a, c, u, g, unknown, or other
  misc_difference 138: note = a, c, u, g, unknown, or other
  misc_difference 143: note = a, c, u, g, unknown, or other
  misc_difference 144: note = a, c, u, g, unknown, or other
  misc_difference 145: note = a, c, u, g, unknown, or other
  misc_difference 146: note = a, c, u, g, unknown, or other
  misc_difference 147: note = a, c, u, g, unknown, or other
  misc_difference 148: note = a, c, u, g, unknown, or other
  misc_difference 149: note = a, c, u, g, unknown, or other
  misc_difference 150: note = a, c, u, g, unknown, or other
  misc_difference 151: note = a, c, u, g, unknown, or other
  misc_difference 157: note = a, c, u, g, unknown, or other
  misc_difference 159: note = a, c, u, g, unknown, or other
  misc_difference 185: note = a, c, u, g, unknown, or other
  misc_difference 192: note = a, c, u, g, unknown, or other
  misc_difference 193: note = a, c, u, g, unknown, or other
  misc_difference 197: note = a, c, u, g, unknown, or other
  misc_difference 198: note = a, c, u, g, unknown, or other
  misc_difference 206: note = a, c, u, g, unknown, or other
  misc_difference 207: note = a, c, u, g, unknown, or other
  misc_difference 208: note = a, c, u, g, unknown, or other
  misc_difference 209: note = a, c, u, g, unknown, or other
  misc_difference 214: note = a, c, u, g, unknown, or other
  misc_difference 215: note = a, c, u, g, unknown, or other
  misc_difference 216: note = a, c, u, g, unknown, or other
  misc_difference 217: note = a, c, u, g, unknown, or other
  misc_difference 218: note = a, c, u, g, unknown, or other
  misc_difference 219: note = a, c, u, g, unknown, or other
nnrnnyryynraaggttgcgynrggynyrnrygtgatgrcaracaggtyrgaccgngayycrcyaarcctgnaynnnnnnnngrgcyynragcycnynnrrnraatgaggygygrgtcagcgraytycatcrgggccngcagnnnnnnnnnctgcananaggccggatatararcygcarccyrnyyygyynnyyrnnrcryyrannnncyygnnnnnngggrggcgtycat

SEQ ID NO: 795375 - RNA, 138 nt, unidentified
  source 1..138: mol_type = unassigned RNA; note = ISHvo9
  misc_difference 1: note = a, c, u, g, unknown, or other
  misc_difference 2: note = a, c, u, g, unknown, or other
  misc_difference 3: note = a, c, u, g, unknown, or other
  misc_difference 4: note = a, c, u, g, unknown, or other
  misc_difference 5: note = a, c, u, g, unknown, or other
  misc_difference 8: note = a, c, u, g, unknown, or other
  misc_difference 11: note = a, c, u, g, unknown, or other
  misc_difference 12: note = a, c, u, g, unknown, or other
  misc_difference 13: note = a, c, u, g, unknown, or other
  misc_difference 14: note = a, c, u, g, unknown, or other
  misc_difference 15: note = a, c, u, g, unknown, or other
  misc_difference 17: note = a, c, u, g, unknown, or other
  misc_difference 21: note = a, c, u, g, unknown, or other
  misc_difference 22: note = a, c, u, g, unknown, or other
  misc_difference 23: note = a, c, u, g, unknown, or other
  misc_difference 24: note = a, c, u, g, unknown, or other
  misc_difference 25: note = a, c, u, g, unknown, or other
  misc_difference 26: note = a, c, u, g, unknown, or other
  misc_difference 27: note = a, c, u, g, unknown, or other
  misc_difference 28: note = a, c, u, g, unknown, or other
  misc_difference 29: note = a, c, u, g, unknown, or other
  misc_difference 30: note = a, c, u, g, unknown, or other
  misc_difference 31: note = a, c, u, g, unknown, or other
  misc_difference 33: note = a, c, u, g, unknown, or other
  misc_difference 34: note = a, c, u, g, unknown, or other
  misc_difference 36: note = a, c, u, g, unknown, or other
  misc_difference 37: note = a, c, u, g, unknown, or other
  misc_difference 38: note = a, c, u, g, unknown, or other
  misc_difference 39: note = a, c, u, g, unknown, or other
  misc_difference 40: note = a, c, u, g, unknown, or other
  misc_difference 41: note = a, c, u, g, unknown, or other
  misc_difference 43: note = a, c, u, g, unknown, or other
  misc_difference 44: note = a, c, u, g, unknown, or other
  misc_difference 47: note = a, c, u, g, unknown, or other
  misc_difference 48: note = a, c, u, g, unknown, or other
  misc_difference 49: note = a, c, u, g, unknown, or other
  misc_difference 50: note = a, c, u, g, unknown, or other
  misc_difference 51: note = a, c, u, g, unknown, or other
  misc_difference 52: note = a, c, u, g, unknown, or other
  misc_difference 53: note = a, c, u, g, unknown, or other
  misc_difference 56: note = a, c, u, g, unknown, or other
  misc_difference 60: note = a, c, u, g, unknown, or other
  misc_difference 62: note = a, c, u, g, unknown, or other
  misc_difference 63: note = a, c, u, g, unknown, or other
  misc_difference 64: note = a, c, u, g, unknown, or other
  misc_difference 65: note = a, c, u, g, unknown, or other
  misc_difference 66: note = a, c, u, g, unknown, or other
  misc_difference 70: note = a, c, u, g, unknown, or other
  misc_difference 73: note = a, c, u, g, unknown, or other
  misc_difference 76: note = a, c, u, g, unknown, or other
  misc_difference 77: note = a, c, u, g, unknown, or other
  misc_difference 78: note = a, c, u, g, unknown, or other
  misc_difference 79: note = a, c, u, g, unknown, or other
  misc_difference 80: note = a, c, u, g, unknown, or other
  misc_difference 81: note = a, c, u, g, unknown, or other
  misc_difference 82: note = a, c, u, g, unknown, or other
  misc_difference 83: note = a, c, u, g, unknown, or other
  misc_difference 84: note = a, c, u, g, unknown, or other
  misc_difference 85: note = a, c, u, g, unknown, or other
  misc_difference 87: note = a, c, u, g, unknown, or other
  misc_difference 88: note = a, c, u, g, unknown, or other
  misc_difference 90: note = a, c, u, g, unknown, or other
  misc_difference 92: note = a, c, u, g, unknown, or other
  misc_difference 93: note = a, c, u, g, unknown, or other
  misc_difference 94: note = a, c, u, g, unknown, or other
  misc_difference 95: note = a, c, u, g, unknown, or other
  misc_difference 96: note = a, c, u, g, unknown, or other
  misc_difference 97: note = a, c, u, g, unknown, or other
  misc_difference 98: note = a, c, u, g, unknown, or other
  misc_difference 102: note = a, c, u, g, unknown, or other
  misc_difference 105: note = a, c, u, g, unknown, or other
  misc_difference 106: note = a, c, u, g, unknown, or other
  misc_difference 107: note = a, c, u, g, unknown, or other
  misc_difference 108: note = a, c, u, g, unknown, or other
  misc_difference 113: note = a, c, u, g, unknown, or other
  misc_difference 114: note = a, c, u, g, unknown, or other
  misc_difference 115: note = a, c, u, g, unknown, or other
  misc_difference 116: note = a, c, u, g, unknown, or other
  misc_difference 117: note = a, c, u, g, unknown, or other
  misc_difference 118: note = a, c, u, g, unknown, or other
  misc_difference 119: note = a, c, u, g, unknown, or other
  misc_difference 120: note = a, c, u, g, unknown, or other
  misc_difference 121: note = a, c, u, g, unknown, or other
  misc_difference 122: note = a, c, u, g, unknown, or other
  misc_difference 123: note = a, c, u, g, unknown, or other
  misc_difference 124: note = a, c, u, g, unknown, or other
  misc_difference 125: note = a, c, u, g, unknown, or other
  misc_difference 126: note = a, c, u, g, unknown, or other
  misc_difference 129: note = a, c, u, g, unknown, or other
  misc_difference 130: note = a, c, u, g, unknown, or other
  misc_difference 131: note = a, c, u, g, unknown, or other
  misc_difference 132: note = a, c, u, g, unknown, or other
  misc_difference 135: note = a, c, u, g, unknown, or other
  misc_difference 136: note = a, c, u, g, unknown, or other
  misc_difference 137: note = a, c, u, g, unknown, or other
  misc_difference 138: note = a, c, u, g, unknown, or other
nnnnngrnyrnnnnnrnyyrnnnnnnnnnnnrnnynnnnnnrnnyrnnnnnnngantrrnynnnnnyrynrrnrrnnnnnnnnnnynnrnynnnnnnnarynyrnnnnrrygnnnnnnnnnnnnnngynnnnyrnnnn

SEQ ID NO: 795376 - RNA, 220 nt, unidentified
  source 1..220: mol_type = unassigned RNA; note = ISMmg2
  misc_difference 1: note = a, c, u, g, unknown, or other
  misc_difference 2: note = a, c, u, g, unknown, or other
  misc_difference 3: note = a, c, u, g, unknown, or other
  misc_difference 21: note = a, c, u, g, unknown, or other
  misc_difference 24: note = a, c, u, g, unknown, or other
  misc_difference 53: note = a, c, u, g, unknown, or other
  misc_difference 60: note = a, c, u, g, unknown, or other
  misc_difference 65: note = a, c, u, g, unknown, or other
  misc_difference 66: note = a, c, u, g, unknown, or other
  misc_difference 69: note = a, c, u, g, unknown, or other
  misc_difference 74: note = a, c, u, g, unknown, or other
  misc_difference 84: note = a, c, u, g, unknown, or other
  misc_difference 91: note = a, c, u, g, unknown, or other
  misc_difference 92: note = a, c, u, g, unknown, or other
  misc_difference 97: note = a, c, u, g, unknown, or other
  misc_difference 100: note = a, c, u, g, unknown, or other
  misc_difference 109: note = a, c, u, g, unknown, or other
  misc_difference 120: note = a, c, u, g, unknown, or other
  misc_difference 139: note = a, c, u, g, unknown, or other
  misc_difference 140: note = a, c, u, g, unknown, or other
  misc_difference 141: note = a, c, u, g, unknown, or other
  misc_difference 142: note = a, c, u, g, unknown, or other
  misc_difference 143: note = a, c, u, g, unknown, or other
  misc_difference 144: note = a, c, u, g, unknown, or other
  misc_difference 145: note = a, c, u, g, unknown, or other
  misc_difference 153: note = a, c, u, g, unknown, or other
  misc_difference 167: note = a, c, u, g, unknown, or other
  misc_difference 169: note = a, c, u, g, unknown, or other
  misc_difference 185: note = a, c, u, g, unknown, or other
  misc_difference 186: note = a, c, u, g, unknown, or other
  misc_difference 192: note = a, c, u, g, unknown, or other
  misc_difference 193: note = a, c, u, g, unknown, or other
  misc_difference 194: note = a, c, u, g, unknown, or other
  misc_difference 200: note = a, c, u, g, unknown, or other
  misc_difference 201: note = a, c, u, g, unknown, or other
  misc_difference 202: note = a, c, u, g, unknown, or other
  misc_difference 203: note = a, c, u, g, unknown, or other
  misc_difference 204: note = a, c, u, g, unknown, or other
  misc_difference 205: note = a, c, u, g, unknown, or other
  misc_difference 207: note = a, c, u, g, unknown, or other
nnnrrrttgyragrrcraygngangtgatggcrraccggtcrgrccgggrrynrggacancccrnnrrnygtcnrrggcrtyrnagccygnnrarcngantgggaccynryycgcggaynccatcarggccagcrgtynnnnnnnrcygcrynaacaggccgracanangacygcayccgaccrnnygycannncrycrnnnnnnyncttgcaaygcggg

SEQ ID NO: 795377 - RNA, 117 nt, unidentified
  source 1..117: mol_type = unassigned RNA; note = ISPpu11
  misc_difference 6: note = a, c, u, g, unknown, or other
  misc_difference 7: note = a, c, u, g, unknown, or other
  misc_difference 10: note = a, c, u, g, unknown, or other
  misc_difference 11: note = a, c, u, g, unknown, or other
  misc_difference 12: note = a, c, u, g, unknown, or other
  misc_difference 13: note = a, c, u, g, unknown, or other
  misc_difference 14: note = a, c, u, g, unknown, or other
  misc_difference 15: note = a, c, u, g, unknown, or other
  misc_difference 17: note = a, c, u, g, unknown, or other
  misc_difference 18: note = a, c, u, g, unknown, or other
  misc_difference 21: note = a, c, u, g, unknown, or other
  misc_difference 22: note = a, c, u, g, unknown, or other
  misc_difference 23: note = a, c, u, g, unknown, or other
  misc_difference 24: note = a, c, u, g, unknown, or other
  misc_difference 25: note = a, c, u, g, unknown, or other
  misc_difference 26: note = a, c, u, g, unknown, or other
  misc_difference 27: note = a, c, u, g, unknown, or other
  misc_difference 28: note = a, c, u, g, unknown, or other
  misc_difference 30: note = a, c, u, g, unknown, or other
  misc_difference 31: note = a, c, u, g, unknown, or other
  misc_difference 32: note = a, c, u, g, unknown, or other
  misc_difference 35: note = a, c, u, g, unknown, or other
  misc_difference 37: note = a, c, u, g, unknown, or other
  misc_difference 38: note = a, c, u, g, unknown, or other
  misc_difference 42: note = a, c, u, g, unknown, or other
  misc_difference 46: note = a, c, u, g, unknown, or other
  misc_difference 47: note = a, c, u, g, unknown, or other
  misc_difference 48: note = a, c, u, g, unknown, or other
  misc_difference 49: note = a, c, u, g, unknown, or other
  misc_difference 50: note = a, c, u, g, unknown, or other
  misc_difference 51: note = a, c, u, g, unknown, or other
  misc_difference 56: note = a, c, u, g, unknown, or other
  misc_difference 59: note = a, c, u, g, unknown, or other
  misc_difference 60: note = a, c, u, g, unknown, or other
  misc_difference 61: note = a, c, u, g, unknown, or other
  misc_difference 62: note = a, c, u, g, unknown, or other
  misc_difference 63: note = a, c, u, g, unknown, or other
  misc_difference 64: note = a, c, u, g, unknown, or other
  misc_difference 67: note = a, c, u, g, unknown, or other
  misc_difference 68: note = a, c, u, g, unknown, or other
  misc_difference 72: note = a, c, u, g, unknown, or other
  misc_difference 73: note = a, c, u, g, unknown, or other
  misc_difference 75: note = a, c, u, g, unknown, or other
  misc_difference 80: note = a, c, u, g, unknown, or other
  misc_difference 81: note = a, c, u, g, unknown, or other
  misc_difference 82: note = a, c, u, g, unknown, or other
  misc_difference 87: note = a, c, u, g, unknown, or other
  misc_difference 91: note = a, c, u, g, unknown, or other
  misc_difference 92: note = a, c, u, g, unknown, or other
  misc_difference 93: note = a, c, u, g, unknown, or other
  misc_difference 94: note = a, c, u, g, unknown, or other
  misc_difference 95: note = a, c, u, g, unknown, or other
  misc_difference 96: note = a, c, u, g, unknown, or other
  misc_difference 97: note = a, c, u, g, unknown, or other
  misc_difference 98: note = a, c, u, g, unknown, or other
  misc_difference 99: note = a, c, u, g, unknown, or other
  misc_difference 101: note = a, c, u, g, unknown, or other
  misc_difference 103: note = a, c, u, g, unknown, or other
  misc_difference 104: note = a, c, u, g, unknown, or other
  misc_difference 105: note = a, c, u, g, unknown, or other
  misc_difference 106: note = a, c, u, g, unknown, or other
  misc_difference 107: note = a, c, u, g, unknown, or other
  misc_difference 108: note = a, c, u, g, unknown, or other
  misc_difference 113: note = a, c, u, g, unknown, or other
  misc_difference 114: note = a, c, u, g, unknown, or other
  misc_difference 115: note = a, c, u, g, unknown, or other
  misc_difference 116: note = a, c, u, g, unknown, or other
  misc_difference 117: note = a, c, u, g, unknown, or other
raccgnnrynnnnnnanncynnnnnnnnynnngrnynnragnycrnnnnnnyratnrgnnnnnnrynngcrnnynyyatnnnggccnrrrnnnnnnnnnyncnnnnnnrrccnnnnn

SEQ ID NO: 795378 - RNA, 190 nt, unidentified
  source 1..190: mol_type = unassigned RNA; note = ISWen2
  misc_difference 1: note = a, c, u, g, unknown, or other
  misc_difference 2: note = a, c, u, g, unknown, or other
  misc_difference 3: note = a, c, u, g, unknown, or other
  misc_difference 4: note = a, c, u, g, unknown, or other
  misc_difference 7: note = a, c, u, g, unknown, or other
  misc_difference 8: note = a, c, u, g, unknown, or other
  misc_difference 9: note = a, c, u, g, unknown, or other
  misc_difference 10: note = a, c, u, g, unknown, or other
  misc_difference 11: note = a, c, u, g, unknown, or other
  misc_difference 12: note = a, c, u, g, unknown, or other
  misc_difference 14: note = a, c, u, g, unknown, or other
  misc_difference 15: note = a, c, u, g, unknown, or other
  misc_difference 16: note = a, c, u, g, unknown, or other
  misc_difference 17: note = a, c, u, g, unknown, or other
  misc_difference 18: note = a, c, u, g, unknown, or other
  misc_difference 19: note = a, c, u, g, unknown, or other
  misc_difference 20: note = a, c, u, g, unknown, or other
  misc_difference 21: note = a, c, u, g, unknown, or other
  misc_difference 22: note = a, c, u, g, unknown, or other
  misc_difference 23: note = a, c, u, g, unknown, or other
  misc_difference 24: note = a, c, u, g, unknown, or other
  misc_difference 26: note = a, c, u, g, unknown, or other
  misc_difference 27: note = a, c, u, g, unknown, or other
  misc_difference 28: note = a, c, u, g, unknown, or other
  misc_difference 29: note = a, c, u, g, unknown, or other
  misc_difference 30: note = a, c, u, g, unknown, or other
  misc_difference 31: note = a, c, u, g, unknown, or other
  misc_difference 32: note = a, c, u, g, unknown, or other
  misc_difference 34: note = a, c, u, g, unknown, or other
  misc_difference 38: note = a, c, u, g, unknown, or other
  misc_difference 40: note = a, c, u, g, unknown, or other
  misc_difference 41: note = a, c, u, g, unknown, or other
  misc_difference 44: note = a, c, u, g, unknown, or other
  misc_difference 48: note = a, c, u, g, unknown, or other
  misc_difference 52: note = a, c, u, g, unknown, or other
  misc_difference 53: note = a, c, u, g, unknown, or other
  misc_difference 54: note = a, c, u, g, unknown, or other
  misc_difference 55: note = a, c, u, g, unknown, or other
  misc_difference 56: note = a, c, u, g, unknown, or other
  misc_difference 57: note = a, c, u, g, unknown, or other
  misc_difference 58: note = a, c, u, g, unknown, or other
  misc_difference 59: note = a, c, u, g, unknown, or other
  misc_difference 62: note = a, c, u, g, unknown, or other
  misc_difference 67: note = a, c, u, g, unknown, or other
  misc_difference 68: note = a, c, u, g, unknown, or other
  misc_difference 69: note = a, c, u, g, unknown, or other
  misc_difference 70: note = a, c, u, g, unknown, or other
  misc_difference 78: note = a, c, u, g, unknown, or other
  misc_difference 79: note = a, c, u, g, unknown, or other
  misc_difference 80: note = a, c, u, g, unknown, or other
  misc_difference 81: note = a, c, u, g, unknown, or other
  misc_difference 82: note = a, c, u, g, unknown, or other
  misc_difference 83: note = a, c, u, g, unknown, or other
  misc_difference 88: note = a, c, u, g, unknown, or other
  misc_difference 91: note = a, c, u, g, unknown, or other
  misc_difference 96: note = a, c, u, g, unknown, or other
  misc_difference 97: note = a, c, u, g, unknown, or other
  misc_difference 99: note = a, c, u, g, unknown, or other
  misc_difference 102: note = a, c, u, g, unknown, or other
  misc_difference 103: note = a, c, u, g, unknown, or other
  misc_difference 104: note = a, c, u, g, unknown, or other
  misc_difference 105: note = a, c, u, g, unknown, or other
  misc_difference 106: note = a, c, u, g, unknown, or other
  misc_difference 110: note = a, c, u, g, unknown, or other
  misc_difference 113: note = a, c, u, g, unknown, or other
  misc_difference 114: note = a, c, u, g, unknown, or other
  misc_difference 115: note = a, c, u, g, unknown, or other
  misc_difference 131: note = a, c, u, g, unknown, or other
  misc_difference 132: note = a, c, u, g, unknown, or other
  misc_difference 137: note = a, c, u, g, unknown, or other
  misc_difference 138: note = a, c, u, g, unknown, or other
  misc_difference 139: note = a, c, u, g, unknown, or other
  misc_difference 142: note = a, c, u, g, unknown, or other
  misc_difference 143: note = a, c, u, g, unknown, or other
  misc_difference 144: note = a, c, u, g, unknown, or other
  misc_difference 145: note = a, c, u, g, unknown, or other
  misc_difference 146: note = a, c, u, g, unknown, or other
  misc_difference 149: note = a, c, u, g, unknown, or other
  misc_difference 150: note = a, c, u, g, unknown, or other
  misc_difference 161: note = a, c, u, g, unknown, or other
  misc_difference 162: note = a, c, u, g, unknown, or other
  misc_difference 175: note = a, c, u, g, unknown, or other
  misc_difference 176: note = a, c, u, g, unknown, or other
  misc_difference 177: note = a, c, u, g, unknown, or other
  misc_difference 178: note = a, c, u, g, unknown, or other
  misc_difference 179: note = a, c, u, g, unknown, or other
  misc_difference 181: note = a, c, u, g, unknown, or other
  misc_difference 182: note = a, c, u, g, unknown, or other
  misc_difference 184: note = a, c, u, g, unknown, or other
  misc_difference 190: note = a, c, u, g, unknown, or other
nnnnrynnnnnnrnnnnnnnnnnnrnnnnnnnrnrrrnrnnrgngarnyygnnnnnnnncynrgrynnnnrarycygnnnnnnagatnrgnycyynnynyynnnnnyyrnyynnnarryygracrgtatcnnargcnnnyynnnnnrrnnragcytgyatnnacaaggytrryynnnnnrnnrnyyryyn

SEQ ID NO: 795379 - RNA, 221 nt, unidentified
  source 1..221: mol_type = unassigned RNA; note = ISSde14
  misc_difference 1: note = a, c, u, g, unknown, or other
  misc_difference 2: note = a, c, u, g, unknown, or other
  misc_difference 3: note = a, c, u, g, unknown, or other
  misc_difference 4: note = a, c, u, g, unknown, or other
  misc_difference 5: note = a, c, u, g, unknown, or other
  misc_difference 6: note = a, c, u, g, unknown, or other
  misc_difference 7: note = a, c, u, g, unknown, or other
  misc_difference 12: note = a, c, u, g, unknown, or other
  misc_difference 13: note = a, c, u, g, unknown, or other
  misc_difference 16: note = a, c, u, g, unknown, or other
  misc_difference 21: note = a, c, u, g, unknown, or other
  misc_difference 24: note = a, c, u, g, unknown, or other
  misc_difference 25: note = a, c, u, g, unknown, or other
  misc_difference 26: note = a, c, u, g, unknown, or other
  misc_difference 27: note = a, c, u, g, unknown, or other
  misc_difference 29: note = a, c, u, g, unknown, or other
  misc_difference 30: note = a, c, u, g, unknown, or other
  misc_difference 31: note = a, c, u, g, unknown, or other
  misc_difference 37: note = a, c, u, g, unknown, or other
  misc_difference 39: note = a, c, u, g, unknown, or other
  misc_difference 43: note = a, c, u, g, unknown, or other
  misc_difference 56: note = a, c, u, g, unknown, or other
  misc_difference 58: note = a, c, u, g, unknown, or other
  misc_difference 60: note = a, c, u, g, unknown, or other
  misc_difference 61: note = a, c, u, g, unknown, or other
  misc_difference 65: note = a, c, u, g, unknown, or other
  misc_difference 66: note = a, c, u, g, unknown, or other
  misc_difference 70: note = a, c, u, g, unknown, or other
  misc_difference 71: note = a, c, u, g, unknown, or other
  misc_difference 72: note = a, c, u, g, unknown, or other
  misc_difference 73: note = a, c, u, g, unknown, or other
  misc_difference 74: note = a, c, u, g, unknown, or other
  misc_difference 75: note = a, c, u, g, unknown, or other
  misc_difference 76: note = a, c, u, g, unknown, or other
  misc_difference 79: note = a, c, u, g, unknown, or other
  misc_difference 80: note = a, c, u, g, unknown, or other
  misc_difference 83: note = a, c, u, g, unknown, or other
  misc_difference 84: note = a, c, u, g, unknown, or other
  misc_difference 85: note = a, c, u, g, unknown, or other
  misc_difference 86: note = a, c, u, g, unknown, or other
  misc_difference 87: note = a, c, u, g, unknown, or other
  misc_difference 88: note = a, c, u, g, unknown, or other
  misc_difference 91: note = a, c, u, g, unknown, or other
  misc_difference 92: note = a, c, u, g, unknown, or other
  misc_difference 96: note = a, c, u, g, unknown, or other
  misc_difference 97: note = a, c, u, g, unknown, or other
  misc_difference 98: note = a, c, u, g, unknown, or other
  misc_difference 101: note = a, c, u, g, unknown, or other
  misc_difference 106: note = a, c, u, g, unknown, or other
  misc_difference 109: note = a, c, u, g, unknown, or other
  misc_difference 110: note = a, c, u, g, unknown, or other
  misc_difference 111: note = a, c, u, g, unknown, or other
  misc_difference 112: note = a, c, u, g, unknown, or other
  misc_difference 114: note = a, c, u, g, unknown, or other
  misc_difference 116: note = a, c, u, g, unknown, or other
  misc_difference 123: note = a, c, u, g, unknown, or other
  misc_difference 137: note = a, c, u, g, unknown, or other
  misc_difference 141: note = a, c, u, g, unknown, or other
  misc_difference 142: note = a, c, u, g, unknown, or other
  misc_difference 143: note = a, c, u, g, unknown, or other
  misc_difference 144: note = a, c, u, g, unknown, or other
  misc_difference 145: note = a, c, u, g, unknown, or other
  misc_difference 146: note = a, c, u, g, unknown, or other
  misc_difference 147: note = a, c, u, g, unknown, or other
  misc_difference 148: note = a, c, u, g, unknown, or other
  misc_difference 149: note = a, c, u, g, unknown, or other
  misc_difference 150: note = a, c, u, g, unknown, or other
  misc_difference 151: note = a, c, u, g, unknown, or other
  misc_difference 156: note = a, c, u, g, unknown, or other
  misc_difference 157: note = a, c, u, g, unknown, or other
  misc_difference 158: note = a, c, u, g, unknown, or other
  misc_difference 160: note = a, c, u, g, unknown, or other
  misc_difference 175: note = a, c, u, g, unknown, or other
  misc_difference 176: note = a, c, u, g, unknown, or other
  misc_difference 177: note = a, c, u, g, unknown, or other
  misc_difference 184: note = a, c, u, g, unknown, or other
  misc_difference 185: note = a, c, u, g, unknown, or other
  misc_difference 191: note = a, c, u, g, unknown, or other
  misc_difference 192: note = a, c, u, g, unknown, or other
  misc_difference 193: note = a, c, u, g, unknown, or other
  misc_difference 194: note = a, c, u, g, unknown, or other
  misc_difference 198: note = a, c, u, g, unknown, or other
  misc_difference 199: note = a, c, u, g, unknown, or other
  misc_difference 200: note = a, c, u, g, unknown, or other
  misc_difference 201: note = a, c, u, g, unknown, or other
  misc_difference 202: note = a, c, u, g, unknown, or other
  misc_difference 203: note = a, c, u, g, unknown, or other
  misc_difference 204: note = a, c, u, g, unknown, or other
  misc_difference 205: note = a, c, u, g, unknown, or other
  misc_difference 206: note = a, c, u, g, unknown, or other
  misc_difference 207: note = a, c, u, g, unknown, or other
  misc_difference 208: note = a, c, u, g, unknown, or other
  misc_difference 209: note = a, c, u, g, unknown, or other
  misc_difference 216: note = a, c, u, g, unknown, or other
  misc_difference 217: note = a, c, u, g, unknown, or other
  misc_difference 218: note = a, c, u, g, unknown, or other
  misc_difference 219: note = a, c, u, g, unknown, or other
  misc_difference 220: note = a, c, u, g, unknown, or other
  misc_difference 221: note = a, c, u, g, unknown, or other
nnnnnnnyryynnrrnygcrnrrnnnnrnnnratgrnrnraynggtyrraccggcnynynnrrannctgnnnnnnncrnnggnnnnnnrannccgnnnrrnygatnagnnnnrnrngygcrrntyycatyrrggccngrrnnnnnnnnnnnyycrnnnanargccgratataygnnngcaryynnryytynnnnyyrnnnnnnnnnnnnyttgyrnnnnnn

SEQ ID NO: 795380 - RNA, 156 nt, unidentified
  source 1..156: mol_type = unassigned RNA; note = ISMac14
  misc_difference 1: note = a, c, u, g, unknown, or other
  misc_difference 2: note = a, c, u, g, unknown, or other
  misc_difference 3: note = a, c, u, g, unknown, or other
  misc_difference 4: note = a, c, u, g, unknown, or other
  misc_difference 5: note = a, c, u, g, unknown, or other
  misc_difference 7: note = a, c, u, g, unknown, or other
  misc_difference 8: note = a, c, u, g, unknown, or other
  misc_difference 10: note = a, c, u, g, unknown, or other
  misc_difference 18: note = a, c, u, g, unknown, or other
  misc_difference 20: note = a, c, u, g, unknown, or other
  misc_difference 27: note = a, c, u, g, unknown, or other
  misc_difference 28: note = a, c, u, g, unknown, or other
  misc_difference 29: note = a, c, u, g, unknown, or other
  misc_difference 30: note = a, c, u, g, unknown, or other
  misc_difference 31: note = a, c, u, g, unknown, or other
  misc_difference 32: note = a, c, u, g, unknown, or other
  misc_difference 42: note = a, c, u, g, unknown, or other
  misc_difference 43: note = a, c, u, g, unknown, or other
  misc_difference 44: note = a, c, u, g, unknown, or other
  misc_difference 47: note = a, c, u, g, unknown, or other
  misc_difference 54: note = a, c, u, g, unknown, or other
  misc_difference 55: note = a, c, u, g, unknown, or other
  misc_difference 56: note = a, c, u, g, unknown, or other
  misc_difference 57: note = a, c, u, g, unknown, or other
  misc_difference 67: note = a, c, u, g, unknown, or other
  misc_difference 68: note = a, c, u, g, unknown, or other
  misc_difference 69: note = a, c, u, g, unknown, or other
  misc_difference 70: note = a, c, u, g, unknown, or other
  misc_difference 72: note = a, c, u, g, unknown, or other
  misc_difference 75: note = a, c, u, g, unknown, or other
  misc_difference 76: note = a, c, u, g, unknown, or other
  misc_difference 81: note = a, c, u, g, unknown, or other
  misc_difference 83: note = a, c, u, g, unknown, or other
  misc_difference 86: note = a, c, u, g, unknown, or other
  misc_difference 87: note = a, c, u, g, unknown, or other
  misc_difference 95: note = a, c, u, g, unknown, or other
  misc_difference 97: note = a, c, u, g, unknown, or other
  misc_difference 99: note = a, c, u, g, unknown, or other
  misc_difference 102: note = a, c, u, g, unknown, or other
  misc_difference 107: note = a, c, u, g, unknown, or other
  misc_difference 111: note = a, c, u, g, unknown, or other
  misc_difference 112: note = a, c, u, g, unknown, or other
  misc_difference 116: note = a, c, u, g, unknown, or other
  misc_difference 124: note = a, c, u, g, unknown, or other
  misc_difference 129: note = a, c, u, g, unknown, or other
  misc_difference 130: note = a, c, u, g, unknown, or other
  misc_difference 131: note = a, c, u, g, unknown, or other
  misc_difference 134: note = a, c, u, g, unknown, or other
  misc_difference 135: note = a, c, u, g, unknown, or other
  misc_difference 136: note = a, c, u, g, unknown, or other
  misc_difference 145: note = a, c, u, g, unknown, or other
  misc_difference 146: note = a, c, u, g, unknown, or other
  misc_difference 147: note = a, c, u, g, unknown, or other
  misc_difference 148: note = a, c, u, g, unknown, or other
  misc_difference 152: note = a, c, u, g, unknown, or other
  misc_difference 153: note = a, c, u, g, unknown, or other
  misc_difference 154: note = a, c, u, g, unknown, or other
  misc_difference 155: note = a, c, u, g, unknown, or other
  misc_difference 156: note = a, c, u, g, unknown, or other
nnnnnynnyntgggyagnrnaggytgnnnnnnttttgggrynnnranyccgyynnnnaaactarccnnnnrntynnyycgnangcnnrartgcgncnyngancrcgnatrnnaaantgyyyyynraggnnnyynnnctrcccrynnnnrrrnnnnn

SEQ ID NO: 795381 - RNA, 236 nt, unidentified
  source 1..236: mol_type = unassigned RNA; note = ISRta4
  misc_difference 3: note = a, c, u, g, unknown, or other
  misc_difference 4: note = a, c, u, g, unknown, or other
  misc_difference 9: note = a, c, u, g, unknown, or other
  misc_difference 10: note = a, c, u, g, unknown, or other
  misc_difference 11: note = a, c, u, g, unknown, or other
  misc_difference 12: note = a, c, u, g, unknown, or other
  misc_difference 19: note = a, c, u, g, unknown, or other
  misc_difference 20: note = a, c, u, g, unknown, or other
  misc_difference 25: note = a, c, u, g, unknown, or other
  misc_difference 27: note = a, c, u, g, unknown, or other
  misc_difference 30: note = a, c, u, g, unknown, or other
  misc_difference 31: note = a, c, u, g, unknown, or other
  misc_difference 32: note = a, c, u, g, unknown, or other
  misc_difference 34: note = a, c, u, g, unknown, or other
  misc_difference 44: note = a, c, u, g, unknown, or other
  misc_difference 62: note = a, c, u, g, unknown, or other
  misc_difference 63: note = a, c, u, g, unknown, or other
  misc_difference 65: note = a, c, u, g, unknown, or other
  misc_difference 66: note = a, c, u, g, unknown, or other
  misc_difference 76: note = a, c, u, g, unknown, or other
  misc_difference 77: note = a, c, u, g, unknown, or other
  misc_difference 78: note = a, c, u, g, unknown, or other
  misc_difference 79: note = a, c, u, g, unknown, or other
  misc_difference 80: note = a, c, u, g, unknown, or other
  misc_difference 81: note = a, c, u, g, unknown, or other
  misc_difference 82: note = a, c, u, g, unknown, or other
  misc_difference 84: note = a, c, u, g, unknown, or other
  misc_difference 85: note = a, c, u, g, unknown, or other
  misc_difference 87: note = a, c, u, g, unknown, or other
  misc_difference 92: note = a, c, u, g, unknown, or other
  misc_difference 97: note = a, c, u, g, unknown, or other
  misc_difference 100: note = a, c, u, g, unknown, or other
  misc_difference 101: note = a, c, u, g, unknown, or other
  misc_difference 102: note = a, c, u, g, unknown, or other
  misc_difference 103: note = a, c, u, g, unknown, or other
  misc_difference 104: note = a, c, u, g, unknown, or other
  misc_difference 105: note = a, c, u, g, unknown, or other
  misc_difference 114: note = a, c, u, g, unknown, or other
  misc_difference 115: note = a, c, u, g, unknown, or other
  misc_difference 116: note = a, c, u, g, unknown, or other
  misc_difference 117: note = a, c, u, g, unknown, or other
  misc_difference 118: note = a, c, u, g, unknown, or other
  misc_difference 119: note = a, c, u, g, unknown, or other
  misc_difference 141: note = a, c, u, g, unknown, or other
  misc_difference 148: note = a, c, u, g, unknown, or other
  misc_difference 149: note = a, c, u, g, unknown, or other
  misc_difference 150: note = a, c, u, g, unknown, or other
  misc_difference 151: note = a, c, u, g, unknown, or other
  misc_difference 159: note = a, c, u, g, unknown, or other
  misc_difference 160: note = a, c, u, g, unknown, or other
  misc_difference 161: note = a, c, u, g, unknown, or other
  misc_difference 162: note = a, c, u, g, unknown, or other
  misc_difference 177: note = a, c, u, g, unknown, or other
  misc_difference 186: note = a, c, u, g, unknown, or other
  misc_difference 187: note = a, c, u, g, unknown, or other
  misc_difference 188: note = a, c, u, g, unknown, or other
  misc_difference 189: note = a, c, u, g, unknown, or other
  misc_difference 192: note = a, c, u, g, unknown, or other
  misc_difference 194: note = a, c, u, g, unknown, or other
  misc_difference 195: note = a, c, u, g, unknown, or other
  misc_difference 196: note = a, c, u, g, unknown, or other
  misc_difference 197: note = a, c, u, g, unknown, or other
  misc_difference 200: note = a, c, u, g, unknown, or other
  misc_difference 201: note = a, c, u, g, unknown, or other
  misc_difference 205: note = a, c, u, g, unknown, or other
  misc_difference 206: note = a, c, u, g, unknown, or other
  misc_difference 207: note = a, c, u, g, unknown, or other
  misc_difference 208: note = a, c, u, g, unknown, or other
  misc_difference 209: note = a, c, u, g, unknown, or other
  misc_difference 210: note = a, c, u, g, unknown, or other
  misc_difference 211: note = a, c, u, g, unknown, or other
  misc_difference 212: note = a, c, u, g, unknown, or other
  misc_difference 213: note = a, c, u, g, unknown, or other
  misc_difference 217: note = a, c, u, g, unknown, or other
  misc_difference 218: note = a, c, u, g, unknown, or other
  misc_difference 219: note = a, c, u, g, unknown, or other
  misc_difference 220: note = a, c, u, g, unknown, or other
  misc_difference 223: note = a, c, u, g, unknown, or other
  misc_difference 228: note = a, c, u, g, unknown, or other
  misc_difference 229: note = a, c, u, g, unknown, or other
rrnnyryynnnnggttgcnnaggynrnyrnnnrnrtgatggcrnracaggtyrgaccgyrrnnrnnyaarcctgrnnnnnnnynngnrcytnragyncrnnnnnnaratgaggnnnnnnyyrgcgraytycatyrgggccngcrgrynnnngyctgcannnnaggccggatataarncygcarccnnnncynynnnncrnnryrnnnnnnnnncytnnnnarncgggnngygtyca

SEQ ID NO: 795382 - RNA, 187 nt, unidentified
  source 1..187: mol_type = unassigned RNA; note = ISKol6
  misc_difference 2: note = a, c, u, g, unknown, or other
  misc_difference 5: note = a, c, u, g, unknown, or other
  misc_difference 7: note = a, c, u, g, unknown, or other
  misc_difference 8: note = a, c, u, g, unknown, or other
  misc_difference 9: note = a, c, u, g, unknown, or other
  misc_difference 10: note = a, c, u, g, unknown, or other
  misc_difference 11: note = a, c, u, g, unknown, or other
  misc_difference 13: note = a, c, u, g, unknown, or other
  misc_difference 19: note = a, c, u, g, unknown, or other
  misc_difference 21: note = a, c, u, g, unknown, or other
  misc_difference 22: note = a, c, u, g, unknown, or other
  misc_difference 23: note = a, c, u, g, unknown, or other
  misc_difference 24: note = a, c, u, g, unknown, or other
  misc_difference 25: note = a, c, u, g, unknown, or other
  misc_difference 26: note = a, c, u, g, unknown, or other
  misc_difference 31: note = a, c, u, g, unknown, or other
  misc_difference 36: note = a, c, u, g, unknown, or other
  misc_difference 38: note = a, c, u, g, unknown, or other
  misc_difference 39: note = a, c, u, g, unknown, or other
  misc_difference 40: note = a, c, u, g, unknown, or other
  misc_difference 43: note = a, c, u, g, unknown, or other
  misc_difference 44: note = a, c, u, g, unknown, or other
  misc_difference 46: note = a, c, u, g, unknown, or other
  misc_difference 47: note = a, c, u, g, unknown, or other
  misc_difference 48: note = a, c, u, g, unknown, or other
  misc_difference 49: note = a, c, u, g, unknown, or other
  misc_difference 51: note = a, c, u, g, unknown, or other
  misc_difference 52: note = a, c, u, g, unknown, or other
  misc_difference 54: note = a, c, u, g, unknown, or other
  misc_difference 55: note = a, c, u, g, unknown, or other
  misc_difference 58: note = a, c, u, g, unknown, or other
  misc_difference 59: note = a, c, u, g, unknown, or other
  misc_difference 64: note = a, c, u, g, unknown, or other
  misc_difference 65: note = a, c, u, g, unknown, or other
  misc_difference 66: note = a, c, u, g, unknown, or other
  misc_difference 68: note = a, c, u, g, unknown, or other
  misc_difference 70: note = a, c, u, g, unknown, or other
  misc_difference 72: note = a, c, u, g, unknown, or other
  misc_difference 78: note = a, c, u, g, unknown, or other
  misc_difference 83: note = a, c, u, g, unknown, or other
  misc_difference 84: note = a, c, u, g, unknown, or other
  misc_difference 85: note = a, c, u, g, unknown, or other
  misc_difference 86: note = a, c, u, g, unknown, or other
  misc_difference 88: note = a, c, u, g, unknown, or other
  misc_difference 90: note = a, c, u, g, unknown, or other
  misc_difference 91: note = a, c, u, g, unknown, or other
  misc_difference 92: note = a, c, u, g, unknown, or other
  misc_difference 96: note = a, c, u, g, unknown, or other
  misc_difference 97: note = a, c, u, g, unknown, or other
  misc_difference 98: note = a, c, u, g, unknown, or other
  misc_difference 99: note = a, c, u, g, unknown, or other
  misc_difference 101: note = a, c, u, g, unknown, or other
  misc_difference 103: note = a, c, u, g, unknown, or other
  misc_difference 106: note = a, c, u, g, unknown, or other
  misc_difference 115: note = a, c, u, g, unknown, or other
  misc_difference 121: note = a, c, u, g, unknown, or other
  misc_difference 122: note = a, c, u, g, unknown, or other
  misc_difference 123: note = a, c, u, g, unknown, or other
  misc_difference 124: note = a, c, u, g, unknown, or other
  misc_difference 125: note = a, c, u, g, unknown, or other
  misc_difference 126: note = a, c, u, g, unknown, or other
  misc_difference 127: note = a, c, u, g, unknown, or other
  misc_difference 128: note = a, c, u, g, unknown, or other
  misc_difference 129: note = a, c, u, g, unknown, or other
  misc_difference 130: note = a, c, u, g, unknown, or other
  misc_difference 131: note = a, c, u, g, unknown, or other
  misc_difference 132: note = a, c, u, g, unknown, or other
  misc_difference 133: note = a, c, u, g, unknown, or other
  misc_difference 134: note = a, c, u, g, unknown, or other
  misc_difference 139: note = a, c, u, g, unknown, or other
  misc_difference 151: note = a, c, u, g, unknown, or other
  misc_difference 157: note = a, c, u, g, unknown, or other
  misc_difference 160: note = a, c, u, g, unknown, or other
  misc_difference 163: note = a, c, u, g, unknown, or other
  misc_difference 164: note = a, c, u, g, unknown, or other
  misc_difference 165: note = a, c, u, g, unknown, or other
  misc_difference 166: note = a, c, u, g, unknown, or other
  misc_difference 167: note = a, c, u, g, unknown, or other
  misc_difference 169: note = a, c, u, g, unknown, or other
  misc_difference 171: note = a, c, u, g, unknown, or other
  misc_difference 172: note = a, c, u, g, unknown, or other
  misc_difference 173: note = a, c, u, g, unknown, or other
  misc_difference 174: note = a, c, u, g, unknown, or other
  misc_difference 175: note = a, c, u, g, unknown, or other
  misc_difference 176: note = a, c, u, g, unknown, or other
  misc_difference 177: note = a, c, u, g, unknown, or other
  misc_difference 178: note = a, c, u, g, unknown, or other
  misc_difference 179: note = a, c, u, g, unknown, or other
  misc_difference 181: note = a, c, u, g, unknown, or other
  misc_difference 185: note = a, c, u, g, unknown, or other
  misc_difference 186: note = a, c, u, g, unknown, or other
  misc_difference 187: note = a, c, u, g, unknown, or other
rnrynrnnnnnrnrryrrnynnnnnnrrranarrancnnnrynnynnnnynnynnrannryyrnnnrnrnanyrtyyntcyynnnnynrnnnrtrnnnnanrntcnatagtrrrntrtyynnnnnnnnnnnnnnarrancrayayarrgynaayyrnyrnyynnnnnynrnnnnnnnnntnyyrnnn

SEQ ID NO: 795383 - RNA, 230 nt, unidentified
  source 1..230: mol_type = unassigned RNA; note = ISAeca3
  misc_difference 1: note = a, c, u, g, unknown, or other
  misc_difference 2: note = a, c, u, g, unknown, or other
  misc_difference 3: note = a, c, u, g, unknown, or other
  misc_difference 4: note = a, c, u, g, unknown, or other
  misc_difference 5: note = a, c, u, g, unknown, or other
  misc_difference 8: note = a, c, u, g, unknown, or other
  misc_difference 11: note = a, c, u, g, unknown, or other
  misc_difference 14: note = a, c, u, g, unknown, or other
  misc_difference 25: note = a, c, u, g, unknown, or other
  misc_difference 26: note = a, c, u, g, unknown, or other
  misc_difference 32: note = a, c, u, g, unknown, or other
  misc_difference 33: note = a, c, u, g, unknown, or other
  misc_difference 34: note = a, c, u, g, unknown, or other
  misc_difference 52: note = a, c, u, g, unknown, or other
  misc_difference 53: note = a, c, u, g, unknown, or other
  misc_difference 55: note = a, c, u, g, unknown, or other
  misc_difference 68: note = a, c, u, g, unknown, or other
  misc_difference 70: note = a, c, u, g, unknown, or other
  misc_difference 75: note = a, c, u, g, unknown, or other
  misc_difference 76: note = a, c, u, g, unknown, or other
  misc_difference 77: note = a, c, u, g, unknown, or other
  misc_difference 78: note = a, c, u, g, unknown, or other
  misc_difference 79: note = a, c, u, g, unknown, or other
  misc_difference 80: note = a, c, u, g, unknown, or other
  misc_difference 84: note = a, c, u, g, unknown, or other
  misc_difference 100: note = a, c, u, g, unknown, or other
  misc_difference 101: note = a, c, u, g, unknown, or other
  misc_difference 102: note = a, c, u, g, unknown, or other
  misc_difference 103: note = a, c, u, g, unknown, or other
  misc_difference 104: note = a, c, u, g, unknown, or other
  misc_difference 105: note = a, c, u, g, unknown, or other
  misc_difference 110: note = a, c, u, g, unknown, or other
  misc_difference 114: note = a, c, u, g, unknown, or other
  misc_difference 128: note = a, c, u, g, unknown, or other
  misc_difference 129: note = a, c, u, g, unknown, or other
  misc_difference 137: note = a, c, u, g, unknown, or other
  misc_difference 146: note = a, c, u, g, unknown, or other
  misc_difference 147: note = a, c, u, g, unknown, or other
  misc_difference 148: note = a, c, u, g, unknown, or other
  misc_difference 149: note = a, c, u, g, unknown, or other
  misc_difference 150: note = a, c, u, g, unknown, or other
  misc_difference 152: note = a, c, u, g, unknown, or other
  misc_difference 157: note = a, c, u, g, unknown, or other
  misc_difference 158: note = a, c, u, g, unknown, or other
  misc_difference 159: note = a, c, u, g, unknown, or other
  misc_difference 160: note = a, c, u, g, unknown, or other
  misc_difference 186: note = a, c, u, g, unknown, or other
  misc_difference 187: note = a, c, u, g, unknown, or other
  misc_difference 188: note = a, c, u, g, unknown, or other
  misc_difference 189: note = a, c, u, g, unknown, or other
  misc_difference 192: note = a, c, u, g, unknown, or other
  misc_difference 193: note = a, c, u, g, unknown, or other
  misc_difference 194: note = a, c, u, g, unknown, or other
  misc_difference 195: note = a, c, u, g, unknown, or other
  misc_difference 199: note = a, c, u, g, unknown, or other
  misc_difference 200: note = a, c, u, g, unknown, or other
  misc_difference 205: note = a, c, u, g, unknown, or other
  misc_difference 207: note = a, c, u, g, unknown, or other
  misc_difference 218: note = a, c, u, g, unknown, or other
  misc_difference 224: note = a, c, u, g, unknown, or other
nnnnnyancynycnggttttgcgannrctgannnyygatgacrtgaacggcnnancggcctgrygrrnancctgnnnnnnraanyggctyyyraagccgnnnnnnttytnaggnyyrycaggcgcgrnnctcatcgnggcgcgrgnnnnnynyycannnngacgccggatagatttrrgcaagccnnnnaynnnnycrnnratcngnrttgcaaaarngrggrngaccat

SEQ ID NO: 795384 - RNA, 212 nt, unidentified
  source 1..212: mol_type = unassigned RNA; note = IS1111C
  misc_difference 1: note = a, c, u, g, unknown, or other
  misc_difference 2: note = a, c, u, g, unknown, or other
  misc_difference 3: note = a, c, u, g, unknown, or other
  misc_difference 5: note = a, c, u, g, unknown, or other
  misc_difference 10: note = a, c, u, g, unknown, or other
  misc_difference 12: note = a, c, u, g, unknown, or other
  misc_difference 14: note = a, c, u, g, unknown, or other
  misc_difference 15: note = a, c, u, g, unknown, or other
  misc_difference 16: note = a, c, u, g, unknown, or other
  misc_difference 17: note = a, c, u, g, unknown, or other
  misc_difference 19: note = a, c, u, g, unknown, or other
  misc_difference 20: note = a, c, u, g, unknown, or other
  misc_difference 21: note = a, c, u, g, unknown, or other
  misc_difference 22: note = a, c, u, g, unknown, or other
  misc_difference 30: note = a, c, u, g, unknown, or other
  misc_difference 31: note = a, c, u, g, unknown, or other
  misc_difference 39: note = a, c, u, g, unknown, or other
  misc_difference 48: note = a, c, u, g, unknown, or other
  misc_difference 50: note = a, c, u, g, unknown, or other
  misc_difference 53: note = a, c, u, g, unknown, or other
  misc_difference 57: note = a, c, u, g, unknown, or other
  misc_difference 62: note = a, c, u, g, unknown, or other
  misc_difference 63: note = a, c, u, g, unknown, or other
  misc_difference 64: note = a, c, u, g, unknown, or other
  misc_difference 65: note = a, c, u, g, unknown, or other
  misc_difference 66: note = a, c, u, g, unknown, or other
  misc_difference 67: note = a, c, u, g, unknown, or other
  misc_difference 68: note = a, c, u, g, unknown, or other
  misc_difference 71: note = a, c, u, g, unknown, or other
  misc_difference 72: note = a, c, u, g, unknown, or other
  misc_difference 77: note = a, c, u, g, unknown, or other
  misc_difference 79: note = a, c, u, g, unknown, or other
  misc_difference 80: note = a, c, u, g, unknown, or other
  misc_difference 88: note = a, c, u, g, unknown, or other
  misc_difference 89: note = a, c, u, g, unknown, or other
  misc_difference 90: note = a, c, u, g, unknown, or other
  misc_difference 91: note = a, c, u, g, unknown, or other
  misc_difference 92: note = a, c, u, g, unknown, or other
  misc_difference 93: note = a, c, u, g, unknown, or other
  misc_difference 98: note = a, c, u, g, unknown, or other
  misc_difference 102: note = a, c, u, g, unknown, or other
  misc_difference 103: note = a, c, u, g, unknown, or other
  misc_difference 104: note = a, c, u, g, unknown, or other
  misc_difference 108: note = a, c, u, g, unknown, or other
  misc_difference 129: note = a, c, u, g, unknown, or other
  misc_difference 133: note = a, c, u, g, unknown, or other
  misc_difference 134: note = a, c, u, g, unknown, or other
  misc_difference 135: note = a, c, u, g, unknown, or other
  misc_difference 136: note = a, c, u, g, unknown, or other
  misc_difference 137: note = a, c, u, g, unknown, or other
  misc_difference 138: note = a, c, u, g, unknown, or other
  misc_difference 139: note = a, c, u, g, unknown, or other
  misc_difference 140: note = a, c, u, g, unknown, or other
  misc_difference 141: note = a, c, u, g, unknown, or other
  misc_difference 142: note = a, c, u, g, unknown, or other
  misc_difference 143: note = a, c, u, g, unknown, or other
  misc_difference 148: note = a, c, u, g, unknown, or other
  misc_difference 149: note = a, c, u, g, unknown, or other
  misc_difference 150: note = a, c, u, g, unknown, or other
  misc_difference 151: note = a, c, u, g, unknown, or other
  misc_difference 152: note = a, c, u, g, unknown, or other
  misc_difference 154: note = a, c, u, g, unknown, or other
  misc_difference 167: note = a, c, u, g, unknown, or other
  misc_difference 168: note = a, c, u, g, unknown, or other
  misc_difference 176: note = a, c, u, g, unknown, or other
  misc_difference 181: note = a, c, u, g, unknown, or other
  misc_difference 182: note = a, c, u, g, unknown, or other
  misc_difference 186: note = a, c, u, g, unknown, or other
  misc_difference 189: note = a, c, u, g, unknown, or other
  misc_difference 191: note = a, c, u, g, unknown, or other
  misc_difference 193: note = a, c, u, g, unknown, or other
  misc_difference 195: note = a, c, u, g, unknown, or other
  misc_difference 196: note = a, c, u, g, unknown, or other
  misc_difference 197: note = a, c, u, g, unknown, or other
  misc_difference 198: note = a, c, u, g, unknown, or other
  misc_difference 199: note = a, c, u, g, unknown, or other
  misc_difference 200: note = a, c, u, g, unknown, or other
  misc_difference 208: note = a, c, u, g, unknown, or other
  misc_difference 209: note = a, c, u, g, unknown, or other
  misc_difference 210: note = a, c, u, g, unknown, or other
nnnrnytgcnrngnnnnynnnntgatgrynnrayrggtnrraccrrcnynyynrrancctgnnnnnnncrnnggcynynnrargycgnnnnnnygrtnaggnnnrrrngygcrratyycatcrrggcyngrrnnnnnnnnnnnyycrnnnnnangccgratataygnnygcaryynryyynnyyrnyynynrnrnnnnnnyttrcarnnngg

SEQ ID NO: 795385 - RNA, 202 nt, unidentified
  source 1..202: mol_type = unassigned RNA; note = ISMpo4
  misc_difference 1: note = a, c, u, g, unknown, or other
  misc_difference 2: note = a, c, u, g, unknown, or other
  misc_difference 4: note = a, c, u, g, unknown, or other
  misc_difference 8: note = a, c, u, g, unknown, or other
  misc_difference 10: note = a, c, u, g, unknown, or other
  misc_difference 12: note = a, c, u, g, unknown, or other
  misc_difference 13: note = a, c, u, g, unknown, or other
  misc_difference 14: note = a, c, u, g, unknown, or other
  misc_difference 15: note = a, c, u, g, unknown, or other
  misc_difference 17: note = a, c, u, g, unknown, or other
  misc_difference 19: note = a, c, u, g, unknown, or other
  misc_difference 21: note = a, c, u, g, unknown, or other
  misc_difference 22: note = a, c, u, g, unknown, or other
  misc_difference 24: note = a, c, u, g, unknown, or other
  misc_difference 27: note = a, c, u, g, unknown, or other
  misc_difference 33: note = a, c, u, g, unknown, or other
  misc_difference 38: note = a, c, u, g, unknown, or other
  misc_difference 45: note = a, c, u, g, unknown, or other
  misc_difference 46: note = a, c, u, g, unknown, or other
  misc_difference 51: note = a, c, u, g, unknown, or other
  misc_difference 52: note = a, c, u, g, unknown, or other
  misc_difference 59: note = a, c, u, g, unknown, or other
  misc_difference 64: note = a, c, u, g, unknown, or other
  misc_difference 65: note = a, c, u, g, unknown, or other
  misc_difference 66: note = a, c, u, g, unknown, or other
  misc_difference 67: note = a, c, u, g, unknown, or other
  misc_difference 68: note = a, c, u, g, unknown, or other
  misc_difference 69: note = a, c, u, g, unknown, or other
  misc_difference 70: note = a, c, u, g, unknown, or other
  misc_difference 71: note = a, c, u, g, unknown, or other
  misc_difference 73: note = a, c, u, g, unknown, or other
  misc_difference 75: note = a, c, u, g, unknown, or other
  misc_difference 77: note = a, c, u, g, unknown, or other
  misc_difference 78: note = a, c, u, g, unknown, or other
  misc_difference 79: note = a, c, u, g, unknown, or other
  misc_difference 82: note = a, c, u, g, unknown, or other
  misc_difference 83: note = a, c, u, g, unknown, or other
  misc_difference 84: note = a, c, u, g, unknown, or other
  misc_difference 85: note = a, c, u, g, unknown, or other
  misc_difference 86: note = a, c, u, g, unknown, or other
  misc_difference 87: note = a, c, u, g, unknown, or other
  misc_difference 88: note = a, c, u, g, unknown, or other
  misc_difference 89: note = a, c, u, g, unknown, or other
  misc_difference 90: note = a, c, u, g, unknown, or other
  misc_difference 91: note = a, c, u, g, unknown, or other
  misc_difference 92: note = a, c, u, g, unknown, or other
  misc_difference 95: note = a, c, u, g, unknown, or other
  misc_difference 96: note = a, c, u, g, unknown, or other
  misc_difference 97: note = a, c, u, g, unknown, or other
  misc_difference 101: note = a, c, u, g, unknown, or other
  misc_difference 102: note = a, c, u, g, unknown, or other
  misc_difference 103: note = a, c, u, g, unknown, or other
  misc_difference 104: note = a, c, u, g, unknown, or other
  misc_difference 105: note = a, c, u, g, unknown, or other
  misc_difference 113: note = a, c, u, g, unknown, or other
  misc_difference 119: note = a, c, u, g, unknown, or other
  misc_difference 120: note = a, c, u, g, unknown, or other
  misc_difference 121: note = a, c, u, g, unknown, or other
  misc_difference 125: note = a, c, u, g, unknown, or other
  misc_difference 128: note = a, c, u, g, unknown, or other
  misc_difference 132: note = a, c, u, g, unknown, or other
  misc_difference 133: note = a, c, u, g, unknown, or other
  misc_difference 137: note = a, c, u, g, unknown, or other
  misc_difference 149: note = a, c, u, g, unknown, or other
  misc_difference 150: note = a, c, u, g, unknown, or other
  misc_difference 151: note = a, c, u, g, unknown, or other
  misc_difference 161: note = a, c, u, g, unknown, or other
  misc_difference 166: note = a, c, u, g, unknown, or other
  misc_difference 174: note = a, c, u, g, unknown, or other
  misc_difference 177: note = a, c, u, g, unknown, or other
  misc_difference 178: note = a, c, u, g, unknown, or other
  misc_difference 181: note = a, c, u, g, unknown, or other
  misc_difference 186: note = a, c, u, g, unknown, or other
  misc_difference 188: note = a, c, u, g, unknown, or other
  misc_difference 192: note = a, c, u, g, unknown, or other
  misc_difference 193: note = a, c, u, g, unknown, or other
  misc_difference 194: note = a, c, u, g, unknown, or other
  misc_difference 198: note = a, c, u, g, unknown, or other
  misc_difference 199: note = a, c, u, g, unknown, or other
  misc_difference 200: note = a, c, u, g, unknown, or other
  misc_difference 201: note = a, c, u, g, unknown, or other
  misc_difference 202: note = a, c, u, g, unknown, or other
nnynrrrncngnnnnrnynrnnyngrngtcycnycgyngggacgnnggrynnggyrarnycgynnnnnnnnyngnrnnnrynnnnnnnnnnnrannncgcnnnnnagatygrnyyrccnnnyyynycnraynncatnrtgyggcggcynnngygccgaccncgranrgaagcrngrnnccngygrnrngrynnnyrynnnnn

SEQ ID NO: 795386 - RNA, 211 nt, unidentified
  source 1..211: mol_type = unassigned RNA; note = ISMtsp7
  misc_difference 1: note = a, c, u, g, unknown, or other
  misc_difference 4: note = a, c, u, g, unknown, or other
  misc_difference 9: note = a, c, u, g, unknown, or other
  misc_difference 12: note = a, c, u, g, unknown, or other
  misc_difference 14: note = a, c, u, g, unknown, or other
  misc_difference 15: note = a, c, u, g, unknown, or other
  misc_difference 16: note = a, c, u, g, unknown, or other
  misc_difference 17: note = a, c, u, g, unknown, or other
  misc_difference 18: note = a, c, u, g, unknown, or other
  misc_difference 19: note = a, c, u, g, unknown, or other
  misc_difference 20: note = a, c, u, g, unknown, or other
  misc_difference 21: note = a, c, u, g, unknown, or other
  misc_difference 22: note = a, c, u, g, unknown, or other
  misc_difference 23: note = a, c, u, g, unknown, or other
  misc_difference 32: note = a, c, u, g, unknown, or other
  misc_difference 33: note = a, c, u, g, unknown, or other
  misc_difference 34: note = a, c, u, g, unknown, or other
  misc_difference 35: note = a, c, u, g, unknown, or other
  misc_difference 38: note = a, c, u, g, unknown, or other
  misc_difference 39: note = a, c, u, g, unknown, or other
  misc_difference 40: note = a, c, u, g, unknown, or other
  misc_difference 46: note = a, c, u, g, unknown, or other
  misc_difference 49: note = a, c, u, g, unknown, or other
  misc_difference 50: note = a, c, u, g, unknown, or other
  misc_difference 63: note = a, c, u, g, unknown, or other
  misc_difference 64: note = a, c, u, g, unknown, or other
  misc_difference 65: note = a, c, u, g, unknown, or other
  misc_difference 66: note = a, c, u, g, unknown, or other
  misc_difference 67: note = a, c, u, g, unknown, or other
  misc_difference 68: note = a, c, u, g, unknown, or other
  misc_difference 69: note = a, c, u, g, unknown, or other
  misc_difference 70: note = a, c, u, g, unknown, or other
  misc_difference 71: note = a, c, u, g, unknown, or other
  misc_difference 72: note = a, c, u, g, unknown, or other
  misc_difference 73: note = a, c, u, g, unknown, or other
  misc_difference 78: note = a, c, u, g, unknown, or other
  misc_difference 79: note = a, c, u, g, unknown, or other
  misc_difference 80: note = a, c, u, g, unknown, or other
  misc_difference 88: note = a, c, u, g, unknown, or other
  misc_difference 89: note = a, c, u, g, unknown, or other
  misc_difference 90: note = a, c, u, g, unknown, or other
  misc_difference 92: note = a, c, u, g, unknown, or other
  misc_difference 93: note = a, c, u, g, unknown, or other
  misc_difference 95: note = a, c, u, g, unknown, or other
  misc_difference 102: note = a, c, u, g, unknown, or other
  misc_difference 103: note = a, c, u, g, unknown, or other
  misc_difference 104: note = a, c, u, g, unknown, or other
  misc_difference 108: note = a, c, u, g, unknown, or other
  misc_difference 112: note = a, c, u, g, unknown, or other
  misc_difference 115: note = a, c, u, g, unknown, or other
  misc_difference 116: note = a, c, u, g, unknown, or other
  misc_difference 129: note = a, c, u, g, unknown, or other
  misc_difference 134: note = a, c, u, g, unknown, or other
  misc_difference 135: note = a, c, u, g, unknown, or other
  misc_difference 136: note = a, c, u, g, unknown, or other
  misc_difference 137: note = a, c, u, g, unknown, or other
  misc_difference 138: note = a, c, u, g, unknown, or other
  misc_difference 139: note = a, c, u, g, unknown, or other
  misc_difference 140: note = a, c, u, g, unknown, or other
  misc_difference 141: note = a, c, u, g, unknown, or other
  misc_difference 142: note = a, c, u, g, unknown, or other
  misc_difference 143: note = a, c, u, g, unknown, or other
  misc_difference 149: note = a, c, u, g, unknown, or other
  misc_difference 150: note = a, c, u, g, unknown, or other
  misc_difference 151: note = a, c, u, g, unknown, or other
  misc_difference 152: note = a, c, u, g, unknown, or other
  misc_difference 153: note = a, c, u, g, unknown, or other
  misc_difference 164: note = a, c, u, g, unknown, or other
  misc_difference 167: note = a, c, u, g, unknown, or other
  misc_difference 168: note = a, c, u, g, unknown, or other
  misc_difference 169: note = a, c, u, g, unknown, or other
  misc_difference 170: note = a, c, u, g, unknown, or other
  misc_difference 174: note = a, c, u, g, unknown, or other
  misc_difference 177: note = a, c, u, g, unknown, or other
  misc_difference 178: note = a, c, u, g, unknown, or other
  misc_difference 179: note = a, c, u, g, unknown, or other
  misc_difference 180: note = a, c, u, g, unknown, or other
  misc_difference 186: note = a, c, u, g, unknown, or other
  misc_difference 187: note = a, c, u, g, unknown, or other
  misc_difference 189: note = a, c, u, g, unknown, or other
  misc_difference 190: note = a, c, u, g, unknown, or other
  misc_difference 191: note = a, c, u, g, unknown, or other
  misc_difference 192: note = a, c, u, g, unknown, or other
  misc_difference 193: note = a, c, u, g, unknown, or other
  misc_difference 194: note = a, c, u, g, unknown, or other
  misc_difference 195: note = a, c, u, g, unknown, or other
  misc_difference 196: note = a, c, u, g, unknown, or other
  misc_difference 197: note = a, c, u, g, unknown, or other
  misc_difference 198: note = a, c, u, g, unknown, or other
  misc_difference 200: note = a, c, u, g, unknown, or other
  misc_difference 205: note = a, c, u, g, unknown, or other
  misc_difference 206: note = a, c, u, g, unknown, or other
  misc_difference 207: note = a, c, u, g, unknown, or other
  misc_difference 209: note = a, c, u, g, unknown, or other
  misc_difference 210: note = a, c, u, g, unknown, or other
nrrntgcrnrgnrnnnnnnnnnnygatgryrnnnnrgnnnrrrccngcnnyyyyrrarcctgnnnnnnnnnnnggccnnnragrccgnnnrnnynrtraggnnnrrrngcgngrnnyycatcrrggcyngrrgnnnnnnnnnnyyycrnnnnnargccgratanaynnnngcanyynnnnyyryynnrnnnnnnnnnnynttgynnnynng

SEQ ID NO: 795387 - RNA, 215 nt, unidentified
  source 1..215: mol_type = unassigned RNA; note = ISAisp4
  misc_difference 2: note = a, c, u, g, unknown, or other
  misc_difference 4: note = a, c, u, g, unknown, or other
  misc_difference 5: note = a, c, u, g, unknown, or other
  misc_difference 7: note = a, c, u, g, unknown, or other
  misc_difference 8: note = a, c, u, g, unknown, or other
  misc_difference 15: note = a, c, u, g, unknown, or other
  misc_difference 24: note = a, c, u, g, unknown, or other
  misc_difference 25: note = a, c, u, g, unknown, or other
  misc_difference 33: note = a, c, u, g, unknown, or other
  misc_difference 35: note = a, c, u, g, unknown, or other
  misc_difference 36: note = a, c, u, g, unknown, or other
  misc_difference 38: note = a, c, u, g, unknown, or other
  misc_difference 39: note = a, c, u, g, unknown, or other
  misc_difference 50: note = a, c, u, g, unknown, or other
  misc_difference 53: note = a, c, u, g, unknown, or other
  misc_difference 57: note = a, c, u, g, unknown, or other
  misc_difference 60: note = a, c, u, g, unknown, or other
  misc_difference 61: note = a, c, u, g, unknown, or other
  misc_difference 62: note = a, c, u, g, unknown, or other
  misc_difference 63: note = a, c, u, g, unknown, or other
  misc_difference 69: note = a, c, u, g, unknown, or other
  misc_difference 80: note = a, c, u, g, unknown, or other
  misc_difference 84: note = a, c, u, g, unknown, or other
  misc_difference 107: note = a, c, u, g, unknown, or other
  misc_difference 109: note = a, c, u, g, unknown, or other
  misc_difference 112: note = a, c, u, g, unknown, or other
  misc_difference 116: note = a, c, u, g, unknown, or other
  misc_difference 126: note = a, c, u, g, unknown, or other
  misc_difference 137: note = a, c, u, g, unknown, or other
  misc_difference 138: note = a, c, u, g, unknown, or other
  misc_difference 139: note = a, c, u, g, unknown, or other
  misc_difference 140: note = a, c, u, g, unknown, or other
  misc_difference 141: note = a, c, u, g, unknown, or other
  misc_difference 142: note = a, c, u, g, unknown, or other
  misc_difference 143: note = a, c, u, g, unknown, or other
  misc_difference 144: note = a, c, u, g, unknown, or other
  misc_difference 145: note = a, c, u, g, unknown, or other
  misc_difference 146: note = a, c, u, g, unknown, or other
  misc_difference 149: note = a, c, u, g, unknown, or other
  misc_difference 150: note = a, c, u, g, unknown, or other
  misc_difference 156: note = a, c, u, g, unknown, or other
  misc_difference 157: note = a, c, u, g, unknown, or other
  misc_difference 158: note = a, c, u, g, unknown, or other
  misc_difference 165: note = a, c, u, g, unknown, or other
  misc_difference 166: note = a, c, u, g, unknown, or other
  misc_difference 169: note = a, c, u, g, unknown, or other
  misc_difference 171: note = a, c, u, g, unknown, or other
  misc_difference 174: note = a, c, u, g, unknown, or other
  misc_difference 176: note = a, c, u, g, unknown, or other
  misc_difference 177: note = a, c, u, g, unknown, or other
  misc_difference 178: note = a, c, u, g, unknown, or other
  misc_difference 181: note = a, c, u, g, unknown, or other
  misc_difference 183: note = a, c, u, g, unknown, or other
  misc_difference 189: note = a, c, u, g, unknown, or other
  misc_difference 190: note = a, c, u, g, unknown, or other
  misc_difference 193: note = a, c, u, g, unknown, or other
  misc_difference 195: note = a, c, u, g, unknown, or other
  misc_difference 198: note = a, c, u, g, unknown, or other
  misc_difference 199: note = a, c, u, g, unknown, or other
  misc_difference 200: note = a, c, u, g, unknown, or other
  misc_difference 202: note = a, c, u, g, unknown, or other
  misc_difference 204: note = a, c, u, g, unknown, or other
  misc_difference 211: note = a, c, u, g, unknown, or other
  misc_difference 212: note = a, c, u, g, unknown, or other
  misc_difference 213: note = a, c, u, g, unknown, or other
  misc_difference 214: note = a, c, u, g, unknown, or other
antnnrnngtgrrrnryrrygggnngaggtcgnrnnrnnyyytgryggynyynaccncgnnnnctaacntgacccgcyrnryynactcgyaccccggattgcytcynynganagcnyacrytaaanrggccgyygrnnnnnnnnnnccnncaggcnnntycrgynnyrncnyyngnnnycnyncryyynnrantntrnnnynrnrggagrnnnna

SEQ ID NO: 795388 - RNA, 208 nt, unidentified
  source 1..208: mol_type = unassigned RNA; note = ISGdi7
  misc_difference 1: note = a, c, u, g, unknown, or other
  misc_difference 3: note = a, c, u, g, unknown, or other
  misc_difference 11: note = a, c, u, g, unknown, or other
  misc_difference 12: note = a, c, u, g, unknown, or other
  misc_difference 13: note = a, c, u, g, unknown, or other
  misc_difference 18: note = a, c, u, g, unknown, or other
  misc_difference 19: note = a, c, u, g, unknown, or other
  misc_difference 21: note = a, c, u, g, unknown, or other
  misc_difference 22: note = a, c, u, g, unknown, or other
  misc_difference 23: note = a, c, u, g, unknown, or other
  misc_difference 25: note = a, c, u, g, unknown, or other
  misc_difference 27: note = a, c, u, g, unknown, or other
  misc_difference 31: note = a, c, u, g, unknown, or other
  misc_difference 36: note = a, c, u, g, unknown, or other
  misc_difference 42: note = a, c, u, g, unknown, or other
  misc_difference 57: note = a, c, u, g, unknown, or other
  misc_difference 58: note = a, c, u, g, unknown, or other
  misc_difference 59: note = a, c, u, g, unknown, or other
  misc_difference 60: note = a, c, u, g, unknown, or other
  misc_difference 61: note = a, c, u, g, unknown, or other
  misc_difference 62: note = a, c, u, g, unknown, or other
  misc_difference 66: note = a, c, u, g, unknown, or other
  misc_difference 69: note = a, c, u, g, unknown, or other
  misc_difference 70: note = a, c, u, g, unknown, or other
  misc_difference 71: note = a, c, u, g, unknown, or other
  misc_difference 72: note = a, c, u, g, unknown, or other
  misc_difference 74: note = a, c, u, g, unknown, or other
  misc_difference 82: note = a, c, u, g, unknown, or other
  misc_difference 84: note = a, c, u, g, unknown, or other
  misc_difference 85: note = a, c, u, g, unknown, or other
  misc_difference 90: note = a, c, u, g, unknown, or other
  misc_difference 95: note = a, c, u, g, unknown, or other
  misc_difference 102: note = a, c, u, g, unknown, or other
  misc_difference 110: note = a, c, u, g, unknown, or other
  misc_difference 111: note = a, c, u, g, unknown, or other
  misc_difference 112: note = a, c, u, g, unknown, or other
  misc_difference 113: note = a, c, u, g, unknown, or other
  misc_difference 128: note = a, c, u, g, unknown, or other
  misc_difference 132: note = a, c, u, g, unknown, or other
  misc_difference 142: note = a, c, u, g, unknown, or other
  misc_difference 145: note = a, c, u, g, unknown, or other
  misc_difference 146: note = a, c, u, g, unknown, or other
  misc_difference 147: note = a, c, u, g, unknown, or other
  misc_difference 148: note = a, c, u, g, unknown, or other
  misc_difference 149: note = a, c, u, g, unknown, or other
  misc_difference 158: note = a, c, u, g, unknown, or other
  misc_difference 166: note = a, c, u, g, unknown, or other
  misc_difference 168: note = a, c, u, g, unknown, or other
  misc_difference 176: note = a, c, u, g, unknown, or other
  misc_difference 179: note = a, c, u, g, unknown, or other
  misc_difference 187: note = a, c, u, g, unknown, or other
  misc_difference 188: note = a, c, u, g, unknown, or other
  misc_difference 189: note = a, c, u, g, unknown, or other
  misc_difference 190: note = a, c, u, g, unknown, or other
  misc_difference 191: note = a, c, u, g, unknown, or other
  misc_difference 192: note = a, c, u, g, unknown, or other
  misc_difference 194: note = a, c, u, g, unknown, or other
  misc_difference 195: note = a, c, u, g, unknown, or other
  misc_difference 197: note = a, c, u, g, unknown, or other
  misc_difference 203: note = a, c, u, g, unknown, or other
  misc_difference 208: note = a, c, u, g, unknown, or other
nrnryyrcygnnnryrrnnynnngncnryrncrrynyrggrngygygaccgtyyyynnnnnnggynrynnnnrnyrccgcgnynnagrtnggtcncrycyynyyggrgynnnncctcrtgcaygaggnatyntggtrcgggnyynnnnnyccgaccgnatrtaagntnaygcrgcnryngcygcrrnnnnnnrnnrncccrrncyyrn

SEQ ID NO: 795389 - RNA, 234 nt, unidentified
  source 1..234: mol_type = unassigned RNA; note = IS1383
  misc_difference 1: note = a, c, u, g, unknown, or other
  misc_difference 2: note = a, c, u, g, unknown, or other
  misc_difference 4: note = a, c, u, g, unknown, or other
  misc_difference 5: note = a, c, u, g, unknown, or other
  misc_difference 6: note = a, c, u, g, unknown, or other
  misc_difference 7: note = a, c, u, g, unknown, or other
  misc_difference 8: note = a, c, u, g, unknown, or other
  misc_difference 9: note = a, c, u, g, unknown, or other
  misc_difference 10: note = a, c, u, g, unknown, or other
  misc_difference 14: note = a, c, u, g, unknown, or other
  misc_difference 15: note = a, c, u, g, unknown, or other
  misc_difference 17: note = a, c, u, g, unknown, or other
  misc_difference 27: note = a, c, u, g, unknown, or other
  misc_difference 28: note = a, c, u, g, unknown, or other
  misc_difference 29: note = a, c, u, g, unknown, or other
  misc_difference 30: note = a, c, u, g, unknown, or other
  misc_difference 56: note = a, c, u, g, unknown, or other
  misc_difference 60: note = a, c, u, g, unknown, or other
  misc_difference 61: note = a, c, u, g, unknown, or other
  misc_difference 63: note = a, c, u, g, unknown, or other
  misc_difference 64: note = a, c, u, g, unknown, or other
  misc_difference 65: note = a, c, u, g, unknown, or other
  misc_difference 72: note = a, c, u, g, unknown, or other
  misc_difference 73: note = a, c, u, g, unknown, or other
  misc_difference 74: note = a, c, u, g, unknown, or other
  misc_difference 76: note = a, c, u, g, unknown, or other
  misc_difference 77: note = a, c, u, g, unknown, or other
  misc_difference 78: note = a, c, u, g, unknown, or other
  misc_difference 79: note = a, c, u, g, unknown, or other
  misc_difference 80: note = a, c, u, g, unknown, or other
  misc_difference 81: note = a, c, u, g, unknown, or other
  misc_difference 82: note = a, c, u, g, unknown, or other
  misc_difference 87: note = a, c, u, g, unknown, or other
  misc_difference 88: note = a, c, u, g, unknown, or other
  misc_difference 89: note = a, c, u, g, unknown, or other
  misc_difference 96: note = a, c, u, g, unknown, or other
  misc_difference 97: note = a, c, u, g, unknown, or other
  misc_difference 98: note = a, c, u, g, unknown, or other
  misc_difference 99: note = a, c, u, g, unknown, or other
  misc_difference 100: note = a, c, u, g, unknown, or other
  misc_difference 101: note = a, c, u, g, unknown, or other
  misc_difference 102: note = a, c, u, g, unknown, or other
  misc_difference 111: note = a, c, u, g, unknown, or other
  misc_difference 112: note = a, c, u, g, unknown, or other
  misc_difference 114: note = a, c, u, g, unknown, or other
  misc_difference 115: note = a, c, u, g, unknown, or other
  misc_difference 126: note = a, c, u, g, unknown, or other
  misc_difference 145: note = a, c, u, g, unknown, or other
  misc_difference 146: note = a, c, u, g, unknown, or other
  misc_difference 147: note = a, c, u, g, unknown, or other
  misc_difference 148: note = a, c, u, g, unknown, or other
  misc_difference 149: note = a, c, u, g, unknown, or other
  misc_difference 150: note = a, c, u, g, unknown, or other
  misc_difference 158: note = a, c, u, g, unknown, or other
  misc_difference 159: note = a, c, u, g, unknown, or other
  misc_difference 160: note = a, c, u, g, unknown, or other
  misc_difference 162: note = a, c, u, g, unknown, or other
  misc_difference 177: note = a, c, u, g, unknown, or other
  misc_difference 186: note = a, c, u, g, unknown, or other
  misc_difference 187: note = a, c, u, g, unknown, or other
  misc_difference 188: note = a, c, u, g, unknown, or other
  misc_difference 192: note = a, c, u, g, unknown, or other
  misc_difference 194: note = a, c, u, g, unknown, or other
  misc_difference 195: note = a, c, u, g, unknown, or other
  misc_difference 196: note = a, c, u, g, unknown, or other
  misc_difference 199: note = a, c, u, g, unknown, or other
  misc_difference 200: note = a, c, u, g, unknown, or other
  misc_difference 207: note = a, c, u, g, unknown, or other
  misc_difference 208: note = a, c, u, g, unknown, or other
  misc_difference 209: note = a, c, u, g, unknown, or other
  misc_difference 210: note = a, c, u, g, unknown, or other
  misc_difference 211: note = a, c, u, g, unknown, or other
  misc_difference 212: note = a, c, u, g, unknown, or other
  misc_difference 217: note = a, c, u, g, unknown, or other
  misc_difference 218: note = a, c, u, g, unknown, or other
  misc_difference 219: note = a, c, u, g, unknown, or other
  misc_difference 220: note = a, c, u, g, unknown, or other
nnrnnnnnnnargnngngcargyrrynnnnryrtgatggyrracaggtyrgaccgngrynnrnnnarycygnnnrnnnnnnngrrcnnnragyycnnnnnnnaratgrgrnnynnrycrgcgraynccatcrgggccrgcaggynnnnnngyctgcannnanaggccggatataarnctgcarccnnnyctnynnnycnncryryrnnnnnncttgnnnnycrggaggcgycca

SEQ ID NO: 795390 - RNA, 225 nt, unidentified
  source 1..225: mol_type = unassigned RNA; note = ISEc20
  misc_difference 2: note = a, c, u, g, unknown, or other
  misc_difference 13: note = a, c, u, g, unknown, or other
  misc_difference 15: note = a, c, u, g, unknown, or other
  misc_difference 16: note = a, c, u, g, unknown, or other
  misc_difference 17: note = a, c, u, g, unknown, or other
  misc_difference 18: note = a, c, u, g, unknown, or other
  misc_difference 19: note = a, c, u, g, unknown, or other
  misc_difference 20: note = a, c, u, g, unknown, or other
  misc_difference 25: note = a, c, u, g, unknown, or other
  misc_difference 26: note = a, c, u, g, unknown, or other
  misc_difference 27: note = a, c, u, g, unknown, or other
  misc_difference 33: note = a, c, u, g, unknown, or other
  misc_difference 52: note = a, c, u, g, unknown, or other
  misc_difference 61: note = a, c, u, g, unknown, or other
  misc_difference 68: note = a, c, u, g, unknown, or other
  misc_difference 101: note = a, c, u, g, unknown, or other
  misc_difference 108: note = a, c, u, g, unknown, or other
  misc_difference 129: note = a, c, u, g, unknown, or other
  misc_difference 134: note = a, c, u, g, unknown, or other
  misc_difference 137: note = a, c, u, g, unknown, or other
  misc_difference 138: note = a, c, u, g, unknown, or other
  misc_difference 139: note = a, c, u, g, unknown, or other
  misc_difference 140: note = a, c, u, g, unknown, or other
  misc_difference 141: note = a, c, u, g, unknown, or other
  misc_difference 142: note = a, c, u, g, unknown, or other
  misc_difference 143: note = a, c, u, g, unknown, or other
  misc_difference 144: note = a, c, u, g, unknown, or other
  misc_difference 186: note = a, c, u, g, unknown, or other
  misc_difference 187: note = a, c, u, g, unknown, or other
  misc_difference 188: note = a, c, u, g, unknown, or other
  misc_difference 189: note = a, c, u, g, unknown, or other
  misc_difference 191: note = a, c, u, g, unknown, or other
  misc_difference 197: note = a, c, u, g, unknown, or other
  misc_difference 198: note = a, c, u, g, unknown, or other
  misc_difference 199: note = a, c, u, g, unknown, or other
  misc_difference 200: note = a, c, u, g, unknown, or other
  misc_difference 201: note = a, c, u, g, unknown, or other
  misc_difference 202: note = a, c, u, g, unknown, or other
  misc_difference 203: note = a, c, u, g, unknown, or other
  misc_difference 204: note = a, c, u, g, unknown, or other
  misc_difference 205: note = a, c, u, g, unknown, or other
  misc_difference 206: note = a, c, u, g, unknown, or other
  misc_difference 207: note = a, c, u, g, unknown, or other
  misc_difference 208: note = a, c, u, g, unknown, or other
  misc_difference 209: note = a, c, u, g, unknown, or other
  misc_difference 210: note = a, c, u, g, unknown, or other
  misc_difference 211: note = a, c, u, g, unknown, or other
  misc_difference 213: note = a, c, u, g, unknown, or other
  misc_difference 215: note = a, c, u, g, unknown, or other
  misc_difference 217: note = a, c, u, g, unknown, or other
  misc_difference 218: note = a, c, u, g, unknown, or other
  misc_difference 219: note = a, c, u, g, unknown, or other
tnttyryrccyynrnnnnnnrrggnnnyggccngycrgryccggcatgrttnyygcccccngtcryynatgatcyggggggtgttgtcaccgggyyygrynggyrrynrgtgatcgctrataggggcyngrccngrnnnnnnnnyygrggycryycgtaacgtggatgccgagacyygyyrccrynnnnyngrccrnnnnnnnnnnnnnnnrngnrnnnrrrtrr

SEQ ID NO: 795391 - RNA, 205 nt, unidentified
  source 1..205: mol_type = unassigned RNA; note = ISLhe4
  misc_difference 2: note = a, c, u, g, unknown, or other
  misc_difference 3: note = a, c, u, g, unknown, or other
  misc_difference 5: note = a, c, u, g, unknown, or other
  misc_difference 7: note = a, c, u, g, unknown, or other
  misc_difference 8: note = a, c, u, g, unknown, or other
  misc_difference 10: note = a, c, u, g, unknown, or other
  misc_difference 15: note = a, c, u, g, unknown, or other
  misc_difference 16: note = a, c, u, g, unknown, or other
  misc_difference 17: note = a, c, u, g, unknown, or other
  misc_difference 18: note = a, c, u, g, unknown, or other
  misc_difference 19: note = a, c, u, g, unknown, or other
  misc_difference 20: note = a, c, u, g, unknown, or other
  misc_difference 28: note = a, c, u, g, unknown, or other
  misc_difference 31: note = a, c, u, g, unknown, or other
  misc_difference 32: note = a, c, u, g, unknown, or other
  misc_difference 33: note = a, c, u, g, unknown, or other
  misc_difference 34: note = a, c, u, g, unknown, or other
  misc_difference 35: note = a, c, u, g, unknown, or other
  misc_difference 36: note = a, c, u, g, unknown, or other
  misc_difference 41: note = a, c, u, g, unknown, or other
  misc_difference 44: note = a, c, u, g, unknown, or other
  misc_difference 46: note = a, c, u, g, unknown, or other
  misc_difference 49: note = a, c, u, g, unknown, or other
  misc_difference 50: note = a, c, u, g, unknown, or other
  misc_difference 51: note = a, c, u, g, unknown, or other
  misc_difference 54: note = a, c, u, g, unknown, or other
  misc_difference 56: note = a, c, u, g, unknown, or other
  misc_difference 57: note = a, c, u, g, unknown, or other
  misc_difference 62: note = a, c, u, g, unknown, or other
  misc_difference 65: note = a, c, u, g, unknown, or other
  misc_difference 67: note = a, c, u, g, unknown, or other
  misc_difference 70: note = a, c, u, g, unknown, or other
  misc_difference 71: note = a, c, u, g, unknown, or other
  misc_difference 72: note = a, c, u, g, unknown, or other
  misc_difference 75: note = a, c, u, g, unknown, or other
  misc_difference 77: note = a, c, u, g, unknown, or other
  misc_difference 84: note = a, c, u, g, unknown, or other
  misc_difference 86: note = a, c, u, g, unknown, or other
  misc_difference 92: note = a, c, u, g, unknown, or other
  misc_difference 99: note = a, c, u, g, unknown, or other
  misc_difference 109: note = a, c, u, g, unknown, or other
  misc_difference 110: note = a, c, u, g, unknown, or other
  misc_difference 111: note = a, c, u, g, unknown, or other
  misc_difference 112: note = a, c, u, g, unknown, or other
  misc_difference 121: note = a, c, u, g, unknown, or other
  misc_difference 123: note = a, c, u, g, unknown, or other
  misc_difference 124: note = a, c, u, g, unknown, or other
  misc_difference 126: note = a, c, u, g, unknown, or other
  misc_difference 127: note = a, c, u, g, unknown, or other
  misc_difference 131: note = a, c, u, g, unknown, or other
  misc_difference 134: note = a, c, u, g, unknown, or other
  misc_difference 135: note = a, c, u, g, unknown, or other
  misc_difference 136: note = a, c, u, g, unknown, or other
  misc_difference 137: note = a, c, u, g, unknown, or other
  misc_difference 138: note = a, c, u, g, unknown, or other
  misc_difference 139: note = a, c, u, g, unknown, or other
  misc_difference 144: note = a, c, u, g, unknown, or other
  misc_difference 146: note = a, c, u, g, unknown, or other
  misc_difference 147: note = a, c, u, g, unknown, or other
  misc_difference 150: note = a, c, u, g, unknown, or other
  misc_difference 159: note = a, c, u, g, unknown, or other
  misc_difference 160: note = a, c, u, g, unknown, or other
  misc_difference 167: note = a, c, u, g, unknown, or other
  misc_difference 175: note = a, c, u, g, unknown, or other
  misc_difference 178: note = a, c, u, g, unknown, or other
  misc_difference 180: note = a, c, u, g, unknown, or other
  misc_difference 187: note = a, c, u, g, unknown, or other
  misc_difference 189: note = a, c, u, g, unknown, or other
  misc_difference 192: note = a, c, u, g, unknown, or other
  misc_difference 193: note = a, c, u, g, unknown, or other
  misc_difference 195: note = a, c, u, g, unknown, or other
  misc_difference 197: note = a, c, u, g, unknown, or other
  misc_difference 198: note = a, c, u, g, unknown, or other
  misc_difference 199: note = a, c, u, g, unknown, or other
  misc_difference 200: note = a, c, u, g, unknown, or other
  misc_difference 201: note = a, c, u, g, unknown, or other
  misc_difference 202: note = a, c, u, g, unknown, or other
  misc_difference 205: note = a, c, u, g, unknown, or other
anntnannrntrrrnnnnnnyyygacrnrrnnnnnnyyyrnyrntntynnnytntnnrrarnrrnrntrnnnyynangycryrnrnyyyttngrcrytngaygycgyrnnnnaaayyggcnrnnynnyyrnyynnnnnnrartntnntcnaagtatgtnngrcryynraygycrngtntngaaaatnanaynnynannnnnnrrn

SEQ ID NO: 795392 - RNA, 205 nt, unidentified
  source 1..205: mol_type = unassigned RNA; note = ISBmu9
  misc_difference 3: note = a, c, u, g, unknown, or other
  misc_difference 6: note = a, c, u, g, unknown, or other
  misc_difference 7: note = a, c, u, g, unknown, or other
  misc_difference 8: note = a, c, u, g, unknown, or other
  misc_difference 9: note = a, c, u, g, unknown, or other
  misc_difference 10: note = a, c, u, g, unknown, or other
  misc_difference 11: note = a, c, u, g, unknown, or other
  misc_difference 12: note = a, c, u, g, unknown, or other
  misc_difference 14: note = a, c, u, g, unknown, or other
  misc_difference 25: note = a, c, u, g, unknown, or other
  misc_difference 26: note = a, c, u, g, unknown, or other
  misc_difference 27: note = a, c, u, g, unknown, or other
  misc_difference 34: note = a, c, u, g, unknown, or other
  misc_difference 35: note = a, c, u, g, unknown, or other
  misc_difference 39: note = a, c, u, g, unknown, or other
  misc_difference 40: note = a, c, u, g, unknown, or other
  misc_difference 41: note = a, c, u, g, unknown, or other
  misc_difference 42: note = a, c, u, g, unknown, or other
  misc_difference 43: note = a, c, u, g, unknown, or other
  misc_difference 44: note = a, c, u, g, unknown, or other
  misc_difference 46: note = a, c, u, g, unknown, or other
  misc_difference 47: note = a, c, u, g, unknown, or other
  misc_difference 48: note = a, c, u, g, unknown, or other
  misc_difference 54: note = a, c, u, g, unknown, or other
  misc_difference 55: note = a, c, u, g, unknown, or other
  misc_difference 58: note = a, c, u, g, unknown, or other
  misc_difference 71: note = a, c, u, g, unknown, or other
  misc_difference 73: note = a, c, u, g, unknown, or other
  misc_difference 74: note = a, c, u, g, unknown, or other
  misc_difference 75: note = a, c, u, g, unknown, or other
  misc_difference 76: note = a, c, u, g, unknown, or other
  misc_difference 77: note = a, c, u, g, unknown, or other
  misc_difference 80: note = a, c, u, g, unknown, or other
  misc_difference 85: note = a, c, u, g, unknown, or other
  misc_difference 86: note = a, c, u, g, unknown, or other
  misc_difference 87: note = a, c, u, g, unknown, or other
  misc_difference 88: note = a, c, u, g, unknown, or other
  misc_difference 97: note = a, c, u, g, unknown, or other
  misc_difference 98: note = a, c, u, g, unknown, or other
  misc_difference 99: note = a, c, u, g, unknown, or other
  misc_difference 105: note = a, c, u, g, unknown, or other
  misc_difference 106: note = a, c, u, g, unknown, or other
  misc_difference 108: note = a, c, u, g, unknown, or other
  misc_difference 109: note = a, c, u, g, unknown, or other
  misc_difference 118: note = a, c, u, g, unknown, or other
  misc_difference 119: note = a, c, u, g, unknown, or other
  misc_difference 120: note = a, c, u, g, unknown, or other
  misc_difference 135: note = a, c, u, g, unknown, or other
  misc_difference 136: note = a, c, u, g, unknown, or other
  misc_difference 137: note = a, c, u, g, unknown, or other
  misc_difference 154: note = a, c, u, g, unknown, or other
  misc_difference 155: note = a, c, u, g, unknown, or other
  misc_difference 157: note = a, c, u, g, unknown, or other
  misc_difference 160: note = a, c, u, g, unknown, or other
  misc_difference 161: note = a, c, u, g, unknown, or other
  misc_difference 162: note = a, c, u, g, unknown, or other
  misc_difference 163: note = a, c, u, g, unknown, or other
  misc_difference 164: note = a, c, u, g, unknown, or other
  misc_difference 165: note = a, c, u, g, unknown, or other
  misc_difference 167: note = a, c, u, g, unknown, or other
  misc_difference 171: note = a, c, u, g, unknown, or other
  misc_difference 177: note = a, c, u, g, unknown, or other
  misc_difference 184: note = a, c, u, g, unknown, or other
  misc_difference 186: note = a, c, u, g, unknown, or other
  misc_difference 191: note = a, c, u, g, unknown, or other
  misc_difference 192: note = a, c, u, g, unknown, or other
atnttnnnnnnnrnccrgyrcggynnngtyyrrnnryynnnnnnrnnnycrgrnnrgnccgtgcagcytgnynnnnnctngggynnnnragcccgtnnnygagtnnanngcgcacggnnnccgygcyggtcttcnnnrarcccgaacggttrynngngcnnnnnnynagyncgcatnyrcaagnangggrnnygaagaycatgtc

SEQ ID NO: 795393 - RNA, 170 nt, unidentified
  source 1..170: mol_type = unassigned RNA; note = ISCaa14
  misc_difference 2: note = a, c, u, g, unknown, or other
  misc_difference 3: note = a, c, u, g, unknown, or other
  misc_difference 4: note = a, c, u, g, unknown, or other
  misc_difference 5: note = a, c, u, g, unknown, or other
  misc_difference 7: note = a, c, u, g, unknown, or other
  misc_difference 13: note = a, c, u, g, unknown, or other
  misc_difference 14: note = a, c, u, g, unknown, or other
  misc_difference 19: note = a, c, u, g, unknown, or other
  misc_difference 25: note = a, c, u, g, unknown, or other
  misc_difference 26: note = a, c, u, g, unknown, or other
  misc_difference 34: note = a, c, u, g, unknown, or other
  misc_difference 35: note = a, c, u, g, unknown, or other
  misc_difference 36: note = a, c, u, g, unknown, or other
  misc_difference 37: note = a, c, u, g, unknown, or other
  misc_difference 45: note = a, c, u, g, unknown, or other
  misc_difference 50: note = a, c, u, g, unknown, or other
  misc_difference 51: note = a, c, u, g, unknown, or other
  misc_difference 52: note = a, c, u, g, unknown, or other
  misc_difference 53: note = a, c, u, g, unknown, or other
  misc_difference 65: note = a, c, u, g, unknown, or other
  misc_difference 70: note = a, c, u, g, unknown, or other
  misc_difference 86: note = a, c, u, g, unknown, or other
  misc_difference 89: note = a, c, u, g, unknown, or other
  misc_difference 92: note = a, c, u, g, unknown, or other
  misc_difference 93: note = a, c, u, g, unknown, or other
  misc_difference 94: note = a, c, u, g, unknown, or other
  misc_difference 96: note = a, c, u, g, unknown, or other
  misc_difference 116: note = a, c, u, g, unknown, or other
  misc_difference 117: note = a, c, u, g, unknown, or other
  misc_difference 118: note = a, c, u, g, unknown, or other
  misc_difference 119: note = a, c, u, g, unknown, or other
  misc_difference 127: note = a, c, u, g, unknown, or other
  misc_difference 128: note = a, c, u, g, unknown, or other
  misc_difference 130: note = a, c, u, g, unknown, or other
  misc_difference 137: note = a, c, u, g, unknown, or other
  misc_difference 144: note = a, c, u, g, unknown, or other
  misc_difference 145: note = a, c, u, g, unknown, or other
  misc_difference 146: note = a, c, u, g, unknown, or other
  misc_difference 147: note = a, c, u, g, unknown, or other
  misc_difference 148: note = a, c, u, g, unknown, or other
  misc_difference 149: note = a, c, u, g, unknown, or other
  misc_difference 155: note = a, c, u, g, unknown, or other
  misc_difference 156: note = a, c, u, g, unknown, or other
  misc_difference 158: note = a, c, u, g, unknown, or other
  misc_difference 164: note = a, c, u, g, unknown, or other
  misc_difference 166: note = a, c, u, g, unknown, or other
  misc_difference 167: note = a, c, u, g, unknown, or other
  misc_difference 168: note = a, c, u, g, unknown, or other
  misc_difference 169: note = a, c, u, g, unknown, or other
  misc_difference 170: note = a, c, u, g, unknown, or other
rnnnnrnaraarnnrrrrnrargannaagrytrnnnnyygtcatnrgyynnnnrarrcygtycrnratgntartcccytyyyyyynytnytnnnanyttgracagttcrttrggcnnnnragccygnntnyaggatngataarnnnnnnagyarnnynytyyynynnnnn

SEQ ID NO: 795394 - RNA, 191 nt, unidentified
  source 1..191: mol_type = unassigned RNA; note = ISMtsp9
  misc_difference 1: note = a, c, u, g, unknown, or other
  misc_difference 2: note = a, c, u, g, unknown, or other
  misc_difference 3: note = a, c, u, g, unknown, or other
  misc_difference 4: note = a, c, u, g, unknown, or other
  misc_difference 5: note = a, c, u, g, unknown, or other
  misc_difference 13: note = a, c, u, g, unknown, or other
  misc_difference 14: note = a, c, u, g, unknown, or other
  misc_difference 15: note = a, c, u, g, unknown, or other
  misc_difference 16: note = a, c, u, g, unknown, or other
  misc_difference 17: note = a, c, u, g, unknown, or other
  misc_difference 18: note = a, c, u, g, unknown, or other
  misc_difference 19: note = a, c, u, g, unknown, or other
  misc_difference 20: note = a, c, u, g, unknown, or other
  misc_difference 21: note = a, c, u, g, unknown, or other
  misc_difference 22: note = a, c, u, g, unknown, or other
  misc_difference 23: note = a, c, u, g, unknown, or other
  misc_difference 24: note = a, c, u, g, unknown, or other
  misc_difference 25: note = a, c, u, g, unknown, or other
  misc_difference 26: note = a, c, u, g, unknown, or other
  misc_difference 28: note = a, c, u, g, unknown, or other
  misc_difference 29: note = a, c, u, g, unknown, or other
  misc_difference 30: note = a, c, u, g, unknown, or other
  misc_difference 31: note = a, c, u, g, unknown, or other
  misc_difference 32: note = a, c, u, g, unknown, or other
  misc_difference 33: note = a, c, u, g, unknown, or other
  misc_difference 34: note = a, c, u, g, unknown, or other
  misc_difference 35: note = a, c, u, g, unknown, or other
  misc_difference 36: note = a, c, u, g, unknown, or other
  misc_difference 37: note = a, c, u, g, unknown, or other
  misc_difference 38: note = a, c, u, g, unknown, or other
  misc_difference 39: note = a, c, u, g, unknown, or other
  misc_difference 40: note = a, c, u, g, unknown, or other
  misc_difference 41: note = a, c, u, g, unknown, or other
  misc_difference 43: note = a, c, u, g, unknown, or other
  misc_difference 44: note = a, c, u, g, unknown, or other
  misc_difference 45: note = a, c, u, g, unknown, or other
  misc_difference 46: note = a, c, u, g, unknown, or other
  misc_difference 47: note = a, c, u, g, unknown, or other
  misc_difference 48: note = a, c, u, g, unknown, or other
  misc_difference 49: note = a, c, u, g, unknown, or other
  misc_difference 50: note = a, c, u, g, unknown, or other
  misc_difference 51: note = a, c, u, g, unknown, or other
  misc_difference 52: note = a, c, u, g, unknown, or other
  misc_difference 54: note = a, c, u, g, unknown, or other
  misc_difference 55: note = a, c, u, g, unknown, or other
  misc_difference 57: note = a, c, u, g, unknown, or other
  misc_difference 60: note = a, c, u, g, unknown, or other
  misc_difference 64: note = a, c, u, g, unknown, or other
  misc_difference 65: note = a, c, u, g, unknown, or other
  misc_difference 66: note = a, c, u, g, unknown, or other
  misc_difference 67: note = a, c, u, g, unknown, or other
  misc_difference 68: note = a, c, u, g, unknown, or other
  misc_difference 69: note = a, c, u, g, unknown, or other
  misc_difference 73: note = a, c, u, g, unknown, or other
  misc_difference 78: note = a, c, u, g, unknown, or other
  misc_difference 79: note = a, c, u, g, unknown, or other
  misc_difference 80: note = a, c, u, g, unknown, or other
  misc_difference 81: note = a, c, u, g, unknown, or other
  misc_difference 82: note = a, c, u, g, unknown, or other
  misc_difference 85: note = a, c, u, g, unknown, or other
  misc_difference 90: note = a, c, u, g, unknown, or other
  misc_difference 91: note = a, c, u, g, unknown, or other
  misc_difference 92: note = a, c, u, g, unknown, or other
  misc_difference 93: note = a, c, u, g, unknown, or other
  misc_difference 94: note = a, c, u, g, unknown, or other
  misc_difference 98: note = a, c, u, g, unknown, or other
  misc_difference 99: note = a, c, u, g, unknown, or other
  misc_difference 102: note = a, c, u, g, unknown, or other
  misc_difference 106: note = a, c, u, g, unknown, or other
  misc_difference 107: note = a, c, u, g, unknown, or other
  misc_difference 110: note = a, c, u, g, unknown, or other
  misc_difference 111: note = a, c, u, g, unknown, or other
  misc_difference 112: note = a, c, u, g, unknown, or other
  misc_difference 113: note = a, c, u, g, unknown, or other
  misc_difference 114: note = a, c, u, g, unknown, or other
  misc_difference 116: note = a, c, u, g, unknown, or other
  misc_difference 117: note = a, c, u, g, unknown, or other
  misc_difference 118: note = a, c, u, g, unknown, or other
  misc_difference 119: note = a, c, u, g, unknown, or other
  misc_difference 120: note = a, c, u, g, unknown, or other
  misc_difference 122: note = a, c, u, g, unknown, or other
  misc_difference 123: note = a, c, u, g, unknown, or other
  misc_difference 125: note = a, c, u, g, unknown, or other
  misc_difference 139: note = a, c, u, g, unknown, or other
  misc_difference 140: note = a, c, u, g, unknown, or other
  misc_difference 145: note = a, c, u, g, unknown, or other
  misc_difference 146: note = a, c, u, g, unknown, or other
  misc_difference 147: note = a, c, u, g, unknown, or other
  misc_difference 148: note = a, c, u, g, unknown, or other
  misc_difference 149: note = a, c, u, g, unknown, or other
  misc_difference 150: note = a, c, u, g, unknown, or other
  misc_difference 151: note = a, c, u, g, unknown, or other
  misc_difference 152: note = a, c, u, g, unknown, or other
  misc_difference 153: note = a, c, u, g, unknown, or other
  misc_difference 154: note = a, c, u, g, unknown, or other
  misc_difference 155: note = a, c, u, g, unknown, or other
  misc_difference 162: note = a, c, u, g, unknown, or other
  misc_difference 165: note = a, c, u, g, unknown, or other
  misc_difference 172: note = a, c, u, g, unknown, or other
  misc_difference 173: note = a, c, u, g, unknown, or other
  misc_difference 177: note = a, c, u, g, unknown, or other
  misc_difference 178: note = a, c, u, g, unknown, or other
  misc_difference 179: note = a, c, u, g, unknown, or other
  misc_difference 180: note = a, c, u, g, unknown, or other
  misc_difference 183: note = a, c, u, g, unknown, or other
  misc_difference 186: note = a, c, u, g, unknown, or other
  misc_difference 189: note = a, c, u, g, unknown, or other
  misc_difference 190: note = a, c, u, g, unknown, or other
  misc_difference 191: note = a, c, u, g, unknown, or other
nnnnncytgtrynnnnnnnnnnnnnnynnnnnnnnnnnnnnrnnnnnnnnnnrnnrnrgnycgnnnnnnyyynggyynnnnnrgnycgynnnnnrgcnngrncrynnyynnnnnynnnnnynnrnyccgaacrgtygcnngggcnnnnnnnnnnnrgcccgnatnrcargrnnggrnnnnyrnrrnyrnnn

SEQ ID NO: 795395 - RNA, 242 nt, unidentified
  source 1..242: mol_type = unassigned RNA; note = ISSam1
  misc_difference 1: note = a, c, u, g, unknown, or other
  misc_difference 2: note = a, c, u, g, unknown, or other
  misc_difference 3: note = a, c, u, g, unknown, or other
  misc_difference 5: note = a, c, u, g, unknown, or other
  misc_difference 15: note = a, c, u, g, unknown, or other
  misc_difference 16: note = a, c, u, g, unknown, or other
  misc_difference 17: note = a, c, u, g, unknown, or other
  misc_difference 18: note = a, c, u, g, unknown, or other
  misc_difference 25: note = a, c, u, g, unknown, or other
  misc_difference 33: note = a, c, u, g, unknown, or other
  misc_difference 49: note = a, c, u, g, unknown, or other
  misc_difference 50: note = a, c, u, g, unknown, or other
  misc_difference 51: note = a, c, u, g, unknown, or other
  misc_difference 52: note = a, c, u, g, unknown, or other
  misc_difference 53: note = a, c, u, g, unknown, or other
  misc_difference 56: note = a, c, u, g, unknown, or other
  misc_difference 59: note = a, c, u, g, unknown, or other
  misc_difference 62: note = a, c, u, g, unknown, or other
  misc_difference 64: note = a, c, u, g, unknown, or other
  misc_difference 65: note = a, c, u, g, unknown, or other
  misc_difference 66: note = a, c, u, g, unknown, or other
  misc_difference 67: note = a, c, u, g, unknown, or other
  misc_difference 74: note = a, c, u, g, unknown, or other
  misc_difference 75: note = a, c, u, g, unknown, or other
  misc_difference 93: note = a, c, u, g, unknown, or other
  misc_difference 94: note = a, c, u, g, unknown, or other
  misc_difference 107: note = a, c, u, g, unknown, or other
  misc_difference 112: note = a, c, u, g, unknown, or other
  misc_difference 120: note = a, c, u, g, unknown, or other
  misc_difference 127: note = a, c, u, g, unknown, or other
  misc_difference 131: note = a, c, u, g, unknown, or other
  misc_difference 136: note = a, c, u, g, unknown, or other
  misc_difference 137: note = a, c, u, g, unknown, or other
  misc_difference 138: note = a, c, u, g, unknown, or other
  misc_difference 139: note = a, c, u, g, unknown, or other
  misc_difference 145: note = a, c, u, g, unknown, or other
  misc_difference 146: note = a, c, u, g, unknown, or other
  misc_difference 148: note = a, c, u, g, unknown, or other
  misc_difference 149: note = a, c, u, g, unknown, or other
  misc_difference 150: note = a, c, u, g, unknown, or other
  misc_difference 151: note = a, c, u, g, unknown, or other
  misc_difference 152: note = a, c, u, g, unknown, or other
  misc_difference 153: note = a, c, u, g, unknown, or other
  misc_difference 154: note = a, c, u, g, unknown, or other
  misc_difference 155: note = a, c, u, g, unknown, or other
  misc_difference 156: note = a, c, u, g, unknown, or other
  misc_difference 160: note = a, c, u, g, unknown, or other
  misc_difference 161: note = a, c, u, g, unknown, or other
  misc_difference 162: note = a, c, u, g, unknown, or other
  misc_difference 163: note = a, c, u, g, unknown, or other
  misc_difference 167: note = a, c, u, g, unknown, or other
  misc_difference 174: note = a, c, u, g, unknown, or other
  misc_difference 189: note = a, c, u, g, unknown, or other
  misc_difference 190: note = a, c, u, g, unknown, or other
  misc_difference 194: note = a, c, u, g, unknown, or other
  misc_difference 195: note = a, c, u, g, unknown, or other
  misc_difference 204: note = a, c, u, g, unknown, or other
  misc_difference 205: note = a, c, u, g, unknown, or other
  misc_difference 207: note = a, c, u, g, unknown, or other
  misc_difference 209: note = a, c, u, g, unknown, or other
  misc_difference 210: note = a, c, u, g, unknown, or other
  misc_difference 217: note = a, c, u, g, unknown, or other
  misc_difference 219: note = a, c, u, g, unknown, or other
  misc_difference 220: note = a, c, u, g, unknown, or other
  misc_difference 221: note = a, c, u, g, unknown, or other
  misc_difference 222: note = a, c, u, g, unknown, or other
  misc_difference 223: note = a, c, u, g, unknown, or other
  misc_difference 227: note = a, c, u, g, unknown, or other
  misc_difference 228: note = a, c, u, g, unknown, or other
  misc_difference 229: note = a, c, u, g, unknown, or other
  misc_difference 230: note = a, c, u, g, unknown, or other
  misc_difference 231: note = a, c, u, g, unknown, or other
  misc_difference 236: note = a, c, u, g, unknown, or other
  misc_difference 240: note = a, c, u, g, unknown, or other
  misc_difference 241: note = a, c, u, g, unknown, or other
  misc_difference 242: note = a, c, u, g, unknown, or other
nnnynrygryyyygnnnnrgrgyyncyggcyyncrggyycggyrygrcnnnnnyyncyngynrnnnnaygrycnnggggrygrtgycrccggnnycggrggyrycgnyrgancgctgatnagrggynygrncrccnnnnggyyynnynnnnnnnnnggynnnnyggnaggtctncrtaacgtggatgynngcrnncgryrccrnngnynnggccggnrnnnnnyrrnnnnngrrrnrrynnn

SEQ ID NO: 795396 - RNA, 160 nt, unidentified
  source 1..160: mol_type = unassigned RNA; note = ISWpi13
  misc_difference 1: note = a, c, u, g, unknown, or other
  misc_difference 2: note = a, c, u, g, unknown, or other
  misc_difference 3: note = a, c, u, g, unknown, or other
  misc_difference 4: note = a, c, u, g, unknown, or other
  misc_difference 5: note = a, c, u, g, unknown, or other
  misc_difference 6: note = a, c, u, g, unknown, or other
  misc_difference 15: note = a, c, u, g, unknown, or other
  misc_difference 19: note = a, c, u, g, unknown, or other
  misc_difference 21: note = a, c, u, g, unknown, or other
  misc_difference 27: note = a, c, u, g, unknown, or other
  misc_difference 28: note = a, c, u, g, unknown, or other
  misc_difference 29: note = a, c, u, g, unknown, or other
  misc_difference 30: note = a, c, u, g, unknown, or other
  misc_difference 31: note = a, c, u, g, unknown, or other
  misc_difference 32: note = a, c, u, g, unknown, or other
  misc_difference 35: note = a, c, u, g, unknown, or other
  misc_difference 42: note = a, c, u, g, unknown, or other
  misc_difference 43: note = a, c, u, g, unknown, or other
  misc_difference 44: note = a, c, u, g, unknown, or other
  misc_difference 45: note = a, c, u, g, unknown, or other
  misc_difference 53: note = a, c, u, g, unknown, or other
  misc_difference 54: note = a, c, u, g, unknown, or other
  misc_difference 55: note = a, c, u, g, unknown, or other
  misc_difference 56: note = a, c, u, g, unknown, or other
  misc_difference 57: note = a, c, u, g, unknown, or other
  misc_difference 58: note = a, c, u, g, unknown, or other
  misc_difference 62: note = a, c, u, g, unknown, or other
  misc_difference 73: note = a, c, u, g, unknown, or other
  misc_difference 74: note = a, c, u, g, unknown, or other
  misc_difference 75: note = a, c, u, g, unknown, or other
  misc_difference 76: note = a, c, u, g, unknown, or other
  misc_difference 77: note = a, c, u, g, unknown, or other
  misc_difference 78: note = a, c, u, g, unknown, or other
  misc_difference 83: note = a, c, u, g, unknown, or other
  misc_difference 86: note = a, c, u, g, unknown, or other
  misc_difference 87: note = a, c, u, g, unknown, or other
  misc_difference 97: note = a, c, u, g, unknown, or other
  misc_difference 100: note = a, c, u, g, unknown, or other
  misc_difference 101: note = a, c, u, g, unknown, or other
  misc_difference 102: note = a, c, u, g, unknown, or other
  misc_difference 103: note = a, c, u, g, unknown, or other
  misc_difference 104: note = a, c, u, g, unknown, or other
  misc_difference 105: note = a, c, u, g, unknown, or other
  misc_difference 106: note = a, c, u, g, unknown, or other
  misc_difference 107: note = a, c, u, g, unknown, or other
  misc_difference 109: note = a, c, u, g, unknown, or other
  misc_difference 125: note = a, c, u, g, unknown, or other
  misc_difference 128: note = a, c, u, g, unknown, or other
  misc_difference 129: note = a, c, u, g, unknown, or other
  misc_difference 130: note = a, c, u, g, unknown, or other
  misc_difference 131: note = a, c, u, g, unknown, or other
  misc_difference 132: note = a, c, u, g, unknown, or other
  misc_difference 133: note = a, c, u, g, unknown, or other
  misc_difference 135: note = a, c, u, g, unknown, or other
  misc_difference 136: note = a, c, u, g, unknown, or other
  misc_difference 140: note = a, c, u, g, unknown, or other
  misc_difference 141: note = a, c, u, g, unknown, or other
  misc_difference 150: note = a, c, u, g, unknown, or other
  misc_difference 152: note = a, c, u, g, unknown, or other
  misc_difference 157: note = a, c, u, g, unknown, or other
  misc_difference 160: note = a, c, u, g, unknown, or other
nnnnnnyryyyygrnagynanrrccgnnnnnncantggtgynnnnryrcccgnnnnnnagcntggtyyyggrnnnnnnygrynrynncattggtgrnrynnnnnnnnynaycccgtttarragantrnnnnnnynnryynnyccrrryynrnryrynyyn

SEQ ID NO: 795397 - RNA, 166 nt, unidentified
  source 1..166: mol_type = unassigned RNA; note = ISSsu7
  misc_difference 1: note = a, c, u, g, unknown, or other
  misc_difference 2: note = a, c, u, g, unknown, or other
  misc_difference 3: note = a, c, u, g, unknown, or other
  misc_difference 4: note = a, c, u, g, unknown, or other
  misc_difference 6: note = a, c, u, g, unknown, or other
  misc_difference 7: note = a, c, u, g, unknown, or other
  misc_difference 8: note = a, c, u, g, unknown, or other
  misc_difference 9: note = a, c, u, g, unknown, or other
  misc_difference 10: note = a, c, u, g, unknown, or other
  misc_difference 11: note = a, c, u, g, unknown, or other
  misc_difference 12: note = a, c, u, g, unknown, or other
  misc_difference 13: note = a, c, u, g, unknown, or other
  misc_difference 14: note = a, c, u, g, unknown, or other
  misc_difference 15: note = a, c, u, g, unknown, or other
  misc_difference 16: note = a, c, u, g, unknown, or other
  misc_difference 17: note = a, c, u, g, unknown, or other
  misc_difference 18: note = a, c, u, g, unknown, or other
  misc_difference 19: note = a, c, u, g, unknown, or other
  misc_difference 20: note = a, c, u, g, unknown, or other
  misc_difference 21: note = a, c, u, g, unknown, or other
  misc_difference 23: note = a, c, u, g, unknown, or other
  misc_difference 27: note = a, c, u, g, unknown, or other
  misc_difference 36: note = a, c, u, g, unknown, or other
  misc_difference 37: note = a, c, u, g, unknown, or other
  misc_difference 38: note = a, c, u, g, unknown, or other
  misc_difference 40: note = a, c, u, g, unknown, or other
  misc_difference 46: note = a, c, u, g, unknown, or other
  misc_difference 47: note = a, c, u, g, unknown, or other
  misc_difference 48: note = a, c, u, g, unknown, or other
  misc_difference 49: note = a, c, u, g, unknown, or other
  misc_difference 50: note = a, c, u, g, unknown, or other
  misc_difference 51: note = a, c, u, g, unknown, or other
  misc_difference 52: note = a, c, u, g, unknown, or other
  misc_difference 54: note = a, c, u, g, unknown, or other
  misc_difference 55: note = a, c, u, g, unknown, or other
  misc_difference 62: note = a, c, u, g, unknown, or other
  misc_difference 70: note = a, c, u, g, unknown, or other
  misc_difference 71: note = a, c, u, g, unknown, or other
  misc_difference 72: note = a, c, u, g, unknown, or other
  misc_difference 73: note = a, c, u, g, unknown, or other
  misc_difference 74: note = a, c, u, g, unknown, or other
  misc_difference 75: note = a, c, u, g, unknown, or other
  misc_difference 84: note = a, c, u, g, unknown, or other
  misc_difference 87: note = a, c, u, g, unknown, or other
  misc_difference 88: note = a, c, u, g, unknown, or other
  misc_difference 93: note = a, c, u, g, unknown, or other
  misc_difference 94: note = a, c, u, g, unknown, or other
  misc_difference 95: note = a, c, u, g, unknown, or other
  misc_difference 96: note = a, c, u, g, unknown, or other
  misc_difference 98: note = a, c, u, g, unknown, or other
  misc_difference 99: note = a, c, u, g, unknown, or other
  misc_difference 101: note = a, c, u, g, unknown, or other
  misc_difference 102: note = a, c, u, g, unknown, or other
  misc_difference 103: note = a, c, u, g, unknown, or other
  misc_difference 109: note = a, c, u, g, unknown, or other
  misc_difference 110: note = a, c, u, g, unknown, or other
  misc_difference 113: note = a, c, u, g, unknown, or other
  misc_difference 118: note = a, c, u, g, unknown, or other
  misc_difference 122: note = a, c, u, g, unknown, or other
  misc_difference 126: note = a, c, u, g, unknown, or other
  misc_difference 127: note = a, c, u, g, unknown, or other
  misc_difference 129: note = a, c, u, g, unknown, or other
  misc_difference 132: note = a, c, u, g, unknown, or other
  misc_difference 137: note = a, c, u, g, unknown, or other
  misc_difference 140: note = a, c, u, g, unknown, or other
  misc_difference 142: note = a, c, u, g, unknown, or other
  misc_difference 149: note = a, c, u, g, unknown, or other
  misc_difference 154: note = a, c, u, g, unknown, or other
  misc_difference 156: note = a, c, u, g, unknown, or other
  misc_difference 159: note = a, c, u, g, unknown, or other
  misc_difference 160: note = a, c, u, g, unknown, or other
  misc_difference 161: note = a, c, u, g, unknown, or other
  misc_difference 162: note = a, c, u, g, unknown, or other
  misc_difference 163: note = a, c, u, g, unknown, or other
  misc_difference 164: note = a, c, u, g, unknown, or other
  misc_difference 165: note = a, c, u, g, unknown, or other
  misc_difference 166: note = a, c, u, g, unknown, or other
nnnnynnnnnnnnnnnnnnnnrntrrnrrtgrrrynnnangycgynnnnnnnynngrcryynraygtcgnnnnnnaaayygrcnrynnyrytnnnnynnynnnaryyynntcnragyntgtnrrcnnynrangycgngtntngaaaatnrrrynynrrnnnnnnnn

SEQ ID NO: 795398 - RNA, 221 nt, unidentified
  source 1..221: mol_type = unassigned RNA; note = ISAzs35
  misc_difference 1: note = a, c, u, g, unknown, or other
  misc_difference 2: note = a, c, u, g, unknown, or other
  misc_difference 3: note = a, c, u, g, unknown, or other
  misc_difference 4: note = a, c, u, g, unknown, or other
  misc_difference 5: note = a, c, u, g, unknown, or other
  misc_difference 10: note = a, c, u, g, unknown, or other
  misc_difference 53: note = a, c, u, g, unknown, or other
  misc_difference 54: note = a, c, u, g, unknown, or other
  misc_difference 55: note = a, c, u, g, unknown, or other
  misc_difference 56: note = a, c, u, g, unknown, or other
  misc_difference 57: note = a, c, u, g, unknown, or other
  misc_difference 58: note = a, c, u, g, unknown, or other
  misc_difference 59: note = a, c, u, g, unknown, or other
  misc_difference 60: note = a, c, u, g, unknown, or other
  misc_difference 62: note = a, c, u, g, unknown, or other
  misc_difference 69: note = a, c, u, g, unknown, or other
  misc_difference 72: note = a, c, u, g, unknown, or other
  misc_difference 73: note = a, c, u, g, unknown, or other
  misc_difference 78: note = a, c, u, g, unknown, or other
  misc_difference 79: note = a, c, u, g, unknown, or other
  misc_difference 80: note = a, c, u, g, unknown, or other
  misc_difference 81: note = a, c, u, g, unknown, or other
  misc_difference 82: note = a, c, u, g, unknown, or other
  misc_difference 83: note = a, c, u, g, unknown, or other
  misc_difference 99: note = a, c, u, g, unknown, or other
  misc_difference 109: note = a, c, u, g, unknown, or other
  misc_difference 120: note = a, c, u, g, unknown, or other
  misc_difference 128: note = a, c, u, g, unknown, or other
  misc_difference 129: note = a, c, u, g, unknown, or other
  misc_difference 143: note = a, c, u, g, unknown, or other
  misc_difference 146: note = a, c, u, g, unknown, or other
  misc_difference 157: note = a, c, u, g, unknown, or other
  misc_difference 165: note = a, c, u, g, unknown, or other
  misc_difference 167: note = a, c, u, g, unknown, or other
  misc_difference 172: note = a, c, u, g, unknown, or other
  misc_difference 176: note = a, c, u, g, unknown, or other
  misc_difference 180: note = a, c, u, g, unknown, or other
  misc_difference 183: note = a, c, u, g, unknown, or other
  misc_difference 184: note = a, c, u, g, unknown, or other
  misc_difference 190: note = a, c, u, g, unknown, or other
  misc_difference 197: note = a, c, u, g, unknown, or other
  misc_difference 198: note = a, c, u, g, unknown, or other
  misc_difference 200: note = a, c, u, g, unknown, or other
  misc_difference 209: note = a, c, u, g, unknown, or other
  misc_difference 213: note = a, c, u, g, unknown, or other
  misc_difference 219: note = a, c, u, g, unknown, or other
nnnnnatcynccrggrcyygatcrgtccyggcrgatccrggyggacgaaccgnnnnnnnnyntggcytnaanngccgnnnnnnagaatggtytcgycyncytgagccynryccgccgyangcgggatnntggtgcrgcygyynyrnrcgrcgaccgnatrtragntngaycnrgyncggnrrnnrrccrngtcrygnnrnyrggctcrnrccnyggatncc

SEQ ID NO: 795399 - RNA, 168 nt, unidentified
  source 1..168: mol_type = unassigned RNA; note = ISStma8
  misc_difference 1: note = a, c, u, g, unknown, or other
  misc_difference 2: note = a, c, u, g, unknown, or other
  misc_difference 3: note = a, c, u, g, unknown, or other
  misc_difference 4: note = a, c, u, g, unknown, or other
  misc_difference 8: note = a, c, u, g, unknown, or other
  misc_difference 10: note = a, c, u, g, unknown, or other
  misc_difference 12: note = a, c, u, g, unknown, or other
  misc_difference 13: note = a, c, u, g, unknown, or other
  misc_difference 14: note = a, c, u, g, unknown, or other
  misc_difference 19: note = a, c, u, g, unknown, or other
  misc_difference 20: note = a, c, u, g, unknown, or other
  misc_difference 22: note = a, c, u, g, unknown, or other
  misc_difference 23: note = a, c, u, g, unknown, or other
  misc_difference 24: note = a, c, u, g, unknown, or other
  misc_difference 32: note = a, c, u, g, unknown, or other
  misc_difference 33: note = a, c, u, g, unknown, or other
  misc_difference 35: note = a, c, u, g, unknown, or other
  misc_difference 39: note = a, c, u, g, unknown, or other
  misc_difference 41: note = a, c, u, g, unknown, or other
  misc_difference 42: note = a, c, u, g, unknown, or other
  misc_difference 43: note = a, c, u, g, unknown, or other
  misc_difference 44: note = a, c, u, g, unknown, or other
  misc_difference 48: note = a, c, u, g, unknown, or other
  misc_difference 53: note = a, c, u, g, unknown, or other
  misc_difference 54: note = a, c, u, g, unknown, or other
  misc_difference 55: note = a, c, u, g, unknown, or other
  misc_difference 56: note = a, c, u, g, unknown, or other
  misc_difference 57: note = a, c, u, g, unknown, or other
  misc_difference 64: note = a, c, u, g, unknown, or other
  misc_difference 65: note = a, c, u, g, unknown, or other
  misc_difference 66: note = a, c, u, g, unknown, or other
  misc_difference 67: note = a, c, u, g, unknown, or other
  misc_difference 68: note = a, c, u, g, unknown, or other
  misc_difference 72: note = a, c, u, g, unknown, or other
  misc_difference 73: note = a, c, u, g, unknown, or other
  misc_difference 74: note = a, c, u, g, unknown, or other
  misc_difference 77: note = a, c, u, g, unknown, or other
  misc_difference 79: note = a, c, u, g, unknown, or other
  misc_difference 87: note = a, c, u, g, unknown, or other
  misc_difference 88: note = a, c, u, g, unknown, or other
  misc_difference 89: note = a, c, u, g, unknown, or other
  misc_difference 90: note = a, c, u, g, unknown, or other
  misc_difference 93: note = a, c, u, g, unknown, or other
  misc_difference 94: note = a, c, u, g, unknown, or other
  misc_difference 95: note = a, c, u, g, unknown, or other
  misc_difference 96: note = a, c, u, g, unknown, or other
  misc_difference 97: note = a, c, u, g, unknown, or other
  misc_difference 98: note = a, c, u, g, unknown, or other
  misc_difference 99: note = a, c, u, g, unknown, or other
  misc_difference 114: note = a, c, u, g, unknown, or other
  misc_difference 115: note = a, c, u, g, unknown, or other
  misc_difference 120: note = a, c, u, g, unknown, or other
  misc_difference 121: note = a, c, u, g, unknown, or other
  misc_difference 123: note = a, c, u, g, unknown, or other
  misc_difference 129: note = a, c, u, g, unknown, or other
  misc_difference 132: note = a, c, u, g, unknown, or other
  misc_difference 133: note = a, c, u, g, unknown, or other
  misc_difference 140: note = a, c, u, g, unknown, or other
  misc_difference 141: note = a, c, u, g, unknown, or other
  misc_difference 146: note = a, c, u, g, unknown, or other
  misc_difference 147: note = a, c, u, g, unknown, or other
  misc_difference 148: note = a, c, u, g, unknown, or other
  misc_difference 149: note = a, c, u, g, unknown, or other
  misc_difference 150: note = a, c, u, g, unknown, or other
  misc_difference 151: note = a, c, u, g, unknown, or other
  misc_difference 152: note = a, c, u, g, unknown, or other
  misc_difference 153: note = a, c, u, g, unknown, or other
  misc_difference 154: note = a, c, u, g, unknown, or other
  misc_difference 155: note = a, c, u, g, unknown, or other
  misc_difference 156: note = a, c, u, g, unknown, or other
  misc_difference 158: note = a, c, u, g, unknown, or other
  misc_difference 159: note = a, c, u, g, unknown, or other
  misc_difference 160: note = a, c, u, g, unknown, or other
  misc_difference 161: note = a, c, u, g, unknown, or other
  misc_difference 162: note = a, c, u, g, unknown, or other
  misc_difference 165: note = a, c, u, g, unknown, or other
  misc_difference 166: note = a, c, u, g, unknown, or other
nnnnyytnrnrnnnyyrrnngnnngryrygrnngnccgnynnnnyyynggtynnnnngrccgynnnnnagcnnngrncnycryryynnnnyynnnnnnngcccgaacagttgynngrrynnrnryycgnaynnryaagrnngggcnnnnnnnnnnnrnnnnnrrnnay

SEQ ID NO: 795400 - RNA, 216 nt, unidentified
  source 1..216: mol_type = unassigned RNA; note = ISAcp5
  misc_difference 1: note = a, c, u, g, unknown, or other
  misc_difference 2: note = a, c, u, g, unknown, or other
  misc_difference 3: note = a, c, u, g, unknown, or other
  misc_difference 5: note = a, c, u, g, unknown, or other
  misc_difference 7: note = a, c, u, g, unknown, or other
  misc_difference 8: note = a, c, u, g, unknown, or other
  misc_difference 9: note = a, c, u, g, unknown, or other
  misc_difference 11: note = a, c, u, g, unknown, or other
  misc_difference 12: note = a, c, u, g, unknown, or other
  misc_difference 14: note = a, c, u, g, unknown, or other
  misc_difference 16: note = a, c, u, g, unknown, or other
  misc_difference 17: note = a, c, u, g, unknown, or other
  misc_difference 19: note = a, c, u, g, unknown, or other
  misc_difference 24: note = a, c, u, g, unknown, or other
  misc_difference 25: note = a, c, u, g, unknown, or other
  misc_difference 41: note = a, c, u, g, unknown, or other
  misc_difference 42: note = a, c, u, g, unknown, or other
  misc_difference 43: note = a, c, u, g, unknown, or other
  misc_difference 44: note = a, c, u, g, unknown, or other
  misc_difference 45: note = a, c, u, g, unknown, or other
  misc_difference 46: note = a, c, u, g, unknown, or other
  misc_difference 47: note = a, c, u, g, unknown, or other
  misc_difference 48: note = a, c, u, g, unknown, or other
  misc_difference 49: note = a, c, u, g, unknown, or other
  misc_difference 51: note = a, c, u, g, unknown, or other
  misc_difference 55: note = a, c, u, g, unknown, or other
  misc_difference 56: note = a, c, u, g, unknown, or other
  misc_difference 58: note = a, c, u, g, unknown, or other
  misc_difference 59: note = a, c, u, g, unknown, or other
  misc_difference 60: note = a, c, u, g, unknown, or other
  misc_difference 61: note = a, c, u, g, unknown, or other
  misc_difference 62: note = a, c, u, g, unknown, or other
  misc_difference 63: note = a, c, u, g, unknown, or other
  misc_difference 64: note = a, c, u, g, unknown, or other
  misc_difference 65: note = a, c, u, g, unknown, or other
  misc_difference 66: note = a, c, u, g, unknown, or other
  misc_difference 67: note = a, c, u, g, unknown, or other
  misc_difference 68: note = a, c, u, g, unknown, or other
  misc_difference 69: note = a, c, u, g, unknown, or other
  misc_difference 70: note = a, c, u, g, unknown, or other
  misc_difference 71: note = a, c, u, g, unknown, or other
  misc_difference 72: note = a, c, u, g, unknown, or other
  misc_difference 73: note = a, c, u, g, unknown, or other
  misc_difference 80: note = a, c, u, g, unknown, or other
  misc_difference 81: note = a, c, u, g, unknown, or other
  misc_difference 82: note = a, c, u, g, unknown, or other
  misc_difference 83: note = a, c, u, g, unknown, or other
  misc_difference 84: note = a, c, u, g, unknown, or other
  misc_difference 85: note = a, c, u, g, unknown, or other
  misc_difference 90: note = a, c, u, g, unknown, or other
  misc_difference 104: note = a, c, u, g, unknown, or other
  misc_difference 105: note = a, c, u, g, unknown, or other
  misc_difference 106: note = a, c, u, g, unknown, or other
  misc_difference 107: note = a, c, u, g, unknown, or other
  misc_difference 118: note = a, c, u, g, unknown, or other
  misc_difference 119: note = a, c, u, g, unknown, or other
  misc_difference 130: note = a, c, u, g, unknown, or other
  misc_difference 131: note = a, c, u, g, unknown, or other
  misc_difference 132: note = a, c, u, g, unknown, or other
  misc_difference 133: note = a, c, u, g, unknown, or other
  misc_difference 135: note = a, c, u, g, unknown, or other
  misc_difference 136: note = a, c, u, g, unknown, or other
  misc_difference 143: note = a, c, u, g, unknown, or other
  misc_difference 144: note = a, c, u, g, unknown, or other
  misc_difference 145: note = a, c, u, g, unknown, or other
  misc_difference 164: note = a, c, u, g, unknown, or other
  misc_difference 169: note = a, c, u, g, unknown, or other
  misc_difference 170: note = a, c, u, g, unknown, or other
  misc_difference 171: note = a, c, u, g, unknown, or other
  misc_difference 172: note = a, c, u, g, unknown, or other
  misc_difference 176: note = a, c, u, g, unknown, or other
  misc_difference 178: note = a, c, u, g, unknown, or other
  misc_difference 179: note = a, c, u, g, unknown, or other
  misc_difference 180: note = a, c, u, g, unknown, or other
  misc_difference 182: note = a, c, u, g, unknown, or other
  misc_difference 184: note = a, c, u, g, unknown, or other
  misc_difference 185: note = a, c, u, g, unknown, or other
  misc_difference 186: note = a, c, u, g, unknown, or other
  misc_difference 187: note = a, c, u, g, unknown, or other
  misc_difference 188: note = a, c, u, g, unknown, or other
  misc_difference 189: note = a, c, u, g, unknown, or other
  misc_difference 190: note = a, c, u, g, unknown, or other
  misc_difference 191: note = a, c, u, g, unknown, or other
  misc_difference 192: note = a, c, u, g, unknown, or other
  misc_difference 193: note = a, c, u, g, unknown, or other
  misc_difference 194: note = a, c, u, g, unknown, or other
  misc_difference 195: note = a, c, u, g, unknown, or other
  misc_difference 196: note = a, c, u, g, unknown, or other
  misc_difference 199: note = a, c, u, g, unknown, or other
  misc_difference 200: note = a, c, u, g, unknown, or other
  misc_difference 201: note = a, c, u, g, unknown, or other
  misc_difference 204: note = a, c, u, g, unknown, or other
  misc_difference 205: note = a, c, u, g, unknown, or other
  misc_difference 206: note = a, c, u, g, unknown, or other
  misc_difference 207: note = a, c, u, g, unknown, or other
  misc_difference 208: note = a, c, u, g, unknown, or other
  misc_difference 209: note = a, c, u, g, unknown, or other
  misc_difference 210: note = a, c, u, g, unknown, or other
  misc_difference 211: note = a, c, u, g, unknown, or other
  misc_difference 216: note = a, c, u, g, unknown, or other
nnnrnynnnynnrnynnancgccnngtycrggygactgcgnnnnnnnnnyngrynncnnnnnnnnnnnnnnnnagrycgnnnnnnagatngcagcrccyryyrnnnngraccccarynngcaccgrryynnnnrnnrgyycrnnnagagtgcgratggaagyrnggcgnnnnggynrnnnynrnnnnnnnnnnnnnrrnnnrynnnnnnnncyygn

SEQ ID NO: 795401 - RNA, 245 nt, unidentified
  source 1..245: mol_type = unassigned RNA; note = ISPye32
  misc_difference 1: note = a, c, u, g, unknown, or other
  misc_difference 2: note = a, c, u, g, unknown, or other
  misc_difference 4: note = a, c, u, g, unknown, or other
  misc_difference 6: note = a, c, u, g, unknown, or other
  misc_difference 7: note = a, c, u, g, unknown, or other
  misc_difference 16: note = a, c, u, g, unknown, or other
  misc_difference 17: note = a, c, u, g, unknown, or other
  misc_difference 18: note = a, c, u, g, unknown, or other
  misc_difference 19: note = a, c, u, g, unknown, or other
  misc_difference 20: note = a, c, u, g, unknown, or other
  misc_difference 21: note = a, c, u, g, unknown, or other
  misc_difference 24: note = a, c, u, g, unknown, or other
  misc_difference 25: note = a, c, u, g, unknown, or other
  misc_difference 26: note = a, c, u, g, unknown, or other
  misc_difference 27: note = a, c, u, g, unknown, or other
  misc_difference 28: note = a, c, u, g, unknown, or other
  misc_difference 29: note = a, c, u, g, unknown, or other
  misc_difference 30: note = a, c, u, g, unknown, or other
  misc_difference 31: note = a, c, u, g, unknown, or other
  misc_difference 32: note = a, c, u, g, unknown, or other
  misc_difference 33: note = a, c, u, g, unknown, or other
  misc_difference 34: note = a, c, u, g, unknown, or other
  misc_difference 35: note = a, c, u, g, unknown, or other
  misc_difference 36: note = a, c, u, g, unknown, or other
  misc_difference 37: note = a, c, u, g, unknown, or other
  misc_difference 38: note = a, c, u, g, unknown, or other
  misc_difference 39: note = a, c, u, g, unknown, or other
  misc_difference 40: note = a, c, u, g, unknown, or other
  misc_difference 41: note = a, c, u, g, unknown, or other
  misc_difference 43: note = a, c, u, g, unknown, or other
  misc_difference 45: note = a, c, u, g, unknown, or other
  misc_difference 46: note = a, c, u, g, unknown, or other
  misc_difference 47: note = a, c, u, g, unknown, or other
  misc_difference 48: note = a, c, u, g, unknown, or other
  misc_difference 49: note = a, c, u, g, unknown, or other
  misc_difference 50: note = a, c, u, g, unknown, or other
  misc_difference 51: note = a, c, u, g, unknown, or other
  misc_difference 52: note = a, c, u, g, unknown, or other
  misc_difference 53: note = a, c, u, g, unknown, or other
  misc_difference 54: note = a, c, u, g, unknown, or other
  misc_difference 55: note = a, c, u, g, unknown, or other
  misc_difference 56: note = a, c, u, g, unknown, or other
  misc_difference 58: note = a, c, u, g, unknown, or other
  misc_difference 59: note = a, c, u, g, unknown, or other
  misc_difference 85: note = a, c, u, g, unknown, or other
  misc_difference 88: note = a, c, u, g, unknown, or other
  misc_difference 101: note = a, c, u, g, unknown, or other
  misc_difference 102: note = a, c, u, g, unknown, or other
  misc_difference 103: note = a, c, u, g, unknown, or other
  misc_difference 105: note = a, c, u, g, unknown, or other
  misc_difference 106: note = a, c, u, g, unknown, or other
  misc_difference 107: note = a, c, u, g, unknown, or other
  misc_difference 109: note = a, c, u, g, unknown, or other
  misc_difference 126: note = a, c, u, g, unknown, or other
  misc_difference 131: note = a, c, u, g, unknown, or other
  misc_difference 134: note = a, c, u, g, unknown, or other
  misc_difference 185: note = a, c, u, g, unknown, or other
  misc_difference 194: note = a, c, u, g, unknown, or other
  misc_difference 201: note = a, c, u, g, unknown, or other
  misc_difference 202: note = a, c, u, g, unknown, or other
  misc_difference 210: note = a, c, u, g, unknown, or other
  misc_difference 211: note = a, c, u, g, unknown, or other
  misc_difference 212: note = a, c, u, g, unknown, or other
  misc_difference 213: note = a, c, u, g, unknown, or other
  misc_difference 214: note = a, c, u, g, unknown, or other
  misc_difference 215: note = a, c, u, g, unknown, or other
  misc_difference 216: note = a, c, u, g, unknown, or other
  misc_difference 219: note = a, c, u, g, unknown, or other
  misc_difference 220: note = a, c, u, g, unknown, or other
  misc_difference 221: note = a, c, u, g, unknown, or other
  misc_difference 222: note = a, c, u, g, unknown, or other
  misc_difference 229: note = a, c, u, g, unknown, or other
  misc_difference 230: note = a, c, u, g, unknown, or other
  misc_difference 231: note = a, c, u, g, unknown, or other
  misc_difference 232: note = a, c, u, g, unknown, or other
  misc_difference 233: note = a, c, u, g, unknown, or other
  misc_difference 237: note = a, c, u, g, unknown, or other
  misc_difference 242: note = a, c, u, g, unknown, or other
nnrnynncggygccynnnnnnrynnnnnnnnnnnnnnnnnnrnynnnnnnnnnnnnynnccgggayrgrggcrycgggagcacgnrrngygggcaggccgnnnynnnynatgagctgygagctcgngttrntanytggccgccyctrcgacyygcccggytgcgcygygagcgcgratccgtagntgtcgtgyngcccrcnngctcccrnnnnnnnrrnnnnrggrgrnnnnnatgngrgtnaty

SEQ ID NO: 795402 - RNA, 221 nt, unidentified
  source 1..221: mol_type = unassigned RNA; note = ISEch3
  misc_difference 1: note = a, c, u, g, unknown, or other
  misc_difference 2: note = a, c, u, g, unknown, or other
  misc_difference 3: note = a, c, u, g, unknown, or other
  misc_difference 10: note = a, c, u, g, unknown, or other
  misc_difference 11: note = a, c, u, g, unknown, or other
  misc_difference 17: note = a, c, u, g, unknown, or other
  misc_difference 18: note = a, c, u, g, unknown, or other
  misc_difference 19: note = a, c, u, g, unknown, or other
  misc_difference 20: note = a, c, u, g, unknown, or other
  misc_difference 21: note = a, c, u, g, unknown, or other
  misc_difference 22: note = a, c, u, g, unknown, or other
  misc_difference 23: note = a, c, u, g, unknown, or other
  misc_difference 24: note = a, c, u, g, unknown, or other
  misc_difference 34: note = a, c, u, g, unknown, or other
  misc_difference 35: note = a, c, u, g, unknown, or other
  misc_difference 38: note = a, c, u, g, unknown, or other
  misc_difference 42: note = a, c, u, g, unknown, or other
  misc_difference 49: note = a, c, u, g, unknown, or other
  misc_difference 56: note = a, c, u, g, unknown, or other
  misc_difference 57: note = a, c, u, g, unknown, or other
  misc_difference 58: note = a, c, u, g, unknown, or other
  misc_difference 65: note = a, c, u, g, unknown, or other
  misc_difference 66: note = a, c, u, g, unknown, or other
  misc_difference 67: note = a, c, u, g, unknown, or other
  misc_difference 68: note = a, c, u, g, unknown, or other
  misc_difference 69: note = a, c, u, g, unknown, or other
  misc_difference 70: note = a, c, u, g, unknown, or other
  misc_difference 71: note = a, c, u, g, unknown, or other
  misc_difference 73: note = a, c, u, g, unknown, or other
  misc_difference 74: note = a, c, u, g, unknown, or other
  misc_difference 75: note = a, c, u, g, unknown, or other
  misc_difference 77: note = a, c, u, g, unknown, or other
  misc_difference 81: note = a, c, u, g, unknown, or other
  misc_difference 82: note = a, c, u, g, unknown, or other
  misc_difference 87: note = a, c, u, g, unknown, or other
  misc_difference 90: note = a, c, u, g, unknown, or other
  misc_difference 91: note = a, c, u, g, unknown, or other
  misc_difference 92: note = a, c, u, g, unknown, or other
  misc_difference 93: note = a, c, u, g, unknown, or other
  misc_difference 94: note = a, c, u, g, unknown, or other
  misc_difference 95: note = a, c, u, g, unknown, or other
  misc_difference 98: note = a, c, u, g, unknown, or other
  misc_difference 100: note = a, c, u, g, unknown, or other
  misc_difference 104: note = a, c, u, g, unknown, or other
  misc_difference 105: note = a, c, u, g, unknown, or other
  misc_difference 112: note = a, c, u, g, unknown, or other
  misc_difference 129: note = a, c, u, g, unknown, or other
  misc_difference 131: note = a, c, u, g, unknown, or other
  misc_difference 133: note = a, c, u, g, unknown, or other
  misc_difference 137: note = a, c, u, g, unknown, or other
  misc_difference 138: note = a, c, u, g, unknown, or other
  misc_difference 139: note = a, c, u, g, unknown, or other
  misc_difference 140: note = a, c, u, g, unknown, or other
  misc_difference 144: note = a, c, u, g, unknown, or other
  misc_difference 147: note = a, c, u, g, unknown, or other
  misc_difference 148: note = a, c, u, g, unknown, or other
  misc_difference 149: note = a, c, u, g, unknown, or other
  misc_difference 150: note = a, c, u, g, unknown, or other
  misc_difference 151: note = a, c, u, g, unknown, or other
  misc_difference 154: note = a, c, u, g, unknown, or other
  misc_difference 172: note = a, c, u, g, unknown, or other
  misc_difference 175: note = a, c, u, g, unknown, or other
  misc_difference 176: note = a, c, u, g, unknown, or other
  misc_difference 177: note = a, c, u, g, unknown, or other
  misc_difference 180: note = a, c, u, g, unknown, or other
  misc_difference 181: note = a, c, u, g, unknown, or other
  misc_difference 183: note = a, c, u, g, unknown, or other
  misc_difference 184: note = a, c, u, g, unknown, or other
  misc_difference 189: note = a, c, u, g, unknown, or other
  misc_difference 190: note = a, c, u, g, unknown, or other
  misc_difference 191: note = a, c, u, g, unknown, or other
  misc_difference 193: note = a, c, u, g, unknown, or other
  misc_difference 194: note = a, c, u, g, unknown, or other
  misc_difference 195: note = a, c, u, g, unknown, or other
  misc_difference 196: note = a, c, u, g, unknown, or other
  misc_difference 197: note = a, c, u, g, unknown, or other
  misc_difference 198: note = a, c, u, g, unknown, or other
  misc_difference 199: note = a, c, u, g, unknown, or other
  misc_difference 200: note = a, c, u, g, unknown, or other
  misc_difference 201: note = a, c, u, g, unknown, or other
  misc_difference 206: note = a, c, u, g, unknown, or other
  misc_difference 207: note = a, c, u, g, unknown, or other
  misc_difference 209: note = a, c, u, g, unknown, or other
  misc_difference 210: note = a, c, u, g, unknown, or other
  misc_difference 211: note = a, c, u, g, unknown, or other
  misc_difference 212: note = a, c, u, g, unknown, or other
  misc_difference 214: note = a, c, u, g, unknown, or other
  misc_difference 217: note = a, c, u, g, unknown, or other
  misc_difference 218: note = a, c, u, g, unknown, or other
  misc_difference 220: note = a, c, u, g, unknown, or other
nnngrttgcnnrggyrnnnnnnnnrtgatggcrnnrcnggtnrrrccgnrryygrnnnarycygnnnnnnnynnngnrcynnragyncgnnnnnnygntnrgrnnyyrryyngcrrayyycatcarggncngngrynnnnrycncrnnnnnagnccgrayryaygryygcanycnnnycnnynnryyrnnnynnnnnnnnncytgnnrnnnnrnrrnnrnc

SEQ ID NO: 795403 - RNA, 223 nt, unidentified
  source 1..223: mol_type = unassigned RNA; note = IS4321L
  misc_difference 2: note = a, c, u, g, unknown, or other
  misc_difference 3: note = a, c, u, g, unknown, or other
  misc_difference 4: note = a, c, u, g, unknown, or other
  misc_difference 5: note = a, c, u, g, unknown, or other
  misc_difference 6: note = a, c, u, g, unknown, or other
  misc_difference 7: note = a, c, u, g, unknown, or other
  misc_difference 8: note = a, c, u, g, unknown, or other
  misc_difference 9: note = a, c, u, g, unknown, or other
  misc_difference 10: note = a, c, u, g, unknown, or other
  misc_difference 11: note = a, c, u, g, unknown, or other
  misc_difference 23: note = a, c, u, g, unknown, or other
  misc_difference 24: note = a, c, u, g, unknown, or other
  misc_difference 29: note = a, c, u, g, unknown, or other
  misc_difference 30: note = a, c, u, g, unknown, or other
  misc_difference 31: note = a, c, u, g, unknown, or other
  misc_difference 32: note = a, c, u, g, unknown, or other
  misc_difference 44: note = a, c, u, g, unknown, or other
  misc_difference 45: note = a, c, u, g, unknown, or other
  misc_difference 50: note = a, c, u, g, unknown, or other
  misc_difference 53: note = a, c, u, g, unknown, or other
  misc_difference 65: note = a, c, u, g, unknown, or other
  misc_difference 66: note = a, c, u, g, unknown, or other
  misc_difference 71: note = a, c, u, g, unknown, or other
  misc_difference 73: note = a, c, u, g, unknown, or other
  misc_difference 74: note = a, c, u, g, unknown, or other
  misc_difference 75: note = a, c, u, g, unknown, or other
  misc_difference 76: note = a, c, u, g, unknown, or other
  misc_difference 77: note = a, c, u, g, unknown, or other
  misc_difference 78: note = a, c, u, g, unknown, or other
  misc_difference 79: note = a, c, u, g, unknown, or other
  misc_difference 80: note = a, c, u, g, unknown, or other
  misc_difference 81: note = a, c, u, g, unknown, or other
  misc_difference 82: note = a, c, u, g, unknown, or other
  misc_difference 83: note = a, c, u, g, unknown, or other
  misc_difference 89: note = a, c, u, g, unknown, or other
  misc_difference 90: note = a, c, u, g, unknown, or other
  misc_difference 91: note = a, c, u, g, unknown, or other
  misc_difference 93: note = a, c, u, g, unknown, or other
  misc_difference 98: note = a, c, u, g, unknown, or other
  misc_difference 99: note = a, c, u, g, unknown, or other
  misc_difference 100: note = a, c, u, g, unknown, or other
  misc_difference 101: note = a, c, u, g, unknown, or other
  misc_difference 102: note = a, c, u, g, unknown, or other
  misc_difference 103: note = a, c, u, g, unknown, or other
  misc_difference 105: note = a, c, u, g, unknown, or other
  misc_difference 106: note = a, c, u, g, unknown, or other
  misc_difference 107: note = a, c, u, g, unknown, or other
  misc_difference 108: note = a, c, u, g, unknown, or other
  misc_difference 112: note = a, c, u, g, unknown, or other
  misc_difference 118: note = a, c, u, g, unknown, or other
  misc_difference 123: note = a, c, u, g, unknown, or other
  misc_difference 126: note = a, c, u, g, unknown, or other
  misc_difference 127: note = a, c, u, g, unknown, or other
  misc_difference 132: note = a, c, u, g, unknown, or other
  misc_difference 135: note = a, c, u, g, unknown, or other
  misc_difference 142: note = a, c, u, g, unknown, or other
  misc_difference 144: note = a, c, u, g, unknown, or other
  misc_difference 145: note = a, c, u, g, unknown, or other
  misc_difference 146: note = a, c, u, g, unknown, or other
  misc_difference 148: note = a, c, u, g, unknown, or other
  misc_difference 151: note = a, c, u, g, unknown, or other
  misc_difference 152: note = a, c, u, g, unknown, or other
  misc_difference 153: note = a, c, u, g, unknown, or other
  misc_difference 154: note = a, c, u, g, unknown, or other
  misc_difference 155: note = a, c, u, g, unknown, or other
  misc_difference 156: note = a, c, u, g, unknown, or other
  misc_difference 158: note = a, c, u, g, unknown, or other
  misc_difference 165: note = a, c, u, g, unknown, or other
  misc_difference 167: note = a, c, u, g, unknown, or other
  misc_difference 171: note = a, c, u, g, unknown, or other
  misc_difference 174: note = a, c, u, g, unknown, or other
  misc_difference 178: note = a, c, u, g, unknown, or other
  misc_difference 182: note = a, c, u, g, unknown, or other
  misc_difference 183: note = a, c, u, g, unknown, or other
  misc_difference 184: note = a, c, u, g, unknown, or other
  misc_difference 187: note = a, c, u, g, unknown, or other
  misc_difference 188: note = a, c, u, g, unknown, or other
  misc_difference 191: note = a, c, u, g, unknown, or other
  misc_difference 192: note = a, c, u, g, unknown, or other
  misc_difference 193: note = a, c, u, g, unknown, or other
  misc_difference 194: note = a, c, u, g, unknown, or other
  misc_difference 195: note = a, c, u, g, unknown, or other
  misc_difference 196: note = a, c, u, g, unknown, or other
  misc_difference 197: note = a, c, u, g, unknown, or other
  misc_difference 201: note = a, c, u, g, unknown, or other
  misc_difference 207: note = a, c, u, g, unknown, or other
  misc_difference 214: note = a, c, u, g, unknown, or other
  misc_difference 223: note = a, c, u, g, unknown, or other
ynnnnnnnnnnyggytttgcgrnnrcygnnnnyygaygayryrnnyggcnyrnygrccygryrrnnrrccnrnnnnnnnnnnnrgcyynnnanrycgnnnnnnynnnnagrnyyryynggcgnrrnnyycrncrnggcrcgnrnnnyncynnnnnnrncgccgrnyngatnyrngcrnrcynnnrynnrynnnnnnnrgynttgcanrarygrnrrygrccrn

SEQ ID NO: 795404 - RNA, 221 nt, unidentified
  source 1..221: mol_type = unassigned RNA; note = ISCARN5
  misc_difference 1: note = a, c, u, g, unknown, or other
  misc_difference 2: note = a, c, u, g, unknown, or other
  misc_difference 5: note = a, c, u, g, unknown, or other
  misc_difference 9: note = a, c, u, g, unknown, or other
  misc_difference 10: note = a, c, u, g, unknown, or other
  misc_difference 18: note = a, c, u, g, unknown, or other
  misc_difference 19: note = a, c, u, g, unknown, or other
  misc_difference 21: note = a, c, u, g, unknown, or other
  misc_difference 23: note = a, c, u, g, unknown, or other
  misc_difference 24: note = a, c, u, g, unknown, or other
  misc_difference 33: note = a, c, u, g, unknown, or other
  misc_difference 34: note = a, c, u, g, unknown, or other
  misc_difference 36: note = a, c, u, g, unknown, or other
  misc_difference 37: note = a, c, u, g, unknown, or other
  misc_difference 38: note = a, c, u, g, unknown, or other
  misc_difference 53: note = a, c, u, g, unknown, or other
  misc_difference 54: note = a, c, u, g, unknown, or other
  misc_difference 56: note = a, c, u, g, unknown, or other
  misc_difference 57: note = a, c, u, g, unknown, or other
  misc_difference 58: note = a, c, u, g, unknown, or other
  misc_difference 60: note = a, c, u, g, unknown, or other
  misc_difference 65: note = a, c, u, g, unknown, or other
  misc_difference 67: note = a, c, u, g, unknown, or other
  misc_difference 68: note = a, c, u, g, unknown, or other
  misc_difference 69: note = a, c, u, g, unknown, or other
  misc_difference 70: note = a, c, u, g, unknown, or other
  misc_difference 71: note = a, c, u, g, unknown, or other
  misc_difference 73: note = a, c, u, g, unknown, or other
  misc_difference 74: note = a, c, u, g, unknown, or other
  misc_difference 75: note = a, c, u, g, unknown, or other
  misc_difference 80: note = a, c, u, g, unknown, or other
  misc_difference 81: note = a, c, u, g, unknown, or other
  misc_difference 82: note = a, c, u, g, unknown, or other
  misc_difference 83: note = a, c, u, g, unknown, or other
  misc_difference 84: note = a, c, u, g, unknown, or other
  misc_difference 85: note = a, c, u, g, unknown, or other
  misc_difference 86: note = a, c, u, g, unknown, or other
  misc_difference 87: note = a, c, u, g, unknown, or other
  misc_difference 91: note = a, c, u, g, unknown, or other
  misc_difference 93: note = a, c, u, g, unknown, or other
  misc_difference 96: note = a, c, u, g, unknown, or other
  misc_difference 97: note = a, c, u, g, unknown, or other
  misc_difference 99: note = a, c, u, g, unknown, or other
  misc_difference 105: note = a, c, u, g, unknown, or other
  misc_difference 106: note = a, c, u, g, unknown, or other
  misc_difference 108: note = a, c, u, g, unknown, or other
  misc_difference 109: note = a, c, u, g, unknown, or other
  misc_difference 113: note = a, c, u, g, unknown, or other
  misc_difference 117: note = a, c, u, g, unknown, or other
  misc_difference 118: note = a, c, u, g, unknown, or other
  misc_difference 120: note = a, c, u, g, unknown, or other
  misc_difference 121: note = a, c, u, g, unknown, or other
  misc_difference 122: note = a, c, u, g, unknown, or other
  misc_difference 133: note = a, c, u, g, unknown, or other
  misc_difference 135: note = a, c, u, g, unknown, or other
  misc_difference 137: note = a, c, u, g, unknown, or other
  misc_difference 138: note = a, c, u, g, unknown, or other
  misc_difference 139: note = a, c, u, g, unknown, or other
  misc_difference 140: note = a, c, u, g, unknown, or other
  misc_difference 141: note = a, c, u, g, unknown, or other
  misc_difference 142: note = a, c, u, g, unknown, or other
  misc_difference 143: note = a, c, u, g, unknown, or other
  misc_difference 144: note = a, c, u, g, unknown, or other
  misc_difference 146: note = a, c, u, g, unknown, or other
  misc_difference 149: note = a, c, u, g, unknown, or other
  misc_difference 150: note = a, c, u, g, unknown, or other
  misc_difference 151: note = a, c, u, g, unknown, or other
  misc_difference 152: note = a, c, u, g, unknown, or other
  misc_difference 153: note = a, c, u, g, unknown, or other
  misc_difference 160: note = a, c, u, g, unknown, or other
  misc_difference 161: note = a, c, u, g, unknown, or other
  misc_difference 166: note = a, c, u, g, unknown, or other
  misc_difference 167: note = a, c, u, g, unknown, or other
  misc_difference 168: note = a, c, u, g, unknown, or other
  misc_difference 169: note = a, c, u, g, unknown, or other
  misc_difference 177: note = a, c, u, g, unknown, or other
  misc_difference 178: note = a, c, u, g, unknown, or other
  misc_difference 179: note = a, c, u, g, unknown, or other
  misc_difference 183: note = a, c, u, g, unknown, or other
  misc_difference 184: note = a, c, u, g, unknown, or other
  misc_difference 185: note = a, c, u, g, unknown, or other
  misc_difference 187: note = a, c, u, g, unknown, or other
  misc_difference 188: note = a, c, u, g, unknown, or other
  misc_difference 191: note = a, c, u, g, unknown, or other
  misc_difference 192: note = a, c, u, g, unknown, or other
  misc_difference 193: note = a, c, u, g, unknown, or other
  misc_difference 194: note = a, c, u, g, unknown, or other
  misc_difference 195: note = a, c, u, g, unknown, or other
  misc_difference 197: note = a, c, u, g, unknown, or other
  misc_difference 198: note = a, c, u, g, unknown, or other
  misc_difference 199: note = a, c, u, g, unknown, or other
  misc_difference 200: note = a, c, u, g, unknown, or other
  misc_difference 201: note = a, c, u, g, unknown, or other
  misc_difference 203: note = a, c, u, g, unknown, or other
  misc_difference 206: note = a, c, u, g, unknown, or other
  misc_difference 207: note = a, c, u, g, unknown, or other
  misc_difference 208: note = a, c, u, g, unknown, or other
  misc_difference 209: note = a, c, u, g, unknown, or other
  misc_difference 210: note = a, c, u, g, unknown, or other
  misc_difference 211: note = a, c, u, g, unknown, or other
  misc_difference 212: note = a, c, u, g, unknown, or other
  misc_difference 213: note = a, c, u, g, unknown, or other
  misc_difference 216: note = a, c, u, g, unknown, or other
  misc_difference 217: note = a, c, u, g, unknown, or other
nnyynyyrnnrryygcrnnrnynnyygatgrynnrnnnggtyrgaccrrygynnrnnnrnccygnynnnnnynnngryynnnnnnnnycgnynrrnnrntrrggnnynnrcgngcgnntnnncatcrgggycngnrnnnnnnnnyncrnnnnnagrccgnntryannnnygcagtcnnnycynnnynncrnnnnnrnnnnnyngcnnnnnnnnrrnngyyy

SEQ ID NO: 795405 - RNA, 223 nt, unidentified
  source 1..223: mol_type = unassigned RNA; note = ISKpn43
  misc_difference 12: note = a, c, u, g, unknown, or other
  misc_difference 26: note = a, c, u, g, unknown, or other
  misc_difference 58: note = a, c, u, g, unknown, or other
  misc_difference 59: note = a, c, u, g, unknown, or other
  misc_difference 60: note = a, c, u, g, unknown, or other
  misc_difference 67: note = a, c, u, g, unknown, or other
  misc_difference 68: note = a, c, u, g, unknown, or other
  misc_difference 69: note = a, c, u, g, unknown, or other
  misc_difference 70: note = a, c, u, g, unknown, or other
  misc_difference 71: note = a, c, u, g, unknown, or other
  misc_difference 72: note = a, c, u, g, unknown, or other
  misc_difference 73: note = a, c, u, g, unknown, or other
  misc_difference 75: note = a, c, u, g, unknown, or other
  misc_difference 76: note = a, c, u, g, unknown, or other
  misc_difference 77: note = a, c, u, g, unknown, or other
  misc_difference 82: note = a, c, u, g, unknown, or other
  misc_difference 84: note = a, c, u, g, unknown, or other
  misc_difference 92: note = a, c, u, g, unknown, or other
  misc_difference 93: note = a, c, u, g, unknown, or other
  misc_difference 94: note = a, c, u, g, unknown, or other
  misc_difference 95: note = a, c, u, g, unknown, or other
  misc_difference 96: note = a, c, u, g, unknown, or other
  misc_difference 97: note = a, c, u, g, unknown, or other
  misc_difference 102: note = a, c, u, g, unknown, or other
  misc_difference 106: note = a, c, u, g, unknown, or other
  misc_difference 107: note = a, c, u, g, unknown, or other
  misc_difference 118: note = a, c, u, g, unknown, or other
  misc_difference 133: note = a, c, u, g, unknown, or other
  misc_difference 135: note = a, c, u, g, unknown, or other
  misc_difference 139: note = a, c, u, g, unknown, or other
  misc_difference 140: note = a, c, u, g, unknown, or other
  misc_difference 141: note = a, c, u, g, unknown, or other
  misc_difference 142: note = a, c, u, g, unknown, or other
  misc_difference 146: note = a, c, u, g, unknown, or other
  misc_difference 149: note = a, c, u, g, unknown, or other
  misc_difference 150: note = a, c, u, g, unknown, or other
  misc_difference 151: note = a, c, u, g, unknown, or other
  misc_difference 163: note = a, c, u, g, unknown, or other
  misc_difference 169: note = a, c, u, g, unknown, or other
  misc_difference 179: note = a, c, u, g, unknown, or other
  misc_difference 184: note = a, c, u, g, unknown, or other
  misc_difference 186: note = a, c, u, g, unknown, or other
  misc_difference 187: note = a, c, u, g, unknown, or other
  misc_difference 188: note = a, c, u, g, unknown, or other
  misc_difference 196: note = a, c, u, g, unknown, or other
  misc_difference 197: note = a, c, u, g, unknown, or other
  misc_difference 199: note = a, c, u, g, unknown, or other
  misc_difference 203: note = a, c, u, g, unknown, or other
  misc_difference 204: note = a, c, u, g, unknown, or other
  misc_difference 208: note = a, c, u, g, unknown, or other
  misc_difference 213: note = a, c, u, g, unknown, or other
  misc_difference 214: note = a, c, u, g, unknown, or other
  misc_difference 215: note = a, c, u, g, unknown, or other
  misc_difference 216: note = a, c, u, g, unknown, or other
  misc_difference 217: note = a, c, u, g, unknown, or other
  misc_difference 218: note = a, c, u, g, unknown, or other
  misc_difference 219: note = a, c, u, g, unknown, or other
  misc_difference 223: note = a, c, u, g, unknown, or other
ccaccgattgcncaggcratcaygangtgatggcaaracaggtyagaccgygryygrnnnarccygnnnnnnncnnngyrcnynragyrcgnnnnnnygrtnrggnnycrrycagcrnatyccatcagggacngnggynnnnrccncrnnnraagtccgratnyayggntgcaatcyynrcctnynnnycrycrynnanygrnngyynrryrnnnnnnngryn

SEQ ID NO: 795406 - RNA, 166 nt, unidentified
  source 1..166: mol_type = unassigned RNA; note = ISKpn42
  misc_difference 1: note = a, c, u, g, unknown, or other
  misc_difference 2: note = a, c, u, g, unknown, or other
  misc_difference 4: note = a, c, u, g, unknown, or other
  misc_difference 6: note = a, c, u, g, unknown, or other
  misc_difference 12: note = a, c, u, g, unknown, or other
  misc_difference 14: note = a, c, u, g, unknown, or other
  misc_difference 17: note = a, c, u, g, unknown, or other
  misc_difference 18: note = a, c, u, g, unknown, or other
  misc_difference 30: note = a, c, u, g, unknown, or other
  misc_difference 32: note = a, c, u, g, unknown, or other
  misc_difference 33: note = a, c, u, g, unknown, or other
  misc_difference 34: note = a, c, u, g, unknown, or other
  misc_difference 35: note = a, c, u, g, unknown, or other
  misc_difference 39: note = a, c, u, g, unknown, or other
  misc_difference 44: note = a, c, u, g, unknown, or other
  misc_difference 45: note = a, c, u, g, unknown, or other
  misc_difference 46: note = a, c, u, g, unknown, or other
  misc_difference 47: note = a, c, u, g, unknown, or other
  misc_difference 56: note = a, c, u, g, unknown, or other
  misc_difference 57: note = a, c, u, g, unknown, or other
  misc_difference 58: note = a, c, u, g, unknown, or other
  misc_difference 59: note = a, c, u, g, unknown, or other
  misc_difference 60: note = a, c, u, g, unknown, or other
  misc_difference 64: note = a, c, u, g, unknown, or other
  misc_difference 65: note = a, c, u, g, unknown, or other
  misc_difference 66: note = a, c, u, g, unknown, or other
  misc_difference 76: note = a, c, u, g, unknown, or other
  misc_difference 77: note = a, c, u, g, unknown, or other
  misc_difference 79: note = a, c, u, g, unknown, or other
  misc_difference 80: note = a, c, u, g, unknown, or other
  misc_difference 81: note = a, c, u, g, unknown, or other
  misc_difference 89: note = a, c, u, g, unknown, or other
  misc_difference 92: note = a, c, u, g, unknown, or other
  misc_difference 93: note = a, c, u, g, unknown, or other
  misc_difference 110: note = a, c, u, g, unknown, or other
  misc_difference 111: note = a, c, u, g, unknown, or other
  misc_difference 113: note = a, c, u, g, unknown, or other
  misc_difference 115: note = a, c, u, g, unknown, or other
  misc_difference 118: note = a, c, u, g, unknown, or other
  misc_difference 120: note = a, c, u, g, unknown, or other
  misc_difference 121: note = a, c, u, g, unknown, or other
  misc_difference 128: note = a, c, u, g, unknown, or other
  misc_difference 129: note = a, c, u, g, unknown, or other
  misc_difference 137: note = a, c, u, g, unknown, or other
  misc_difference 141: note = a, c, u, g, unknown, or other
  misc_difference 143: note = a, c, u, g, unknown, or other
  misc_difference 144: note = a, c, u, g, unknown, or other
  misc_difference 147: note = a, c, u, g, unknown, or other
  misc_difference 152: note = a, c, u, g, unknown, or other
  misc_difference 157: note = a, c, u, g, unknown, or other
  misc_difference 160: note = a, c, u, g, unknown, or other
  misc_difference 161: note = a, c, u, g, unknown, or other
  misc_difference 162: note = a, c, u, g, unknown, or other
  misc_difference 164: note = a, c, u, g, unknown, or other
  misc_difference 165: note = a, c, u, g, unknown, or other
  misc_difference 166: note = a, c, u, g, unknown, or other
nnynrnyyyrgnrnrgnnyrygcagccygnynnnncyyngggynnnnragcccgynnnnnagcnnnyrgcgcryrnnynnnrccgyyynyynnrarcccgaacrgttgynngnrnyynannycgyatnnrcaaggangggnrnnrangrrynygycnrrnnnrnnn

SEQ ID NO: 795407 - RNA, 180 nt, unidentified
  source 1..180: mol_type = unassigned RNA; note = ISCARN20
  misc_difference 22: note = a, c, u, g, unknown, or other
  misc_difference 23: note = a, c, u, g, unknown, or other
  misc_difference 33: note = a, c, u, g, unknown, or other
  misc_difference 34: note = a, c, u, g, unknown, or other
  misc_difference 36: note = a, c, u, g, unknown, or other
  misc_difference 39: note = a, c, u, g, unknown, or other
  misc_difference 47: note = a, c, u, g, unknown, or other
  misc_difference 50: note = a, c, u, g, unknown, or other
  misc_difference 51: note = a, c, u, g, unknown, or other
  misc_difference 52: note = a, c, u, g, unknown, or other
  misc_difference 53: note = a, c, u, g, unknown, or other
  misc_difference 54: note = a, c, u, g, unknown, or other
  misc_difference 55: note = a, c, u, g, unknown, or other
  misc_difference 56: note = a, c, u, g, unknown, or other
  misc_difference 57: note = a, c, u, g, unknown, or other
  misc_difference 58: note = a, c, u, g, unknown, or other
  misc_difference 59: note = a, c, u, g, unknown, or other
  misc_difference 71: note = a, c, u, g, unknown, or other
  misc_difference 72: note = a, c, u, g, unknown, or other
  misc_difference 73: note = a, c, u, g, unknown, or other
  misc_difference 74: note = a, c, u, g, unknown, or other
  misc_difference 89: note = a, c, u, g, unknown, or other
  misc_difference 102: note = a, c, u, g, unknown, or other
  misc_difference 112: note = a, c, u, g, unknown, or other
  misc_difference 113: note = a, c, u, g, unknown, or other
  misc_difference 118: note = a, c, u, g, unknown, or other
  misc_difference 119: note = a, c, u, g, unknown, or other
  misc_difference 133: note = a, c, u, g, unknown, or other
  misc_difference 147: note = a, c, u, g, unknown, or other
  misc_difference 148: note = a, c, u, g, unknown, or other
  misc_difference 149: note = a, c, u, g, unknown, or other
  misc_difference 155: note = a, c, u, g, unknown, or other
  misc_difference 156: note = a, c, u, g, unknown, or other
  misc_difference 176: note = a, c, u, g, unknown, or other
  misc_difference 177: note = a, c, u, g, unknown, or other
ayarrgygarcggcrgcgccgnnatgaccgaynnrncantggtgcgnrynnnnnnnnnngygrgcccgyynnnnagcrtggtcyrggantcgtcggygacantggygagcgnngyrannygcatcccgttyrngagayygagtcrannncgacgnntcccayggcgcygccrytcnnyrr

SEQ ID NO: 795408 - RNA, 188 nt, unidentified
  source 1..188: mol_type = unassigned RNA; note = ISCc2
  misc_difference 2: note = a, c, u, g, unknown, or other
  misc_difference 3: note = a, c, u, g, unknown, or other
  misc_difference 4: note = a, c, u, g, unknown, or other
  misc_difference 5: note = a, c, u, g, unknown, or other
  misc_difference 10: note = a, c, u, g, unknown, or other
  misc_difference 13: note = a, c, u, g, unknown, or other
  misc_difference 14: note = a, c, u, g, unknown, or other
  misc_difference 15: note = a, c, u, g, unknown, or other
  misc_difference 17: note = a, c, u, g, unknown, or other
  misc_difference 20: note = a, c, u, g, unknown, or other
  misc_difference 24: note = a, c, u, g, unknown, or other
  misc_difference 26: note = a, c, u, g, unknown, or other
  misc_difference 29: note = a, c, u, g, unknown, or other
  misc_difference 33: note = a, c, u, g, unknown, or other
  misc_difference 37: note = a, c, u, g, unknown, or other
  misc_difference 38: note = a, c, u, g, unknown, or other
  misc_difference 42: note = a, c, u, g, unknown, or other
  misc_difference 47: note = a, c, u, g, unknown, or other
  misc_difference 51: note = a, c, u, g, unknown, or other
  misc_difference 52: note = a, c, u, g, unknown, or other
  misc_difference 57: note = a, c, u, g, unknown, or other
  misc_difference 62: note = a, c, u, g, unknown, or other
  misc_difference 66: note = a, c, u, g, unknown, or other
  misc_difference 73: note = a, c, u, g, unknown, or other
  misc_difference 84: note = a, c, u, g, unknown, or other
  misc_difference 85: note = a, c, u, g, unknown, or other
  misc_difference 86: note = a, c, u, g, unknown, or other
  misc_difference 92: note = a, c, u, g, unknown, or other
  misc_difference 96: note = a, c, u, g, unknown, or other
  misc_difference 97: note = a, c, u, g, unknown, or other
  misc_difference 107: note = a, c, u, g, unknown, or other
  misc_difference 108: note = a, c, u, g, unknown, or other
  misc_difference 113: note = a, c, u, g, unknown, or other
  misc_difference 130: note = a, c, u, g, unknown, or other
  misc_difference 155: note = a, c, u, g, unknown, or other
  misc_difference 159: note = a, c, u, g, unknown, or other
  misc_difference 160: note = a, c, u, g, unknown, or other
  misc_difference 161: note = a, c, u, g, unknown, or other
  misc_difference 163: note = a, c, u, g, unknown, or other
  misc_difference 172: note = a, c, u, g, unknown, or other
rnnnnrgcrnyrnnnynygntrrnrnygnygyngcgnnggrnccgrnggcnnycggnyccyncgcnyggcgrnygrcgcccgynnnycctynggynncaaccgyrgnngagcnyygggaccrcygccryngtcacgcacgaccgracagtcgcyngaynnncnrtcgcaygnacaaggcaggttaccg

SEQ ID NO: 795409 - RNA, 227 nt, unidentified
  source 1..227: mol_type = unassigned RNA; note = ISHar3
  misc_difference 1: note = a, c, u, g, unknown, or other
  misc_difference 2: note = a, c, u, g, unknown, or other
  misc_difference 3: note = a, c, u, g, unknown, or other
  misc_difference 11: note = a, c, u, g, unknown, or other
  misc_difference 14: note = a, c, u, g, unknown, or other
  misc_difference 15: note = a, c, u, g, unknown, or other
  misc_difference 16: note = a, c, u, g, unknown, or other
  misc_difference 17: note = a, c, u, g, unknown, or other
  misc_difference 18: note = a, c, u, g, unknown, or other
  misc_difference 19: note = a, c, u, g, unknown, or other
  misc_difference 20: note = a, c, u, g, unknown, or other
  misc_difference 21: note = a, c, u, g, unknown, or other
  misc_difference 22: note = a, c, u, g, unknown, or other
  misc_difference 23: note = a, c, u, g, unknown, or other
  misc_difference 24: note = a, c, u, g, unknown, or other
  misc_difference 33: note = a, c, u, g, unknown, or other
  misc_difference 34: note = a, c, u, g, unknown, or other
  misc_difference 37: note = a, c, u, g, unknown, or other
  misc_difference 50: note = a, c, u, g, unknown, or other
  misc_difference 54: note = a, c, u, g, unknown, or other
  misc_difference 55: note = a, c, u, g, unknown, or other
  misc_difference 56: note = a, c, u, g, unknown, or other
  misc_difference 59: note = a, c, u, g, unknown, or other
  misc_difference 64: note = a, c, u, g, unknown, or other
  misc_difference 65: note = a, c, u, g, unknown, or other
  misc_difference 66: note = a, c, u, g, unknown, or other
  misc_difference 67: note = a, c, u, g, unknown, or other
  misc_difference 68: note = a, c, u, g, unknown, or other
  misc_difference 69: note = a, c, u, g, unknown, or other
  misc_difference 70: note = a, c, u, g, unknown, or other
  misc_difference 71: note = a, c, u, g, unknown, or other
  misc_difference 72: note = a, c, u, g, unknown, or other
  misc_difference 73: note = a, c, u, g, unknown, or other
  misc_difference 74: note = a, c, u, g, unknown, or other
  misc_difference 79: note = a, c, u, g, unknown, or other
  misc_difference 81: note = a, c, u, g, unknown, or other
  misc_difference 82: note = a, c, u, g, unknown, or other
  misc_difference 83: note = a, c, u, g, unknown, or other
  misc_difference 91: note = a, c, u, g, unknown, or other
  misc_difference 92: note = a, c, u, g, unknown, or other
  misc_difference 93: note = a, c, u, g, unknown, or other
  misc_difference 94: note = a, c, u, g, unknown, or other
  misc_difference 95: note = a, c, u, g, unknown, or other
  misc_difference 96: note = a, c, u, g, unknown, or other
  misc_difference 99: note = a, c, u, g, unknown, or other
  misc_difference 101: note = a, c, u, g, unknown, or other
  misc_difference 105: note = a, c, u, g, unknown, or other
  misc_difference 106: note = a, c, u, g, unknown, or other
  misc_difference 107: note = a, c, u, g, unknown, or other
  misc_difference 109: note = a, c, u, g, unknown, or other
  misc_difference 111: note = a, c, u, g, unknown, or other
  misc_difference 132: note = a, c, u, g, unknown, or other
  misc_difference 136: note = a, c, u, g, unknown, or other
  misc_difference 137: note = a, c, u, g, unknown, or other
  misc_difference 138: note = a, c, u, g, unknown, or other
  misc_difference 139: note = a, c, u, g, unknown, or other
  misc_difference 140: note = a, c, u, g, unknown, or other
  misc_difference 141: note = a, c, u, g, unknown, or other
  misc_difference 142: note = a, c, u, g, unknown, or other
  misc_difference 143: note = a, c, u, g, unknown, or other
  misc_difference 144: note = a, c, u, g, unknown, or other
  misc_difference 145: note = a, c, u, g, unknown, or other
  misc_difference 149: note = a, c, u, g, unknown, or other
  misc_difference 150: note = a, c, u, g, unknown, or other
  misc_difference 151: note = a, c, u, g, unknown, or other
  misc_difference 152: note = a, c, u, g, unknown, or other
  misc_difference 153: note = a, c, u, g, unknown, or other
  misc_difference 154: note = a, c, u, g, unknown, or other
  misc_difference 169: note = a, c, u, g, unknown, or other
  misc_difference 170: note = a, c, u, g, unknown, or other
  misc_difference 171: note = a, c, u, g, unknown, or other
  misc_difference 178: note = a, c, u, g, unknown, or other
  misc_difference 179: note = a, c, u, g, unknown, or other
  misc_difference 182: note = a, c, u, g, unknown, or other
  misc_difference 184: note = a, c, u, g, unknown, or other
  misc_difference 185: note = a, c, u, g, unknown, or other
  misc_difference 186: note = a, c, u, g, unknown, or other
  misc_difference 187: note = a, c, u, g, unknown, or other
  misc_difference 188: note = a, c, u, g, unknown, or other
  misc_difference 189: note = a, c, u, g, unknown, or other
  misc_difference 194: note = a, c, u, g, unknown, or other
  misc_difference 195: note = a, c, u, g, unknown, or other
  misc_difference 196: note = a, c, u, g, unknown, or other
  misc_difference 198: note = a, c, u, g, unknown, or other
  misc_difference 199: note = a, c, u, g, unknown, or other
  misc_difference 200: note = a, c, u, g, unknown, or other
  misc_difference 201: note = a, c, u, g, unknown, or other
  misc_difference 202: note = a, c, u, g, unknown, or other
  misc_difference 203: note = a, c, u, g, unknown, or other
  misc_difference 204: note = a, c, u, g, unknown, or other
  misc_difference 211: note = a, c, u, g, unknown, or other
  misc_difference 212: note = a, c, u, g, unknown, or other
  misc_difference 213: note = a, c, u, g, unknown, or other
  misc_difference 214: note = a, c, u, g, unknown, or other
  misc_difference 215: note = a, c, u, g, unknown, or other
  misc_difference 218: note = a, c, u, g, unknown, or other
  misc_difference 219: note = a, c, u, g, unknown, or other
nnnrrttgcrnrrnnnnnnnnnnntgatgrcrnnaynggtyrraccrrcnyyynnnrancctgnnnnnnnnnnnggcynynnnrargycgnnnnnnygntnaggnnnrnrngygcrratyycatcarggcyngrrnnnnnnnnnnyycnnnnnnargccgratataygnnngcaryynnrynynnnnnnrycrnnnrnnnnnnnyttgcrnnnnnggnngrgtccat

SEQ ID NO: 795410 - RNA, 204 nt, unidentified
  source 1..204: mol_type = unassigned RNA; note = ISMno22
  misc_difference 1: note = a, c, u, g, unknown, or other
  misc_difference 2: note = a, c, u, g, unknown, or other
  misc_difference 4: note = a, c, u, g, unknown, or other
  misc_difference 5: note = a, c, u, g, unknown, or other
  misc_difference 13: note = a, c, u, g, unknown, or other
  misc_difference 14: note = a, c, u, g, unknown, or other
  misc_difference 15: note = a, c, u, g, unknown, or other
  misc_difference 16: note = a, c, u, g, unknown, or other
  misc_difference 17: note = a, c, u, g, unknown, or other
  misc_difference 23: note = a, c, u, g, unknown, or other
  misc_difference 24: note = a, c, u, g, unknown, or other
  misc_difference 27: note = a, c, u, g, unknown, or other
  misc_difference 28: note = a, c, u, g, unknown, or other
  misc_difference 29: note = a, c, u, g, unknown, or other
  misc_difference 39: note = a, c, u, g, unknown, or other
  misc_difference 46: note = a, c, u, g, unknown, or other
  misc_difference 47: note = a, c, u, g, unknown, or other
  misc_difference 59: note = a, c, u, g, unknown, or other
  misc_difference 60: note = a, c, u, g, unknown, or other
  misc_difference 65: note = a, c, u, g, unknown, or other
  misc_difference 66: note = a, c, u, g, unknown, or other
  misc_difference 68: note = a, c, u, g, unknown, or other
  misc_difference 69: note = a, c, u, g, unknown, or other
  misc_difference 70: note = a, c, u, g, unknown, or other
  misc_difference 71: note = a, c, u, g, unknown, or other
  misc_difference 74: note = a, c, u, g, unknown, or other
  misc_difference 80: note = a, c, u, g, unknown, or other
  misc_difference 82: note = a, c, u, g, unknown, or other
  misc_difference 83: note = a, c, u, g, unknown, or other
  misc_difference 85: note = a, c, u, g, unknown, or other
  misc_difference 87: note = a, c, u, g, unknown, or other
  misc_difference 88: note = a, c, u, g, unknown, or other
  misc_difference 89: note = a, c, u, g, unknown, or other
  misc_difference 90: note = a, c, u, g, unknown, or other
  misc_difference 91: note = a, c, u, g, unknown, or other
  misc_difference 92: note = a, c, u, g, unknown, or other
  misc_difference 94: note = a, c, u, g, unknown, or other
  misc_difference 95: note = a, c, u, g, unknown, or other
  misc_difference 96: note = a, c, u, g, unknown, or other
  misc_difference 105: note = a, c, u, g, unknown, or other
  misc_difference 106: note = a, c, u, g, unknown, or other
  misc_difference 107: note = a, c, u, g, unknown, or other
  misc_difference 108: note = a, c, u, g, unknown, or other
  misc_difference 117: note = a, c, u, g, unknown, or other
  misc_difference 118: note = a, c, u, g, unknown, or other
  misc_difference 153: note = a, c, u, g, unknown, or other
  misc_difference 154: note = a, c, u, g, unknown, or other
  misc_difference 177: note = a, c, u, g, unknown, or other
  misc_difference 179: note = a, c, u, g, unknown, or other
  misc_difference 181: note = a, c, u, g, unknown, or other
  misc_difference 190: note = a, c, u, g, unknown, or other
  misc_difference 195: note = a, c, u, g, unknown, or other
  misc_difference 196: note = a, c, u, g, unknown, or other
  misc_difference 197: note = a, c, u, g, unknown, or other
  misc_difference 198: note = a, c, u, g, unknown, or other
  misc_difference 199: note = a, c, u, g, unknown, or other
  misc_difference 201: note = a, c, u, g, unknown, or other
  misc_difference 202: note = a, c, u, g, unknown, or other
  misc_difference 204: note = a, c, u, g, unknown, or other
nnrnnyycgccynnnnnrgygrnnygnnnygtycccgyngggacgnnggryrrggygannycgynnrnnnncyngrrccnrnnrnynnnnnnynnnraggycgynnnnyagattgrnncgccycgyyytycygaccccatyatgyggcggccnnrygccgaccrcgaagagaagcrngngncccrygrrnrygrnnnnnynnrn

SEQ ID NO: 795411 - RNA, 216 nt, unidentified
  source 1..216: mol_type = unassigned RNA; note = ISGdi15
  misc_difference 1: note = a, c, u, g, unknown, or other
  misc_difference 2: note = a, c, u, g, unknown, or other
  misc_difference 3: note = a, c, u, g, unknown, or other
  misc_difference 5: note = a, c, u, g, unknown, or other
  misc_difference 6: note = a, c, u, g, unknown, or other
  misc_difference 12: note = a, c, u, g, unknown, or other
  misc_difference 13: note = a, c, u, g, unknown, or other
  misc_difference 14: note = a, c, u, g, unknown, or other
  misc_difference 21: note = a, c, u, g, unknown, or other
  misc_difference 22: note = a, c, u, g, unknown, or other
  misc_difference 25: note = a, c, u, g, unknown, or other
  misc_difference 26: note = a, c, u, g, unknown, or other
  misc_difference 33: note = a, c, u, g, unknown, or other
  misc_difference 36: note = a, c, u, g, unknown, or other
  misc_difference 38: note = a, c, u, g, unknown, or other
  misc_difference 40: note = a, c, u, g, unknown, or other
  misc_difference 44: note = a, c, u, g, unknown, or other
  misc_difference 45: note = a, c, u, g, unknown, or other
  misc_difference 47: note = a, c, u, g, unknown, or other
  misc_difference 50: note = a, c, u, g, unknown, or other
  misc_difference 52: note = a, c, u, g, unknown, or other
  misc_difference 55: note = a, c, u, g, unknown, or other
  misc_difference 58: note = a, c, u, g, unknown, or other
  misc_difference 71: note = a, c, u, g, unknown, or other
  misc_difference 74: note = a, c, u, g, unknown, or other
  misc_difference 76: note = a, c, u, g, unknown, or other
  misc_difference 77: note = a, c, u, g, unknown, or other
  misc_difference 78: note = a, c, u, g, unknown, or other
  misc_difference 79: note = a, c, u, g, unknown, or other
  misc_difference 80: note = a, c, u, g, unknown, or other
  misc_difference 81: note = a, c, u, g, unknown, or other
  misc_difference 82: note = a, c, u, g, unknown, or other
  misc_difference 83: note = a, c, u, g, unknown, or other
  misc_difference 84: note = a, c, u, g, unknown, or other
  misc_difference 85: note = a, c, u, g, unknown, or other
  misc_difference 86: note = a, c, u, g, unknown, or other
  misc_difference 87: note = a, c, u, g, unknown, or other
  misc_difference 88: note = a, c, u, g, unknown, or other
  misc_difference 91: note = a, c, u, g, unknown, or other
  misc_difference 97: note = a, c, u, g, unknown, or other
  misc_difference 98: note = a, c, u, g, unknown, or other
  misc_difference 99: note = a, c, u, g, unknown, or other
  misc_difference 101: note = a, c, u, g, unknown, or other
  misc_difference 102: note = a, c, u, g, unknown, or other
  misc_difference 108: note = a, c, u, g, unknown, or other
  misc_difference 110: note = a, c, u, g, unknown, or other
  misc_difference 111: note = a, c, u, g, unknown, or other
  misc_difference 112: note = a, c, u, g, unknown, or other
  misc_difference 113: note = a, c, u, g, unknown, or other
  misc_difference 114: note = a, c, u, g, unknown, or other
  misc_difference 122: note = a, c, u, g, unknown, or other
  misc_difference 123: note = a, c, u, g, unknown, or other
  misc_difference 124: note = a, c, u, g, unknown, or other
  misc_difference 131: note = a, c, u, g, unknown, or other
  misc_difference 132: note = a, c, u, g, unknown, or other
  misc_difference 133: note = a, c, u, g, unknown, or other
  misc_difference 136: note = a, c, u, g, unknown, or other
  misc_difference 145: note = a, c, u, g, unknown, or other
  misc_difference 146: note = a, c, u, g, unknown, or other
  misc_difference 147: note = a, c, u, g, unknown, or other
  misc_difference 149: note = a, c, u, g, unknown, or other
  misc_difference 150: note = a, c, u, g, unknown, or other
  misc_difference 151: note = a, c, u, g, unknown, or other
  misc_difference 152: note = a, c, u, g, unknown, or other
  misc_difference 153: note = a, c, u, g, unknown, or other
  misc_difference 154: note = a, c, u, g, unknown, or other
  misc_difference 155: note = a, c, u, g, unknown, or other
  misc_difference 156: note = a, c, u, g, unknown, or other
  misc_difference 157: note = a, c, u, g, unknown, or other
  misc_difference 158: note = a, c, u, g, unknown, or other
  misc_difference 159: note = a, c, u, g, unknown, or other
  misc_difference 160: note = a, c, u, g, unknown, or other
  misc_difference 161: note = a, c, u, g, unknown, or other
  misc_difference 164: note = a, c, u, g, unknown, or other
  misc_difference 178: note = a, c, u, g, unknown, or other
  misc_difference 179: note = a, c, u, g, unknown, or other
  misc_difference 186: note = a, c, u, g, unknown, or other
  misc_difference 187: note = a, c, u, g, unknown, or other
  misc_difference 192: note = a, c, u, g, unknown, or other
  misc_difference 195: note = a, c, u, g, unknown, or other
  misc_difference 196: note = a, c, u, g, unknown, or other
  misc_difference 197: note = a, c, u, g, unknown, or other
  misc_difference 199: note = a, c, u, g, unknown, or other
  misc_difference 200: note = a, c, u, g, unknown, or other
  misc_difference 201: note = a, c, u, g, unknown, or other
  misc_difference 202: note = a, c, u, g, unknown, or other
  misc_difference 206: note = a, c, u, g, unknown, or other
  misc_difference 207: note = a, c, u, g, unknown, or other
  misc_difference 210: note = a, c, u, g, unknown, or other
  misc_difference 211: note = a, c, u, g, unknown, or other
  misc_difference 212: note = a, c, u, g, unknown, or other
  misc_difference 214: note = a, c, u, g, unknown, or other
  misc_difference 215: note = a, c, u, g, unknown, or other
  misc_difference 216: note = a, c, u, g, unknown, or other
nnnrnntccgcnnnrgcggrnnrgnnyygrygnrgncnrnrgrnnrnggnrngyncgnyatcttgcyygynrcnrnnnnnnnnnnnnngancrcgcnnnanngyytgnrnnnnngcyycgynnnycygaynnnrrnrtgygycgnnncnnnnnnnnnnnnnygnygagcrcgrarrrnngcaygrnncrycngrnnnynnnnyyrnnrrnnnrnnn

SEQ ID NO: 795412 - RNA, 177 nt, unidentified
  source 1..177: mol_type = unassigned RNA; note = ISBma3
  misc_difference 3: note = a, c, u, g, unknown, or other
  misc_difference 4: note = a, c, u, g, unknown, or other
  misc_difference 10: note = a, c, u, g, unknown, or other
  misc_difference 16: note = a, c, u, g, unknown, or other
  misc_difference 29: note = a, c, u, g, unknown, or other
  misc_difference 30: note = a, c, u, g, unknown, or other
  misc_difference 32: note = a, c, u, g, unknown, or other
  misc_difference 38: note = a, c, u, g, unknown, or other
  misc_difference 43: note = a, c, u, g, unknown, or other
  misc_difference 45: note = a, c, u, g, unknown, or other
  misc_difference 52: note = a, c, u, g, unknown, or other
  misc_difference 56: note = a, c, u, g, unknown, or other
  misc_difference 61: note = a, c, u, g, unknown, or other
  misc_difference 73: note = a, c, u, g, unknown, or other
  misc_difference 78: note = a, c, u, g, unknown, or other
  misc_difference 83: note = a, c, u, g, unknown, or other
  misc_difference 85: note = a, c, u, g, unknown, or other
  misc_difference 88: note = a, c, u, g, unknown, or other
  misc_difference 105: note = a, c, u, g, unknown, or other
  misc_difference 106: note = a, c, u, g, unknown, or other
  misc_difference 110: note = a, c, u, g, unknown, or other
  misc_difference 111: note = a, c, u, g, unknown, or other
  misc_difference 114: note = a, c, u, g, unknown, or other
  misc_difference 115: note = a, c, u, g, unknown, or other
  misc_difference 116: note = a, c, u, g, unknown, or other
  misc_difference 117: note = a, c, u, g, unknown, or other
  misc_difference 118: note = a, c, u, g, unknown, or other
  misc_difference 119: note = a, c, u, g, unknown, or other
  misc_difference 120: note = a, c, u, g, unknown, or other
  misc_difference 128: note = a, c, u, g, unknown, or other
  misc_difference 147: note = a, c, u, g, unknown, or other
  misc_difference 148: note = a, c, u, g, unknown, or other
  misc_difference 151: note = a, c, u, g, unknown, or other
  misc_difference 158: note = a, c, u, g, unknown, or other
  misc_difference 160: note = a, c, u, g, unknown, or other
  misc_difference 161: note = a, c, u, g, unknown, or other
  misc_difference 162: note = a, c, u, g, unknown, or other
  misc_difference 163: note = a, c, u, g, unknown, or other
  misc_difference 165: note = a, c, u, g, unknown, or other
  misc_difference 171: note = a, c, u, g, unknown, or other
  misc_difference 172: note = a, c, u, g, unknown, or other
  misc_difference 173: note = a, c, u, g, unknown, or other
  misc_difference 174: note = a, c, u, g, unknown, or other
  misc_difference 176: note = a, c, u, g, unknown, or other
  misc_difference 177: note = a, c, u, g, unknown, or other
rynnyggccngycrgncycggcatgryynnynccyccngtcrnynatgatcnrgrnrgtgntgtcaccgggynygrynggyrnynrgnratcgctratagrggcnngrcnnrrnnnnnnnrrrgycrnycgtaacgtggatgccgrnnyynryyrccnynnnnynrgccrnnnnynn

SEQ ID NO: 795413 - RNA, 180 nt, unidentified
  source 1..180: mol_type = unassigned RNA; note = ISMdi14B
  misc_difference 1: note = a, c, u, g, unknown, or other
  misc_difference 2: note = a, c, u, g, unknown, or other
  misc_difference 3: note = a, c, u, g, unknown, or other
  misc_difference 4: note = a, c, u, g, unknown, or other
  misc_difference 7: note = a, c, u, g, unknown, or other
  misc_difference 13: note = a, c, u, g, unknown, or other
  misc_difference 14: note = a, c, u, g, unknown, or other
  misc_difference 15: note = a, c, u, g, unknown, or other
  misc_difference 16: note = a, c, u, g, unknown, or other
  misc_difference 19: note = a, c, u, g, unknown, or other
  misc_difference 21: note = a, c, u, g, unknown, or other
  misc_difference 22: note = a, c, u, g, unknown, or other
  misc_difference 23: note = a, c, u, g, unknown, or other
  misc_difference 29: note = a, c, u, g, unknown, or other
  misc_difference 30: note = a, c, u, g, unknown, or other
  misc_difference 38: note = a, c, u, g, unknown, or other
  misc_difference 40: note = a, c, u, g, unknown, or other
  misc_difference 41: note = a, c, u, g, unknown, or other
  misc_difference 48: note = a, c, u, g, unknown, or other
  misc_difference 49: note = a, c, u, g, unknown, or other
  misc_difference 53: note = a, c, u, g, unknown, or other
  misc_difference 55: note = a, c, u, g, unknown, or other
  misc_difference 57: note = a, c, u, g, unknown, or other
  misc_difference 58: note = a, c, u, g, unknown, or other
  misc_difference 60: note = a, c, u, g, unknown, or other
  misc_difference 62: note = a, c, u, g, unknown, or other
  misc_difference 68: note = a, c, u, g, unknown, or other
  misc_difference 69: note = a, c, u, g, unknown, or other
  misc_difference 70: note = a, c, u, g, unknown, or other
  misc_difference 71: note = a, c, u, g, unknown, or other
  misc_difference 72: note = a, c, u, g, unknown, or other
  misc_difference 73: note = a, c, u, g, unknown, or other
  misc_difference 74: note = a, c, u, g, unknown, or other
  misc_difference 75: note = a, c, u, g, unknown, or other
  misc_difference 76: note = a, c, u, g, unknown, or other
  misc_difference 77: note = a, c, u, g, unknown, or other
  misc_difference 78: note = a, c, u, g, unknown, or other
  misc_difference 79: note = a, c, u, g, unknown, or other
  misc_difference 82: note = a, c, u, g, unknown, or other
  misc_difference 87: note = a, c, u, g, unknown, or other
  misc_difference 88: note = a, c, u, g, unknown, or other
  misc_difference 91: note = a, c, u, g, unknown, or other
  misc_difference 92: note = a, c, u, g, unknown, or other
  misc_difference 93: note = a, c, u, g, unknown, or other
  misc_difference 97: note = a, c, u, g, unknown, or other
  misc_difference 102: note = a, c, u, g, unknown, or other
  misc_difference 103: note = a, c, u, g, unknown, or other
  misc_difference 107: note = a, c, u, g, unknown, or other
  misc_difference 108: note = a, c, u, g, unknown, or other
  misc_difference 111: note = a, c, u, g, unknown, or other
  misc_difference 112: note = a, c, u, g, unknown, or other
  misc_difference 113: note = a, c, u, g, unknown, or other
  misc_difference 119: note = a, c, u, g, unknown, or other
  misc_difference 120: note = a, c, u, g, unknown, or other
  misc_difference 124: note = a, c, u, g, unknown, or other
  misc_difference 126: note = a, c, u, g, unknown, or other
  misc_difference 130: note = a, c, u, g, unknown, or other
  misc_difference 133: note = a, c, u, g, unknown, or other
  misc_difference 134: note = a, c, u, g, unknown, or other
  misc_difference 137: note = a, c, u, g, unknown, or other
  misc_difference 139: note = a, c, u, g, unknown, or other
  misc_difference 142: note = a, c, u, g, unknown, or other
  misc_difference 144: note = a, c, u, g, unknown, or other
  misc_difference 148: note = a, c, u, g, unknown, or other
  misc_difference 154: note = a, c, u, g, unknown, or other
  misc_difference 156: note = a, c, u, g, unknown, or other
  misc_difference 157: note = a, c, u, g, unknown, or other
  misc_difference 160: note = a, c, u, g, unknown, or other
  misc_difference 161: note = a, c, u, g, unknown, or other
  misc_difference 166: note = a, c, u, g, unknown, or other
  misc_difference 167: note = a, c, u, g, unknown, or other
  misc_difference 169: note = a, c, u, g, unknown, or other
  misc_difference 171: note = a, c, u, g, unknown, or other
  misc_difference 174: note = a, c, u, g, unknown, or other
  misc_difference 175: note = a, c, u, g, unknown, or other
  misc_difference 176: note = a, c, u, g, unknown, or other
  misc_difference 177: note = a, c, u, g, unknown, or other
  misc_difference 178: note = a, c, u, g, unknown, or other
  misc_difference 179: note = a, c, u, g, unknown, or other
  misc_difference 180: note = a, c, u, g, unknown, or other
nnnnagntcycrnnnngrnrnnnygyccnngggagggnrnngryraynncgynrnynnynyngcrrynnnnnnnnnnnnranygcgnnyynnnyyrnryygnnyyrnnyynnncyraynncatnrngygncrnngancncgnanagancryrrncnnccnnrgcrnnrnrnyrnnnnnnn

SEQ ID NO: 795414 - RNA, 169 nt, unidentified
  source 1..169: mol_type = unassigned RNA; note = ISHne4
  misc_difference 1: note = a, c, u, g, unknown, or other
  misc_difference 2: note = a, c, u, g, unknown, or other
  misc_difference 3: note = a, c, u, g, unknown, or other
  misc_difference 4: note = a, c, u, g, unknown, or other
  misc_difference 5: note = a, c, u, g, unknown, or other
  misc_difference 12: note = a, c, u, g, unknown, or other
  misc_difference 14: note = a, c, u, g, unknown, or other
  misc_difference 17: note = a, c, u, g, unknown, or other
  misc_difference 18: note = a, c, u, g, unknown, or other
  misc_difference 19: note = a, c, u, g, unknown, or other
  misc_difference 20: note = a, c, u, g, unknown, or other
  misc_difference 21: note = a, c, u, g, unknown, or other
  misc_difference 22: note = a, c, u, g, unknown, or other
  misc_difference 23: note = a, c, u, g, unknown, or other
  misc_difference 26: note = a, c, u, g, unknown, or other
  misc_difference 29: note = a, c, u, g, unknown, or other
  misc_difference 30: note = a, c, u, g, unknown, or other
  misc_difference 31: note = a, c, u, g, unknown, or other
  misc_difference 32: note = a, c, u, g, unknown, or other
  misc_difference 33: note = a, c, u, g, unknown, or other
  misc_difference 34: note = a, c, u, g, unknown, or other
  misc_difference 35: note = a, c, u, g, unknown, or other
  misc_difference 36: note = a, c, u, g, unknown, or other
  misc_difference 45: note = a, c, u, g, unknown, or other
  misc_difference 47: note = a, c, u, g, unknown, or other
  misc_difference 48: note = a, c, u, g, unknown, or other
  misc_difference 52: note = a, c, u, g, unknown, or other
  misc_difference 53: note = a, c, u, g, unknown, or other
  misc_difference 54: note = a, c, u, g, unknown, or other
  misc_difference 55: note = a, c, u, g, unknown, or other
  misc_difference 56: note = a, c, u, g, unknown, or other
  misc_difference 61: note = a, c, u, g, unknown, or other
  misc_difference 64: note = a, c, u, g, unknown, or other
  misc_difference 66: note = a, c, u, g, unknown, or other
  misc_difference 67: note = a, c, u, g, unknown, or other
  misc_difference 68: note = a, c, u, g, unknown, or other
  misc_difference 71: note = a, c, u, g, unknown, or other
  misc_difference 72: note = a, c, u, g, unknown, or other
  misc_difference 77: note = a, c, u, g, unknown, or other
  misc_difference 78: note = a, c, u, g, unknown, or other
  misc_difference 79: note = a, c, u, g, unknown, or other
  misc_difference 80: note = a, c, u, g, unknown, or other
  misc_difference 81: note = a, c, u, g, unknown, or other
  misc_difference 85: note = a, c, u, g, unknown, or other
  misc_difference 86: note = a, c, u, g, unknown, or other
  misc_difference 89: note = a, c, u, g, unknown, or other
  misc_difference 90: note = a, c, u, g, unknown, or other
  misc_difference 91: note = a, c, u, g, unknown, or other
  misc_difference 100: note = a, c, u, g, unknown, or other
  misc_difference 101: note = a, c, u, g, unknown, or other
  misc_difference 102: note = a, c, u, g, unknown, or other
  misc_difference 103: note = a, c, u, g, unknown, or other
  misc_difference 104: note = a, c, u, g, unknown, or other
  misc_difference 105: note = a, c, u, g, unknown, or other
  misc_difference 107: note = a, c, u, g, unknown, or other
  misc_difference 108: note = a, c, u, g, unknown, or other
  misc_difference 112: note = a, c, u, g, unknown, or other
  misc_difference 125: note = a, c, u, g, unknown, or other
  misc_difference 126: note = a, c, u, g, unknown, or other
  misc_difference 127: note = a, c, u, g, unknown, or other
  misc_difference 133: note = a, c, u, g, unknown, or other
  misc_difference 135: note = a, c, u, g, unknown, or other
  misc_difference 136: note = a, c, u, g, unknown, or other
  misc_difference 137: note = a, c, u, g, unknown, or other
  misc_difference 138: note = a, c, u, g, unknown, or other
  misc_difference 139: note = a, c, u, g, unknown, or other
  misc_difference 141: note = a, c, u, g, unknown, or other
  misc_difference 151: note = a, c, u, g, unknown, or other
  misc_difference 152: note = a, c, u, g, unknown, or other
  misc_difference 164: note = a, c, u, g, unknown, or other
  misc_difference 165: note = a, c, u, g, unknown, or other
  misc_difference 166: note = a, c, u, g, unknown, or other
  misc_difference 167: note = a, c, u, g, unknown, or other
  misc_difference 169: note = a, c, u, g, unknown, or other
nnnnnycytgtntnyynnnnnnnygnyrnnnnnnnngcggrcgrnannccgnnnnnyycynggnynnnrannccgynnnnnrgcnnggnnnycryccgcnnnnnnynnyyrnccygaacagttgnnngggryngnnnnnyngaycycgcannrcarggryrggnnnnrn

SEQ ID NO: 795415 - RNA, 223 nt, unidentified
  source 1..223: mol_type = unassigned RNA; note = ISAs16
  misc_difference 12: note = a, c, u, g, unknown, or other
  misc_difference 26: note = a, c, u, g, unknown, or other
  misc_difference 58: note = a, c, u, g, unknown, or other
  misc_difference 59: note = a, c, u, g, unknown, or other
  misc_difference 60: note = a, c, u, g, unknown, or other
  misc_difference 67: note = a, c, u, g, unknown, or other
  misc_difference 68: note = a, c, u, g, unknown, or other
  misc_difference 69: note = a, c, u, g, unknown, or other
  misc_difference 70: note = a, c, u, g, unknown, or other
  misc_difference 71: note = a, c, u, g, unknown, or other
  misc_difference 72: note = a, c, u, g, unknown, or other
  misc_difference 73: note = a, c, u, g, unknown, or other
  misc_difference 76: note = a, c, u, g, unknown, or other
  misc_difference 77: note = a, c, u, g, unknown, or other
  misc_difference 82: note = a, c, u, g, unknown, or other
  misc_difference 84: note = a, c, u, g, unknown, or other
  misc_difference 92: note = a, c, u, g, unknown, or other
  misc_difference 93: note = a, c, u, g, unknown, or other
  misc_difference 94: note = a, c, u, g, unknown, or other
  misc_difference 95: note = a, c, u, g, unknown, or other
  misc_difference 96: note = a, c, u, g, unknown, or other
  misc_difference 97: note = a, c, u, g, unknown, or other
  misc_difference 106: note = a, c, u, g, unknown, or other
  misc_difference 107: note = a, c, u, g, unknown, or other
  misc_difference 118: note = a, c, u, g, unknown, or other
  misc_difference 133: note = a, c, u, g, unknown, or other
  misc_difference 135: note = a, c, u, g, unknown, or other
  misc_difference 139: note = a, c, u, g, unknown, or other
  misc_difference 140: note = a, c, u, g, unknown, or other
  misc_difference 141: note = a, c, u, g, unknown, or other
  misc_difference 142: note = a, c, u, g, unknown, or other
  misc_difference 146: note = a, c, u, g, unknown, or other
  misc_difference 149: note = a, c, u, g, unknown, or other
  misc_difference 150: note = a, c, u, g, unknown, or other
  misc_difference 151: note = a, c, u, g, unknown, or other
  misc_difference 163: note = a, c, u, g, unknown, or other
  misc_difference 169: note = a, c, u, g, unknown, or other
  misc_difference 184: note = a, c, u, g, unknown, or other
  misc_difference 186: note = a, c, u, g, unknown, or other
  misc_difference 187: note = a, c, u, g, unknown, or other
  misc_difference 196: note = a, c, u, g, unknown, or other
  misc_difference 199: note = a, c, u, g, unknown, or other
  misc_difference 204: note = a, c, u, g, unknown, or other
  misc_difference 213: note = a, c, u, g, unknown, or other
  misc_difference 215: note = a, c, u, g, unknown, or other
  misc_difference 216: note = a, c, u, g, unknown, or other
  misc_difference 217: note = a, c, u, g, unknown, or other
ccaccgattgcncaggcratcatgangtgatggcraracaggtyagaccgtgryygrnnnarccygnnnnnnncrnngyrcnynragyrcgnnnnnnygatraggnnycrrycagcrnatyccatcagggacngnggcnnnngccncrnnnraagtccgratntayggntgcaatctyyacctnynnrycrtcaynrantgarngcttggcanannnggggcg

SEQ ID NO: 795416 - RNA, 207 nt, unidentified
  source 1..207: mol_type = unassigned RNA; note = ISAtu1
  misc_difference 1: note = a, c, u, g, unknown, or other
  misc_difference 2: note = a, c, u, g, unknown, or other
  misc_difference 5: note = a, c, u, g, unknown, or other
  misc_difference 13: note = a, c, u, g, unknown, or other
  misc_difference 15: note = a, c, u, g, unknown, or other
  misc_difference 16: note = a, c, u, g, unknown, or other
  misc_difference 17: note = a, c, u, g, unknown, or other
  misc_difference 18: note = a, c, u, g, unknown, or other
  misc_difference 19: note = a, c, u, g, unknown, or other
  misc_difference 20: note = a, c, u, g, unknown, or other
  misc_difference 21: note = a, c, u, g, unknown, or other
  misc_difference 22: note = a, c, u, g, unknown, or other
  misc_difference 31: note = a, c, u, g, unknown, or other
  misc_difference 34: note = a, c, u, g, unknown, or other
  misc_difference 35: note = a, c, u, g, unknown, or other
  misc_difference 39: note = a, c, u, g, unknown, or other
  misc_difference 43: note = a, c, u, g, unknown, or other
  misc_difference 45: note = a, c, u, g, unknown, or other
  misc_difference 48: note = a, c, u, g, unknown, or other
  misc_difference 49: note = a, c, u, g, unknown, or other
  misc_difference 51: note = a, c, u, g, unknown, or other
  misc_difference 53: note = a, c, u, g, unknown, or other
  misc_difference 54: note = a, c, u, g, unknown, or other
  misc_difference 62: note = a, c, u, g, unknown, or other
  misc_difference 63: note = a, c, u, g, unknown, or other
  misc_difference 64: note = a, c, u, g, unknown, or other
  misc_difference 65: note = a, c, u, g, unknown, or other
  misc_difference 66: note = a, c, u, g, unknown, or other
  misc_difference 67: note = a, c, u, g, unknown, or other
  misc_difference 68: note = a, c, u, g, unknown, or other
  misc_difference 69: note = a, c, u, g, unknown, or other
  misc_difference 70: note = a, c, u, g, unknown, or other
  misc_difference 71: note = a, c, u, g, unknown, or other
  misc_difference 72: note = a, c, u, g, unknown, or other
  misc_difference 77: note = a, c, u, g, unknown, or other
  misc_difference 78: note = a, c, u, g, unknown, or other
  misc_difference 79: note = a, c, u, g, unknown, or other
  misc_difference 87: note = a, c, u, g, unknown, or other
  misc_difference 88: note = a, c, u, g, unknown, or other
  misc_difference 89: note = a, c, u, g, unknown, or other
  misc_difference 90: note = a, c, u, g, unknown, or other
  misc_difference 91: note = a, c, u, g, unknown, or other
  misc_difference 92: note = a, c, u, g, unknown, or other
  misc_difference 94: note = a, c, u, g, unknown, or other
  misc_difference 97: note = a, c, u, g, unknown, or other
  misc_difference 101: note = a, c, u, g, unknown, or other
  misc_difference 102: note = a, c, u, g, unknown, or other
  misc_difference 107: note = a, c, u, g, unknown, or other
  misc_difference 109: note = a, c, u, g, unknown, or other
  misc_difference 128: note = a, c, u, g, unknown, or other
  misc_difference 131: note = a, c, u, g, unknown, or other
  misc_difference 133: note = a, c, u, g, unknown, or other
  misc_difference 134: note = a, c, u, g, unknown, or other
  misc_difference 135: note = a, c, u, g, unknown, or other
  misc_difference 136: note = a, c, u, g, unknown, or other
  misc_difference 137: note = a, c, u, g, unknown, or other
  misc_difference 138: note = a, c, u, g, unknown, or other
  misc_difference 139: note = a, c, u, g, unknown, or other
  misc_difference 140: note = a, c, u, g, unknown, or other
  misc_difference 144: note = a, c, u, g, unknown, or other
  misc_difference 145: note = a, c, u, g, unknown, or other
  misc_difference 146: note = a, c, u, g, unknown, or other
  misc_difference 147: note = a, c, u, g, unknown, or other
  misc_difference 148: note = a, c, u, g, unknown, or other
  misc_difference 149: note = a, c, u, g, unknown, or other
  misc_difference 160: note = a, c, u, g, unknown, or other
  misc_difference 163: note = a, c, u, g, unknown, or other
  misc_difference 164: note = a, c, u, g, unknown, or other
  misc_difference 165: note = a, c, u, g, unknown, or other
  misc_difference 166: note = a, c, u, g, unknown, or other
  misc_difference 170: note = a, c, u, g, unknown, or other
  misc_difference 173: note = a, c, u, g, unknown, or other
  misc_difference 174: note = a, c, u, g, unknown, or other
  misc_difference 175: note = a, c, u, g, unknown, or other
  misc_difference 178: note = a, c, u, g, unknown, or other
  misc_difference 179: note = a, c, u, g, unknown, or other
  misc_difference 180: note = a, c, u, g, unknown, or other
  misc_difference 181: note = a, c, u, g, unknown, or other
  misc_difference 183: note = a, c, u, g, unknown, or other
  misc_difference 186: note = a, c, u, g, unknown, or other
  misc_difference 187: note = a, c, u, g, unknown, or other
  misc_difference 188: note = a, c, u, g, unknown, or other
  misc_difference 189: note = a, c, u, g, unknown, or other
  misc_difference 190: note = a, c, u, g, unknown, or other
  misc_difference 191: note = a, c, u, g, unknown, or other
  misc_difference 192: note = a, c, u, g, unknown, or other
  misc_difference 194: note = a, c, u, g, unknown, or other
  misc_difference 195: note = a, c, u, g, unknown, or other
  misc_difference 202: note = a, c, u, g, unknown, or other
  misc_difference 203: note = a, c, u, g, unknown, or other
  misc_difference 204: note = a, c, u, g, unknown, or other
  misc_difference 205: note = a, c, u, g, unknown, or other
  misc_difference 207: note = a, c, u, g, unknown, or other
nnrrntgcrrrrnrnnnnnnnnygatgrcrnrannggynrrrncnrcnnynynnrarcctgnnnnnnnnnnnggcynnnrarrccgnnnnnntnatnaggnnrrrrnrngcrratyycatcrrggccngrnrnnnnnnnnyycnnnnnnargccgratanaynnnngcanyynnnyynnnnynrynnnnnnnynnctygcrnnnnrn

SEQ ID NO: 795417 - RNA, 269 nt, unidentified
  source 1..269: mol_type = unassigned RNA; note = ISPye47
  misc_difference 2: note = a, c, u, g, unknown, or other
  misc_difference 13: note = a, c, u, g, unknown, or other
  misc_difference 22: note = a, c, u, g, unknown, or other
  misc_difference 30: note = a, c, u, g, unknown, or other
  misc_difference 33: note = a, c, u, g, unknown, or other
  misc_difference 38: note = a, c, u, g, unknown, or other
  misc_difference 43: note = a, c, u, g, unknown, or other
  misc_difference 49: note = a, c, u, g, unknown, or other
  misc_difference 62: note = a, c, u, g, unknown, or other
  misc_difference 106: note = a, c, u, g, unknown, or other
  misc_difference 113: note = a, c, u, g, unknown, or other
  misc_difference 114: note = a, c, u, g, unknown, or other
  misc_difference 115: note = a, c, u, g, unknown, or other
  misc_difference 116: note = a, c, u, g, unknown, or other
  misc_difference 117: note = a, c, u, g, unknown, or other
  misc_difference 118: note = a, c, u, g, unknown, or other
  misc_difference 119: note = a, c, u, g, unknown, or other
  misc_difference 122: note = a, c, u, g, unknown, or other
  misc_difference 123: note = a, c, u, g, unknown, or other
  misc_difference 129: note = a, c, u, g, unknown, or other
  misc_difference 139: note = a, c, u, g, unknown, or other
  misc_difference 140: note = a, c, u, g, unknown, or other
  misc_difference 141: note = a, c, u, g, unknown, or other
  misc_difference 142: note = a, c, u, g, unknown, or other
  misc_difference 143: note = a, c, u, g, unknown, or other
  misc_difference 148: note = a, c, u, g, unknown, or other
  misc_difference 152: note = a, c, u, g, unknown, or other
  misc_difference 180: note = a, c, u, g, unknown, or other
  misc_difference 186: note = a, c, u, g, unknown, or other
  misc_difference 187: note = a, c, u, g, unknown, or other
  misc_difference 188: note = a, c, u, g, unknown, or other
  misc_difference 189: note = a, c, u, g, unknown, or other
  misc_difference 190: note = a, c, u, g, unknown, or other
  misc_difference 191: note = a, c, u, g, unknown, or other
  misc_difference 192: note = a, c, u, g, unknown, or other
  misc_difference 193: note = a, c, u, g, unknown, or other
  misc_difference 200: note = a, c, u, g, unknown, or other
  misc_difference 202: note = a, c, u, g, unknown, or other
  misc_difference 203: note = a, c, u, g, unknown, or other
  misc_difference 218: note = a, c, u, g, unknown, or other
  misc_difference 239: note = a, c, u, g, unknown, or other
  misc_difference 240: note = a, c, u, g, unknown, or other
  misc_difference 241: note = a, c, u, g, unknown, or other
  misc_difference 246: note = a, c, u, g, unknown, or other
  misc_difference 247: note = a, c, u, g, unknown, or other
  misc_difference 248: note = a, c, u, g, unknown, or other
  misc_difference 250: note = a, c, u, g, unknown, or other
  misc_difference 251: note = a, c, u, g, unknown, or other
  misc_difference 252: note = a, c, u, g, unknown, or other
  misc_difference 255: note = a, c, u, g, unknown, or other
  misc_difference 261: note = a, c, u, g, unknown, or other
  misc_difference 264: note = a, c, u, g, unknown, or other
  misc_difference 265: note = a, c, u, g, unknown, or other
  misc_difference 266: note = a, c, u, g, unknown, or other
  misc_difference 267: note = a, c, u, g, unknown, or other
ynrrgctccggyngyrgcrgcntragcyrnyrnrrycngaggnygtcrnrgrygyagrygrncgaaggarrgtatggcrcaacrgtcgrygagacgggrycggrrnarccagnnnnnnncrnngtgcynyragcrcgcnnnnntgatntggnyccgrtccgcgaactcccatacrggccngcrgcnnnnnnnngcygcanynnaggccggacagatgncagcayccgacyacgygcyrnnnyyyynnnrnnnyyncttgcnyynnnngg

SEQ ID NO: 795418 - RNA, 232 nt, unidentified
  source 1..232: mol_type = unassigned RNA; note = ISCARN91
  misc_difference 1: note = a, c, u, g, unknown, or other
  misc_difference 2: note = a, c, u, g, unknown, or other
  misc_difference 3: note = a, c, u, g, unknown, or other
  misc_difference 4: note = a, c, u, g, unknown, or other
  misc_difference 5: note = a, c, u, g, unknown, or other
  misc_difference 17: note = a, c, u, g, unknown, or other
  misc_difference 31: note = a, c, u, g, unknown, or other
  misc_difference 59: note = a, c, u, g, unknown, or other
  misc_difference 63: note = a, c, u, g, unknown, or other
  misc_difference 64: note = a, c, u, g, unknown, or other
  misc_difference 65: note = a, c, u, g, unknown, or other
  misc_difference 72: note = a, c, u, g, unknown, or other
  misc_difference 73: note = a, c, u, g, unknown, or other
  misc_difference 74: note = a, c, u, g, unknown, or other
  misc_difference 75: note = a, c, u, g, unknown, or other
  misc_difference 76: note = a, c, u, g, unknown, or other
  misc_difference 77: note = a, c, u, g, unknown, or other
  misc_difference 78: note = a, c, u, g, unknown, or other
  misc_difference 80: note = a, c, u, g, unknown, or other
  misc_difference 81: note = a, c, u, g, unknown, or other
  misc_difference 82: note = a, c, u, g, unknown, or other
  misc_difference 87: note = a, c, u, g, unknown, or other
  misc_difference 89: note = a, c, u, g, unknown, or other
  misc_difference 97: note = a, c, u, g, unknown, or other
  misc_difference 98: note = a, c, u, g, unknown, or other
  misc_difference 99: note = a, c, u, g, unknown, or other
  misc_difference 100: note = a, c, u, g, unknown, or other
  misc_difference 101: note = a, c, u, g, unknown, or other
  misc_difference 102: note = a, c, u, g, unknown, or other
  misc_difference 107: note = a, c, u, g, unknown, or other
  misc_difference 111: note = a, c, u, g, unknown, or other
  misc_difference 112: note = a, c, u, g, unknown, or other
  misc_difference 116: note = a, c, u, g, unknown, or other
  misc_difference 123: note = a, c, u, g, unknown, or other
  misc_difference 140: note = a, c, u, g, unknown, or other
  misc_difference 144: note = a, c, u, g, unknown, or other
  misc_difference 146: note = a, c, u, g, unknown, or other
  misc_difference 147: note = a, c, u, g, unknown, or other
  misc_difference 148: note = a, c, u, g, unknown, or other
  misc_difference 152: note = a, c, u, g, unknown, or other
  misc_difference 155: note = a, c, u, g, unknown, or other
  misc_difference 156: note = a, c, u, g, unknown, or other
  misc_difference 157: note = a, c, u, g, unknown, or other
  misc_difference 190: note = a, c, u, g, unknown, or other
  misc_difference 192: note = a, c, u, g, unknown, or other
  misc_difference 193: note = a, c, u, g, unknown, or other
  misc_difference 195: note = a, c, u, g, unknown, or other
  misc_difference 196: note = a, c, u, g, unknown, or other
  misc_difference 202: note = a, c, u, g, unknown, or other
  misc_difference 205: note = a, c, u, g, unknown, or other
  misc_difference 210: note = a, c, u, g, unknown, or other
  misc_difference 219: note = a, c, u, g, unknown, or other
  misc_difference 221: note = a, c, u, g, unknown, or other
  misc_difference 222: note = a, c, u, g, unknown, or other
  misc_difference 224: note = a, c, u, g, unknown, or other
  misc_difference 230: note = a, c, u, g, unknown, or other
nnnnnccaccgattgcncaggcratcayganrtgatggcraracaggtyagaccgtgrnyrrnnnarccygnnnnnnncnnngyrcnynragyrcgnnnnnnygrtnrgrnnyyrnycagcrnattccatcagggacrgngrcnrnnngyyncannnraagtccggatrtayggctgcaatctyyacctnynnrnnrtcaynrantgarngcttggcanannrngggcgncc

SEQ ID NO: 795419 - RNA, 220 nt, unidentified
  source 1..220: mol_type = unassigned RNA; note = ISShes7
  misc_difference 1: note = a, c, u, g, unknown, or other
  misc_difference 2: note = a, c, u, g, unknown, or other
  misc_difference 5: note = a, c, u, g, unknown, or other
  misc_difference 8: note = a, c, u, g, unknown, or other
  misc_difference 9: note = a, c, u, g, unknown, or other
  misc_difference 10: note = a, c, u, g, unknown, or other
  misc_difference 13: note = a, c, u, g, unknown, or other
  misc_difference 18: note = a, c, u, g, unknown, or other
  misc_difference 19: note = a, c, u, g, unknown, or other
  misc_difference 22: note = a, c, u, g, unknown, or other
  misc_difference 23: note = a, c, u, g, unknown, or other
  misc_difference 24: note = a, c, u, g, unknown, or other
  misc_difference 25: note = a, c, u, g, unknown, or other
  misc_difference 26: note = a, c, u, g, unknown, or other
  misc_difference 27: note = a, c, u, g, unknown, or other
  misc_difference 28: note = a, c, u, g, unknown, or other
  misc_difference 29: note = a, c, u, g, unknown, or other
  misc_difference 35: note = a, c, u, g, unknown, or other
  misc_difference 36: note = a, c, u, g, unknown, or other
  misc_difference 37: note = a, c, u, g, unknown, or other
  misc_difference 54: note = a, c, u, g, unknown, or other
  misc_difference 58: note = a, c, u, g, unknown, or other
  misc_difference 59: note = a, c, u, g, unknown, or other
  misc_difference 63: note = a, c, u, g, unknown, or other
  misc_difference 64: note = a, c, u, g, unknown, or other
  misc_difference 69: note = a, c, u, g, unknown, or other
  misc_difference 70: note = a, c, u, g, unknown, or other
  misc_difference 71: note = a, c, u, g, unknown, or other
  misc_difference 72: note = a, c, u, g, unknown, or other
  misc_difference 73: note = a, c, u, g, unknown, or other
  misc_difference 74: note = a, c, u, g, unknown, or other
  misc_difference 77: note = a, c, u, g, unknown, or other
  misc_difference 78: note = a, c, u, g, unknown, or other
  misc_difference 81: note = a, c, u, g, unknown, or other
  misc_difference 82: note = a, c, u, g, unknown, or other
  misc_difference 83: note = a, c, u, g, unknown, or other
  misc_difference 84: note = a, c, u, g, unknown, or other
  misc_difference 85: note = a, c, u, g, unknown, or other
  misc_difference 86: note = a, c, u, g, unknown, or other
  misc_difference 87: note = a, c, u, g, unknown, or other
  misc_difference 89: note = a, c, u, g, unknown, or other
  misc_difference 90: note = a, c, u, g, unknown, or other
  misc_difference 94: note = a, c, u, g, unknown, or other
  misc_difference 95: note = a, c, u, g, unknown, or other
  misc_difference 96: note = a, c, u, g, unknown, or other
  misc_difference 99: note = a, c, u, g, unknown, or other
  misc_difference 104: note = a, c, u, g, unknown, or other
  misc_difference 107: note = a, c, u, g, unknown, or other
  misc_difference 108: note = a, c, u, g, unknown, or other
  misc_difference 110: note = a, c, u, g, unknown, or other
  misc_difference 114: note = a, c, u, g, unknown, or other
  misc_difference 121: note = a, c, u, g, unknown, or other
  misc_difference 135: note = a, c, u, g, unknown, or other
  misc_difference 139: note = a, c, u, g, unknown, or other
  misc_difference 140: note = a, c, u, g, unknown, or other
  misc_difference 141: note = a, c, u, g, unknown, or other
  misc_difference 142: note = a, c, u, g, unknown, or other
  misc_difference 143: note = a, c, u, g, unknown, or other
  misc_difference 144: note = a, c, u, g, unknown, or other
  misc_difference 145: note = a, c, u, g, unknown, or other
  misc_difference 146: note = a, c, u, g, unknown, or other
  misc_difference 147: note = a, c, u, g, unknown, or other
  misc_difference 148: note = a, c, u, g, unknown, or other
  misc_difference 149: note = a, c, u, g, unknown, or other
  misc_difference 154: note = a, c, u, g, unknown, or other
  misc_difference 155: note = a, c, u, g, unknown, or other
  misc_difference 156: note = a, c, u, g, unknown, or other
  misc_difference 157: note = a, c, u, g, unknown, or other
  misc_difference 159: note = a, c, u, g, unknown, or other
  misc_difference 174: note = a, c, u, g, unknown, or other
  misc_difference 175: note = a, c, u, g, unknown, or other
  misc_difference 176: note = a, c, u, g, unknown, or other
  misc_difference 183: note = a, c, u, g, unknown, or other
  misc_difference 184: note = a, c, u, g, unknown, or other
  misc_difference 188: note = a, c, u, g, unknown, or other
  misc_difference 189: note = a, c, u, g, unknown, or other
  misc_difference 191: note = a, c, u, g, unknown, or other
  misc_difference 192: note = a, c, u, g, unknown, or other
  misc_difference 196: note = a, c, u, g, unknown, or other
  misc_difference 197: note = a, c, u, g, unknown, or other
  misc_difference 198: note = a, c, u, g, unknown, or other
  misc_difference 200: note = a, c, u, g, unknown, or other
  misc_difference 201: note = a, c, u, g, unknown, or other
  misc_difference 202: note = a, c, u, g, unknown, or other
  misc_difference 203: note = a, c, u, g, unknown, or other
  misc_difference 204: note = a, c, u, g, unknown, or other
  misc_difference 205: note = a, c, u, g, unknown, or other
  misc_difference 206: note = a, c, u, g, unknown, or other
  misc_difference 207: note = a, c, u, g, unknown, or other
  misc_difference 208: note = a, c, u, g, unknown, or other
  misc_difference 213: note = a, c, u, g, unknown, or other
  misc_difference 215: note = a, c, u, g, unknown, or other
  misc_difference 216: note = a, c, u, g, unknown, or other
  misc_difference 217: note = a, c, u, g, unknown, or other
  misc_difference 218: note = a, c, u, g, unknown, or other
  misc_difference 219: note = a, c, u, g, unknown, or other
nnyynyynnnrrntgcrnnrrnnnnnnnnratgrnnnrayrggtyrraccgrcnyyynnrrannctgrnnnnnncrnnggnnnnnnnannycgnnnrrnygatnagnnrnrrrngygcrrntyycatyrrggccngrrnnnnnnnnnnnyycrnnnnanaggccgratataygnnngcaryynnryynnynnyyrnnnrnnnnnnnnnyttgnrnnnnnr

SEQ ID NO: 795420 - RNA, 229 nt, unidentified
  source 1..229: mol_type = unassigned RNA; note = ISSod19
  misc_difference 4: note = a, c, u, g, unknown, or other
  misc_difference 7: note = a, c, u, g, unknown, or other
  misc_difference 8: note = a, c, u, g, unknown, or other
  misc_difference 9: note = a, c, u, g, unknown, or other
  misc_difference 10: note = a, c, u, g, unknown, or other
  misc_difference 17: note = a, c, u, g, unknown, or other
  misc_difference 21: note = a, c, u, g, unknown, or other
  misc_difference 22: note = a, c, u, g, unknown, or other
  misc_difference 24: note = a, c, u, g, unknown, or other
  misc_difference 25: note = a, c, u, g, unknown, or other
  misc_difference 27: note = a, c, u, g, unknown, or other
  misc_difference 28: note = a, c, u, g, unknown, or other
  misc_difference 29: note = a, c, u, g, unknown, or other
  misc_difference 30: note = a, c, u, g, unknown, or other
  misc_difference 31: note = a, c, u, g, unknown, or other
  misc_difference 39: note = a, c, u, g, unknown, or other
  misc_difference 43: note = a, c, u, g, unknown, or other
  misc_difference 47: note = a, c, u, g, unknown, or other
  misc_difference 56: note = a, c, u, g, unknown, or other
  misc_difference 58: note = a, c, u, g, unknown, or other
  misc_difference 61: note = a, c, u, g, unknown, or other
  misc_difference 70: note = a, c, u, g, unknown, or other
  misc_difference 71: note = a, c, u, g, unknown, or other
  misc_difference 72: note = a, c, u, g, unknown, or other
  misc_difference 73: note = a, c, u, g, unknown, or other
  misc_difference 74: note = a, c, u, g, unknown, or other
  misc_difference 75: note = a, c, u, g, unknown, or other
  misc_difference 76: note = a, c, u, g, unknown, or other
  misc_difference 77: note = a, c, u, g, unknown, or other
  misc_difference 78: note = a, c, u, g, unknown, or other
  misc_difference 79: note = a, c, u, g, unknown, or other
  misc_difference 80: note = a, c, u, g, unknown, or other
  misc_difference 85: note = a, c, u, g, unknown, or other
  misc_difference 86: note = a, c, u, g, unknown, or other
  misc_difference 87: note = a, c, u, g, unknown, or other
  misc_difference 88: note = a, c, u, g, unknown, or other
  misc_difference 96: note = a, c, u, g, unknown, or other
  misc_difference 97: note = a, c, u, g, unknown, or other
  misc_difference 99: note = a, c, u, g, unknown, or other
  misc_difference 100: note = a, c, u, g, unknown, or other
  misc_difference 101: note = a, c, u, g, unknown, or other
  misc_difference 106: note = a, c, u, g, unknown, or other
  misc_difference 111: note = a, c, u, g, unknown, or other
  misc_difference 114: note = a, c, u, g, unknown, or other
  misc_difference 116: note = a, c, u, g, unknown, or other
  misc_difference 137: note = a, c, u, g, unknown, or other
  misc_difference 142: note = a, c, u, g, unknown, or other
  misc_difference 143: note = a, c, u, g, unknown, or other
  misc_difference 144: note = a, c, u, g, unknown, or other
  misc_difference 145: note = a, c, u, g, unknown, or other
  misc_difference 147: note = a, c, u, g, unknown, or other
  misc_difference 148: note = a, c, u, g, unknown, or other
  misc_difference 149: note = a, c, u, g, unknown, or other
  misc_difference 150: note = a, c, u, g, unknown, or other
  misc_difference 156: note = a, c, u, g, unknown, or other
  misc_difference 157: note = a, c, u, g, unknown, or other
  misc_difference 158: note = a, c, u, g, unknown, or other
  misc_difference 160: note = a, c, u, g, unknown, or other
  misc_difference 175: note = a, c, u, g, unknown, or other
  misc_difference 176: note = a, c, u, g, unknown, or other
  misc_difference 177: note = a, c, u, g, unknown, or other
  misc_difference 181: note = a, c, u, g, unknown, or other
  misc_difference 183: note = a, c, u, g, unknown, or other
  misc_difference 184: note = a, c, u, g, unknown, or other
  misc_difference 185: note = a, c, u, g, unknown, or other
  misc_difference 186: note = a, c, u, g, unknown, or other
  misc_difference 187: note = a, c, u, g, unknown, or other
  misc_difference 188: note = a, c, u, g, unknown, or other
  misc_difference 191: note = a, c, u, g, unknown, or other
  misc_difference 193: note = a, c, u, g, unknown, or other
  misc_difference 194: note = a, c, u, g, unknown, or other
  misc_difference 195: note = a, c, u, g, unknown, or other
  misc_difference 196: note = a, c, u, g, unknown, or other
  misc_difference 197: note = a, c, u, g, unknown, or other
  misc_difference 198: note = a, c, u, g, unknown, or other
  misc_difference 199: note = a, c, u, g, unknown, or other
  misc_difference 200: note = a, c, u, g, unknown, or other
  misc_difference 201: note = a, c, u, g, unknown, or other
  misc_difference 202: note = a, c, u, g, unknown, or other
  misc_difference 203: note = a, c, u, g, unknown, or other
  misc_difference 204: note = a, c, u, g, unknown, or other
  misc_difference 205: note = a, c, u, g, unknown, or other
  misc_difference 212: note = a, c, u, g, unknown, or other
  misc_difference 213: note = a, c, u, g, unknown, or other
  misc_difference 214: note = a, c, u, g, unknown, or other
  misc_difference 215: note = a, c, u, g, unknown, or other
  misc_difference 216: note = a, c, u, g, unknown, or other
  misc_difference 217: note = a, c, u, g, unknown, or other
  misc_difference 219: note = a, c, u, g, unknown, or other
  misc_difference 220: note = a, c, u, g, unknown, or other
  misc_difference 221: note = a, c, u, g, unknown, or other
  misc_difference 222: note = a, c, u, g, unknown, or other
  misc_difference 223: note = a, c, u, g, unknown, or other
  misc_difference 224: note = a, c, u, g, unknown, or other
  misc_difference 226: note = a, c, u, g, unknown, or other
  misc_difference 227: note = a, c, u, g, unknown, or other
  misc_difference 228: note = a, c, u, g, unknown, or other
  misc_difference 229: note = a, c, u, g, unknown, or other
yyynyynnnnrttgcrnrgrnnrnnynnnnngatgryrnraynggtnagaccgrcnynyynararcctgnnnnnnnnnnnggcynnnnrargccgnnrnnntgatnagganrrnrngygcrrayyycatcrrggcyngrrrnnnnrnnnnyyycannnanargccgratatatgnnngcanynnnnnnyynynnnnnnnnnnnnnyyttgynnnnnnrnnnnnnynnnn

SEQ ID NO: 795421 - RNA, 203 nt, unidentified
  source 1..203: mol_type = unassigned RNA; note = ISSde11
  misc_difference 1: note = a, c, u, g, unknown, or other
  misc_difference 5: note = a, c, u, g, unknown, or other
  misc_difference 7: note = a, c, u, g, unknown, or other
  misc_difference 10: note = a, c, u, g, unknown, or other
  misc_difference 12: note = a, c, u, g, unknown, or other
  misc_difference 15: note = a, c, u, g, unknown, or other
  misc_difference 16: note = a, c, u, g, unknown, or other
  misc_difference 17: note = a, c, u, g, unknown, or other
  misc_difference 18: note = a, c, u, g, unknown, or other
  misc_difference 19: note = a, c, u, g, unknown, or other
  misc_difference 20: note = a, c, u, g, unknown, or other
  misc_difference 21: note = a, c, u, g, unknown, or other
  misc_difference 28: note = a, c, u, g, unknown, or other
  misc_difference 29: note = a, c, u, g, unknown, or other
  misc_difference 30: note = a, c, u, g, unknown, or other
  misc_difference 33: note = a, c, u, g, unknown, or other
  misc_difference 38: note = a, c, u, g, unknown, or other
  misc_difference 39: note = a, c, u, g, unknown, or other
  misc_difference 40: note = a, c, u, g, unknown, or other
  misc_difference 43: note = a, c, u, g, unknown, or other
  misc_difference 44: note = a, c, u, g, unknown, or other
  misc_difference 46: note = a, c, u, g, unknown, or other
  misc_difference 48: note = a, c, u, g, unknown, or other
  misc_difference 49: note = a, c, u, g, unknown, or other
  misc_difference 50: note = a, c, u, g, unknown, or other
  misc_difference 51: note = a, c, u, g, unknown, or other
  misc_difference 52: note = a, c, u, g, unknown, or other
  misc_difference 60: note = a, c, u, g, unknown, or other
  misc_difference 61: note = a, c, u, g, unknown, or other
  misc_difference 62: note = a, c, u, g, unknown, or other
  misc_difference 63: note = a, c, u, g, unknown, or other
  misc_difference 64: note = a, c, u, g, unknown, or other
  misc_difference 66: note = a, c, u, g, unknown, or other
  misc_difference 69: note = a, c, u, g, unknown, or other
  misc_difference 72: note = a, c, u, g, unknown, or other
  misc_difference 74: note = a, c, u, g, unknown, or other
  misc_difference 76: note = a, c, u, g, unknown, or other
  misc_difference 80: note = a, c, u, g, unknown, or other
  misc_difference 84: note = a, c, u, g, unknown, or other
  misc_difference 85: note = a, c, u, g, unknown, or other
  misc_difference 86: note = a, c, u, g, unknown, or other
  misc_difference 87: note = a, c, u, g, unknown, or other
  misc_difference 88: note = a, c, u, g, unknown, or other
  misc_difference 89: note = a, c, u, g, unknown, or other
  misc_difference 92: note = a, c, u, g, unknown, or other
  misc_difference 94: note = a, c, u, g, unknown, or other
  misc_difference 95: note = a, c, u, g, unknown, or other
  misc_difference 99: note = a, c, u, g, unknown, or other
  misc_difference 100: note = a, c, u, g, unknown, or other
  misc_difference 101: note = a, c, u, g, unknown, or other
  misc_difference 102: note = a, c, u, g, unknown, or other
  misc_difference 103: note = a, c, u, g, unknown, or other
  misc_difference 105: note = a, c, u, g, unknown, or other
  misc_difference 124: note = a, c, u, g, unknown, or other
  misc_difference 126: note = a, c, u, g, unknown, or other
  misc_difference 130: note = a, c, u, g, unknown, or other
  misc_difference 131: note = a, c, u, g, unknown, or other
  misc_difference 132: note = a, c, u, g, unknown, or other
  misc_difference 133: note = a, c, u, g, unknown, or other
  misc_difference 134: note = a, c, u, g, unknown, or other
  misc_difference 135: note = a, c, u, g, unknown, or other
  misc_difference 136: note = a, c, u, g, unknown, or other
  misc_difference 137: note = a, c, u, g, unknown, or other
  misc_difference 138: note = a, c, u, g, unknown, or other
  misc_difference 139: note = a, c, u, g, unknown, or other
  misc_difference 140: note = a, c, u, g, unknown, or other
  misc_difference 142: note = a, c, u, g, unknown, or other
  misc_difference 144: note = a, c, u, g, unknown, or other
  misc_difference 145: note = a, c, u, g, unknown, or other
  misc_difference 146: note = a, c, u, g, unknown, or other
  misc_difference 147: note = a, c, u, g, unknown, or other
  misc_difference 148: note = a, c, u, g, unknown, or other
  misc_difference 151: note = a, c, u, g, unknown, or other
  misc_difference 163: note = a, c, u, g, unknown, or other
  misc_difference 165: note = a, c, u, g, unknown, or other
  misc_difference 169: note = a, c, u, g, unknown, or other
  misc_difference 170: note = a, c, u, g, unknown, or other
  misc_difference 174: note = a, c, u, g, unknown, or other
  misc_difference 178: note = a, c, u, g, unknown, or other
  misc_difference 180: note = a, c, u, g, unknown, or other
  misc_difference 186: note = a, c, u, g, unknown, or other
  misc_difference 187: note = a, c, u, g, unknown, or other
  misc_difference 188: note = a, c, u, g, unknown, or other
  misc_difference 189: note = a, c, u, g, unknown, or other
  misc_difference 191: note = a, c, u, g, unknown, or other
  misc_difference 192: note = a, c, u, g, unknown, or other
  misc_difference 193: note = a, c, u, g, unknown, or other
  misc_difference 196: note = a, c, u, g, unknown, or other
  misc_difference 198: note = a, c, u, g, unknown, or other
  misc_difference 199: note = a, c, u, g, unknown, or other
  misc_difference 201: note = a, c, u, g, unknown, or other
  misc_difference 202: note = a, c, u, g, unknown, or other
nyyanyngynrnyrnnnnnnnygatgrnnnarnggyynnnccnnynynnnnnrarccygnnnnnrncrngrnynynrarnycgnnnnnntgntnnrggnnnnnrnryrcgrayyycatyarggnynrrrnnnnnnnnnnnynynnnnnarnccgratatatgnyngyannryynyyynynyyryynnnnrnnnyynrnnrnnr

SEQ ID NO: 795422 - RNA, 286 nt, unidentified
  source 1..286: mol_type = unassigned RNA; note = ISBli24
  misc_difference 1: note = a, c, u, g, unknown, or other
  misc_difference 3: note = a, c, u, g, unknown, or other
  misc_difference 4: note = a, c, u, g, unknown, or other
  misc_difference 5: note = a, c, u, g, unknown, or other
  misc_difference 6: note = a, c, u, g, unknown, or other
  misc_difference 7: note = a, c, u, g, unknown, or other
  misc_difference 35: note = a, c, u, g, unknown, or other
  misc_difference 36: note = a, c, u, g, unknown, or other
  misc_difference 49: note = a, c, u, g, unknown, or other
  misc_difference 53: note = a, c, u, g, unknown, or other
  misc_difference 56: note = a, c, u, g, unknown, or other
  misc_difference 59: note = a, c, u, g, unknown, or other
  misc_difference 68: note = a, c, u, g, unknown, or other
  misc_difference 69: note = a, c, u, g, unknown, or other
  misc_difference 70: note = a, c, u, g, unknown, or other
  misc_difference 71: note = a, c, u, g, unknown, or other
  misc_difference 72: note = a, c, u, g, unknown, or other
  misc_difference 73: note = a, c, u, g, unknown, or other
  misc_difference 74: note = a, c, u, g, unknown, or other
  misc_difference 75: note = a, c, u, g, unknown, or other
  misc_difference 76: note = a, c, u, g, unknown, or other
  misc_difference 84: note = a, c, u, g, unknown, or other
  misc_difference 85: note = a, c, u, g, unknown, or other
  misc_difference 86: note = a, c, u, g, unknown, or other
  misc_difference 87: note = a, c, u, g, unknown, or other
  misc_difference 88: note = a, c, u, g, unknown, or other
  misc_difference 89: note = a, c, u, g, unknown, or other
  misc_difference 90: note = a, c, u, g, unknown, or other
  misc_difference 99: note = a, c, u, g, unknown, or other
  misc_difference 100: note = a, c, u, g, unknown, or other
  misc_difference 101: note = a, c, u, g, unknown, or other
  misc_difference 102: note = a, c, u, g, unknown, or other
  misc_difference 103: note = a, c, u, g, unknown, or other
  misc_difference 104: note = a, c, u, g, unknown, or other
  misc_difference 107: note = a, c, u, g, unknown, or other
  misc_difference 115: note = a, c, u, g, unknown, or other
  misc_difference 118: note = a, c, u, g, unknown, or other
  misc_difference 119: note = a, c, u, g, unknown, or other
  misc_difference 122: note = a, c, u, g, unknown, or other
  misc_difference 123: note = a, c, u, g, unknown, or other
  misc_difference 138: note = a, c, u, g, unknown, or other
  misc_difference 139: note = a, c, u, g, unknown, or other
  misc_difference 178: note = a, c, u, g, unknown, or other
  misc_difference 182: note = a, c, u, g, unknown, or other
  misc_difference 183: note = a, c, u, g, unknown, or other
  misc_difference 184: note = a, c, u, g, unknown, or other
  misc_difference 185: note = a, c, u, g, unknown, or other
  misc_difference 186: note = a, c, u, g, unknown, or other
  misc_difference 190: note = a, c, u, g, unknown, or other
  misc_difference 206: note = a, c, u, g, unknown, or other
  misc_difference 207: note = a, c, u, g, unknown, or other
  misc_difference 227: note = a, c, u, g, unknown, or other
  misc_difference 247: note = a, c, u, g, unknown, or other
  misc_difference 249: note = a, c, u, g, unknown, or other
  misc_difference 258: note = a, c, u, g, unknown, or other
  misc_difference 261: note = a, c, u, g, unknown, or other
  misc_difference 268: note = a, c, u, g, unknown, or other
  misc_difference 269: note = a, c, u, g, unknown, or other
  misc_difference 270: note = a, c, u, g, unknown, or other
  misc_difference 271: note = a, c, u, g, unknown, or other
  misc_difference 279: note = a, c, u, g, unknown, or other
  misc_difference 280: note = a, c, u, g, unknown, or other
  misc_difference 281: note = a, c, u, g, unknown, or other
  misc_difference 282: note = a, c, u, g, unknown, or other
  misc_difference 283: note = a, c, u, g, unknown, or other
ntnnnnnyrgctggtcygggacyggctggcrrrrnnggyryyggycgynyyrnyynrrnygtgactcnnnnnnnnnytgrccynnnnnnnggtgycytnnnnnnganytgtccrnyynnrrnngrryggccgryrccnnycyggcccacyycggtgrcytgatyagaagrytgyccrnccynnnnnrggnygtgrcycrtcacagnnytgyyccgrrgtgayyycyncccrgrcyggyrccggccgnynrcggccrrnycnyrycyrnnnnrgraaggnnnnnyrr

SEQ ID NO: 795423 - RNA, 229 nt, unidentified
  source 1..229: mol_type = unassigned RNA; note = IS110
  misc_difference 3: note = a, c, u, g, unknown, or other
  misc_difference 4: note = a, c, u, g, unknown, or other
  misc_difference 5: note = a, c, u, g, unknown, or other
  misc_difference 11: note = a, c, u, g, unknown, or other
  misc_difference 13: note = a, c, u, g, unknown, or other
  misc_difference 15: note = a, c, u, g, unknown, or other
  misc_difference 16: note = a, c, u, g, unknown, or other
  misc_difference 17: note = a, c, u, g, unknown, or other
  misc_difference 18: note = a, c, u, g, unknown, or other
  misc_difference 19: note = a, c, u, g, unknown, or other
  misc_difference 20: note = a, c, u, g, unknown, or other
  misc_difference 21: note = a, c, u, g, unknown, or other
  misc_difference 22: note = a, c, u, g, unknown, or other
  misc_difference 23: note = a, c, u, g, unknown, or other
  misc_difference 24: note = a, c, u, g, unknown, or other
  misc_difference 25: note = a, c, u, g, unknown, or other
  misc_difference 26: note = a, c, u, g, unknown, or other
  misc_difference 27: note = a, c, u, g, unknown, or other
  misc_difference 28: note = a, c, u, g, unknown, or other
  misc_difference 30: note = a, c, u, g, unknown, or other
  misc_difference 33: note = a, c, u, g, unknown, or other
  misc_difference 37: note = a, c, u, g, unknown, or other
  misc_difference 38: note = a, c, u, g, unknown, or other
  misc_difference 39: note = a, c, u, g, unknown, or other
  misc_difference 44: note = a, c, u, g, unknown, or other
  misc_difference 45: note = a, c, u, g, unknown, or other
  misc_difference 49: note = a, c, u, g, unknown, or other
  misc_difference 51: note = a, c, u, g, unknown, or other
  misc_difference 52: note = a, c, u, g, unknown, or other
  misc_difference 53: note = a, c, u, g, unknown, or other
  misc_difference 56: note = a, c, u, g, unknown, or other
  misc_difference 58: note = a, c, u, g, unknown, or other
  misc_difference 62: note = a, c, u, g, unknown, or other
  misc_difference 64: note = a, c, u, g, unknown, or other
  misc_difference 65: note = a, c, u, g, unknown, or other
  misc_difference 66: note = a, c, u, g, unknown, or other
  misc_difference 67: note = a, c, u, g, unknown, or other
  misc_difference 68: note = a, c, u, g, unknown, or other
  misc_difference 70: note = a, c, u, g, unknown, or other
  misc_difference 74: note = a, c, u, g, unknown, or other
  misc_difference 76: note = a, c, u, g, unknown, or other
  misc_difference 77: note = a, c, u, g, unknown, or other
  misc_difference 83: note = a, c, u, g, unknown, or other
  misc_difference 84: note = a, c, u, g, unknown, or other
  misc_difference 85: note = a, c, u, g, unknown, or other
  misc_difference 90: note = a, c, u, g, unknown, or other
  misc_difference 91: note = a, c, u, g, unknown, or other
  misc_difference 92: note = a, c, u, g, unknown, or other
  misc_difference 94: note = a, c, u, g, unknown, or other
  misc_difference 98: note = a, c, u, g, unknown, or other
  misc_difference 99: note = a, c, u, g, unknown, or other
  misc_difference 100: note = a, c, u, g, unknown, or other
  misc_difference 101: note = a, c, u, g, unknown, or other
  misc_difference 109: note = a, c, u, g, unknown, or other
  misc_difference 113: note = a, c, u, g, unknown, or other
  misc_difference 114: note = a, c, u, g, unknown, or other
  misc_difference 115: note = a, c, u, g, unknown, or other
  misc_difference 117: note = a, c, u, g, unknown, or other
  misc_difference 123: note = a, c, u, g, unknown, or other
  misc_difference 130: note = a, c, u, g, unknown, or other
  misc_difference 134: note = a, c, u, g, unknown, or other
  misc_difference 138: note = a, c, u, g, unknown, or other
  misc_difference 142: note = a, c, u, g, unknown, or other
  misc_difference 143: note = a, c, u, g, unknown, or other
  misc_difference 147: note = a, c, u, g, unknown, or other
  misc_difference 151: note = a, c, u, g, unknown, or other
  misc_difference 152: note = a, c, u, g, unknown, or other
  misc_difference 153: note = a, c, u, g, unknown, or other
  misc_difference 159: note = a, c, u, g, unknown, or other
  misc_difference 160: note = a, c, u, g, unknown, or other
  misc_difference 162: note = a, c, u, g, unknown, or other
  misc_difference 163: note = a, c, u, g, unknown, or other
  misc_difference 164: note = a, c, u, g, unknown, or other
  misc_difference 165: note = a, c, u, g, unknown, or other
  misc_difference 166: note = a, c, u, g, unknown, or other
  misc_difference 167: note = a, c, u, g, unknown, or other
  misc_difference 168: note = a, c, u, g, unknown, or other
  misc_difference 169: note = a, c, u, g, unknown, or other
  misc_difference 171: note = a, c, u, g, unknown, or other
  misc_difference 172: note = a, c, u, g, unknown, or other
  misc_difference 177: note = a, c, u, g, unknown, or other
  misc_difference 183: note = a, c, u, g, unknown, or other
  misc_difference 190: note = a, c, u, g, unknown, or other
  misc_difference 193: note = a, c, u, g, unknown, or other
  misc_difference 199: note = a, c, u, g, unknown, or other
  misc_difference 202: note = a, c, u, g, unknown, or other
  misc_difference 203: note = a, c, u, g, unknown, or other
  misc_difference 204: note = a, c, u, g, unknown, or other
  misc_difference 209: note = a, c, u, g, unknown, or other
  misc_difference 211: note = a, c, u, g, unknown, or other
  misc_difference 212: note = a, c, u, g, unknown, or other
  misc_difference 213: note = a, c, u, g, unknown, or other
  misc_difference 214: note = a, c, u, g, unknown, or other
  misc_difference 215: note = a, c, u, g, unknown, or other
  misc_difference 218: note = a, c, u, g, unknown, or other
  misc_difference 226: note = a, c, u, g, unknown, or other
  misc_difference 229: note = a, c, u, g, unknown, or other
yynnnrygrynyngnnnnnnnnnnnnnngncynyggnnncgrynngrcnrnnnccnynygynrnnnnnrngrcnynngrrgynnngycrnnnrnycynnnngryrycgnyrrnnncncygrynrgrggynygrnyrcngycnnrycnrrynnnryrccnnrnnnnnnnnrnnygrcnggtctncrtarcntgnayrcgngynnncgrynynnnnnyynrggccrgnryn

SEQ ID NO: 795424 - RNA, 212 nt, unidentified
  source 1..212: mol_type = unassigned RNA; note = ISMno25
  misc_difference 1: note = a, c, u, g, unknown, or other
  misc_difference 2: note = a, c, u, g, unknown, or other
  misc_difference 3: note = a, c, u, g, unknown, or other
  misc_difference 5: note = a, c, u, g, unknown, or other
  misc_difference 6: note = a, c, u, g, unknown, or other
  misc_difference 7: note = a, c, u, g, unknown, or other
  misc_difference 8: note = a, c, u, g, unknown, or other
  misc_difference 9: note = a, c, u, g, unknown, or other
  misc_difference 10: note = a, c, u, g, unknown, or other
  misc_difference 12: note = a, c, u, g, unknown, or other
  misc_difference 13: note = a, c, u, g, unknown, or other
  misc_difference 17: note = a, c, u, g, unknown, or other
  misc_difference 18: note = a, c, u, g, unknown, or other
  misc_difference 20: note = a, c, u, g, unknown, or other
  misc_difference 21: note = a, c, u, g, unknown, or other
  misc_difference 24: note = a, c, u, g, unknown, or other
  misc_difference 26: note = a, c, u, g, unknown, or other
  misc_difference 28: note = a, c, u, g, unknown, or other
  misc_difference 29: note = a, c, u, g, unknown, or other
  misc_difference 30: note = a, c, u, g, unknown, or other
  misc_difference 31: note = a, c, u, g, unknown, or other
  misc_difference 32: note = a, c, u, g, unknown, or other
  misc_difference 41: note = a, c, u, g, unknown, or other
  misc_difference 42: note = a, c, u, g, unknown, or other
  misc_difference 54: note = a, c, u, g, unknown, or other
  misc_difference 55: note = a, c, u, g, unknown, or other
  misc_difference 56: note = a, c, u, g, unknown, or other
  misc_difference 57: note = a, c, u, g, unknown, or other
  misc_difference 58: note = a, c, u, g, unknown, or other
  misc_difference 60: note = a, c, u, g, unknown, or other
  misc_difference 65: note = a, c, u, g, unknown, or other
  misc_difference 67: note = a, c, u, g, unknown, or other
  misc_difference 68: note = a, c, u, g, unknown, or other
  misc_difference 69: note = a, c, u, g, unknown, or other
  misc_difference 70: note = a, c, u, g, unknown, or other
  misc_difference 72: note = a, c, u, g, unknown, or other
  misc_difference 73: note = a, c, u, g, unknown, or other
  misc_difference 80: note = a, c, u, g, unknown, or other
  misc_difference 82: note = a, c, u, g, unknown, or other
  misc_difference 83: note = a, c, u, g, unknown, or other
  misc_difference 87: note = a, c, u, g, unknown, or other
  misc_difference 92: note = a, c, u, g, unknown, or other
  misc_difference 98: note = a, c, u, g, unknown, or other
  misc_difference 101: note = a, c, u, g, unknown, or other
  misc_difference 103: note = a, c, u, g, unknown, or other
  misc_difference 111: note = a, c, u, g, unknown, or other
  misc_difference 112: note = a, c, u, g, unknown, or other
  misc_difference 114: note = a, c, u, g, unknown, or other
  misc_difference 120: note = a, c, u, g, unknown, or other
  misc_difference 124: note = a, c, u, g, unknown, or other
  misc_difference 130: note = a, c, u, g, unknown, or other
  misc_difference 136: note = a, c, u, g, unknown, or other
  misc_difference 137: note = a, c, u, g, unknown, or other
  misc_difference 140: note = a, c, u, g, unknown, or other
  misc_difference 142: note = a, c, u, g, unknown, or other
  misc_difference 143: note = a, c, u, g, unknown, or other
  misc_difference 144: note = a, c, u, g, unknown, or other
  misc_difference 145: note = a, c, u, g, unknown, or other
  misc_difference 146: note = a, c, u, g, unknown, or other
  misc_difference 149: note = a, c, u, g, unknown, or other
  misc_difference 151: note = a, c, u, g, unknown, or other
  misc_difference 167: note = a, c, u, g, unknown, or other
  misc_difference 173: note = a, c, u, g, unknown, or other
  misc_difference 174: note = a, c, u, g, unknown, or other
  misc_difference 175: note = a, c, u, g, unknown, or other
  misc_difference 176: note = a, c, u, g, unknown, or other
  misc_difference 177: note = a, c, u, g, unknown, or other
  misc_difference 178: note = a, c, u, g, unknown, or other
  misc_difference 179: note = a, c, u, g, unknown, or other
  misc_difference 185: note = a, c, u, g, unknown, or other
  misc_difference 186: note = a, c, u, g, unknown, or other
  misc_difference 187: note = a, c, u, g, unknown, or other
  misc_difference 189: note = a, c, u, g, unknown, or other
  misc_difference 190: note = a, c, u, g, unknown, or other
  misc_difference 191: note = a, c, u, g, unknown, or other
  misc_difference 192: note = a, c, u, g, unknown, or other
  misc_difference 199: note = a, c, u, g, unknown, or other
  misc_difference 204: note = a, c, u, g, unknown, or other
  misc_difference 209: note = a, c, u, g, unknown, or other
  misc_difference 210: note = a, c, u, g, unknown, or other
  misc_difference 211: note = a, c, u, g, unknown, or other
  misc_difference 212: note = a, c, u, g, unknown, or other
nnnynnnnnngnnyyrnnrnnyynrncnnnnngrtccrrgnnrrcggyygyygnnnnncnyggynynnnnrnngccgyynynnagantggynccgyynyynyngagcycynnynyyccgnatgngggaynrtggtnnggnynnnnnryncnrccggatrygaggttngcrggnnnnnnnccygynnnrnnnngrgctcnrccynggrynnnn

SEQ ID NO: 795425 - RNA, 223 nt, unidentified
  source 1..223: mol_type = unassigned RNA; note = ISAve1
  misc_difference 12: note = a, c, u, g, unknown, or other
  misc_difference 26: note = a, c, u, g, unknown, or other
  misc_difference 55: note = a, c, u, g, unknown, or other
  misc_difference 58: note = a, c, u, g, unknown, or other
  misc_difference 59: note = a, c, u, g, unknown, or other
  misc_difference 60: note = a, c, u, g, unknown, or other
  misc_difference 67: note = a, c, u, g, unknown, or other
  misc_difference 68: note = a, c, u, g, unknown, or other
  misc_difference 69: note = a, c, u, g, unknown, or other
  misc_difference 70: note = a, c, u, g, unknown, or other
  misc_difference 71: note = a, c, u, g, unknown, or other
  misc_difference 72: note = a, c, u, g, unknown, or other
  misc_difference 73: note = a, c, u, g, unknown, or other
  misc_difference 76: note = a, c, u, g, unknown, or other
  misc_difference 77: note = a, c, u, g, unknown, or other
  misc_difference 79: note = a, c, u, g, unknown, or other
  misc_difference 82: note = a, c, u, g, unknown, or other
  misc_difference 84: note = a, c, u, g, unknown, or other
  misc_difference 89: note = a, c, u, g, unknown, or other
  misc_difference 92: note = a, c, u, g, unknown, or other
  misc_difference 93: note = a, c, u, g, unknown, or other
  misc_difference 94: note = a, c, u, g, unknown, or other
  misc_difference 95: note = a, c, u, g, unknown, or other
  misc_difference 96: note = a, c, u, g, unknown, or other
  misc_difference 97: note = a, c, u, g, unknown, or other
  misc_difference 102: note = a, c, u, g, unknown, or other
  misc_difference 106: note = a, c, u, g, unknown, or other
  misc_difference 107: note = a, c, u, g, unknown, or other
  misc_difference 118: note = a, c, u, g, unknown, or other
  misc_difference 133: note = a, c, u, g, unknown, or other
  misc_difference 135: note = a, c, u, g, unknown, or other
  misc_difference 139: note = a, c, u, g, unknown, or other
  misc_difference 140: note = a, c, u, g, unknown, or other
  misc_difference 141: note = a, c, u, g, unknown, or other
  misc_difference 142: note = a, c, u, g, unknown, or other
  misc_difference 146: note = a, c, u, g, unknown, or other
  misc_difference 149: note = a, c, u, g, unknown, or other
  misc_difference 150: note = a, c, u, g, unknown, or other
  misc_difference 151: note = a, c, u, g, unknown, or other
  misc_difference 153: note = a, c, u, g, unknown, or other
  misc_difference 163: note = a, c, u, g, unknown, or other
  misc_difference 184: note = a, c, u, g, unknown, or other
  misc_difference 186: note = a, c, u, g, unknown, or other
  misc_difference 187: note = a, c, u, g, unknown, or other
  misc_difference 189: note = a, c, u, g, unknown, or other
  misc_difference 196: note = a, c, u, g, unknown, or other
  misc_difference 197: note = a, c, u, g, unknown, or other
  misc_difference 198: note = a, c, u, g, unknown, or other
  misc_difference 199: note = a, c, u, g, unknown, or other
  misc_difference 200: note = a, c, u, g, unknown, or other
  misc_difference 201: note = a, c, u, g, unknown, or other
  misc_difference 202: note = a, c, u, g, unknown, or other
  misc_difference 203: note = a, c, u, g, unknown, or other
  misc_difference 204: note = a, c, u, g, unknown, or other
  misc_difference 205: note = a, c, u, g, unknown, or other
  misc_difference 208: note = a, c, u, g, unknown, or other
  misc_difference 210: note = a, c, u, g, unknown, or other
  misc_difference 213: note = a, c, u, g, unknown, or other
  misc_difference 214: note = a, c, u, g, unknown, or other
  misc_difference 215: note = a, c, u, g, unknown, or other
  misc_difference 216: note = a, c, u, g, unknown, or other
  misc_difference 217: note = a, c, u, g, unknown, or other
  misc_difference 218: note = a, c, u, g, unknown, or other
  misc_difference 219: note = a, c, u, g, unknown, or other
  misc_difference 220: note = a, c, u, g, unknown, or other
  misc_difference 221: note = a, c, u, g, unknown, or other
  misc_difference 222: note = a, c, u, g, unknown, or other
  misc_difference 223: note = a, c, u, g, unknown, or other
ccaccgattgcncaggcaatcaygangtgatggcraracaggtyagaccgygryngrnnnarccygnnnnnnncrnngnrcnynragyncgnnnnnnygatnrggnnycrrycagcrnattccatcagggacngnggcnnnngccncrnnnrnagtccgratntatggcygcaatctyyrcctnynnrncrycaynnnnnnnnnnyyngncrnnnnnnnnnnn

SEQ ID NO: 795426 - RNA, 226 nt, unidentified
  source 1..226: mol_type = unassigned RNA; note = ISAzvi2
  misc_difference 1: note = a, c, u, g, unknown, or other
  misc_difference 4: note = a, c, u, g, unknown, or other
  misc_difference 5: note = a, c, u, g, unknown, or other
  misc_difference 7: note = a, c, u, g, unknown, or other
  misc_difference 8: note = a, c, u, g, unknown, or other
  misc_difference 16: note = a, c, u, g, unknown, or other
  misc_difference 17: note = a, c, u, g, unknown, or other
  misc_difference 22: note = a, c, u, g, unknown, or other
  misc_difference 23: note = a, c, u, g, unknown, or other
  misc_difference 24: note = a, c, u, g, unknown, or other
  misc_difference 25: note = a, c, u, g, unknown, or other
  misc_difference 26: note = a, c, u, g, unknown, or other
  misc_difference 27: note = a, c, u, g, unknown, or other
  misc_difference 28: note = a, c, u, g, unknown, or other
  misc_difference 29: note = a, c, u, g, unknown, or other
  misc_difference 41: note = a, c, u, g, unknown, or other
  misc_difference 52: note = a, c, u, g, unknown, or other
  misc_difference 53: note = a, c, u, g, unknown, or other
  misc_difference 56: note = a, c, u, g, unknown, or other
  misc_difference 57: note = a, c, u, g, unknown, or other
  misc_difference 59: note = a, c, u, g, unknown, or other
  misc_difference 60: note = a, c, u, g, unknown, or other
  misc_difference 68: note = a, c, u, g, unknown, or other
  misc_difference 69: note = a, c, u, g, unknown, or other
  misc_difference 70: note = a, c, u, g, unknown, or other
  misc_difference 71: note = a, c, u, g, unknown, or other
  misc_difference 72: note = a, c, u, g, unknown, or other
  misc_difference 73: note = a, c, u, g, unknown, or other
  misc_difference 74: note = a, c, u, g, unknown, or other
  misc_difference 77: note = a, c, u, g, unknown, or other
  misc_difference 78: note = a, c, u, g, unknown, or other
  misc_difference 80: note = a, c, u, g, unknown, or other
  misc_difference 81: note = a, c, u, g, unknown, or other
  misc_difference 83: note = a, c, u, g, unknown, or other
  misc_difference 84: note = a, c, u, g, unknown, or other
  misc_difference 85: note = a, c, u, g, unknown, or other
  misc_difference 86: note = a, c, u, g, unknown, or other
  misc_difference 87: note = a, c, u, g, unknown, or other
  misc_difference 91: note = a, c, u, g, unknown, or other
  misc_difference 92: note = a, c, u, g, unknown, or other
  misc_difference 95: note = a, c, u, g, unknown, or other
  misc_difference 98: note = a, c, u, g, unknown, or other
  misc_difference 99: note = a, c, u, g, unknown, or other
  misc_difference 100: note = a, c, u, g, unknown, or other
  misc_difference 105: note = a, c, u, g, unknown, or other
  misc_difference 109: note = a, c, u, g, unknown, or other
  misc_difference 110: note = a, c, u, g, unknown, or other
  misc_difference 112: note = a, c, u, g, unknown, or other
  misc_difference 113: note = a, c, u, g, unknown, or other
  misc_difference 116: note = a, c, u, g, unknown, or other
  misc_difference 117: note = a, c, u, g, unknown, or other
  misc_difference 124: note = a, c, u, g, unknown, or other
  misc_difference 132: note = a, c, u, g, unknown, or other
  misc_difference 137: note = a, c, u, g, unknown, or other
  misc_difference 139: note = a, c, u, g, unknown, or other
  misc_difference 141: note = a, c, u, g, unknown, or other
  misc_difference 142: note = a, c, u, g, unknown, or other
  misc_difference 143: note = a, c, u, g, unknown, or other
  misc_difference 144: note = a, c, u, g, unknown, or other
  misc_difference 145: note = a, c, u, g, unknown, or other
  misc_difference 146: note = a, c, u, g, unknown, or other
  misc_difference 147: note = a, c, u, g, unknown, or other
  misc_difference 148: note = a, c, u, g, unknown, or other
  misc_difference 149: note = a, c, u, g, unknown, or other
  misc_difference 151: note = a, c, u, g, unknown, or other
  misc_difference 154: note = a, c, u, g, unknown, or other
  misc_difference 155: note = a, c, u, g, unknown, or other
  misc_difference 156: note = a, c, u, g, unknown, or other
  misc_difference 157: note = a, c, u, g, unknown, or other
  misc_difference 158: note = a, c, u, g, unknown, or other
  misc_difference 173: note = a, c, u, g, unknown, or other
  misc_difference 174: note = a, c, u, g, unknown, or other
  misc_difference 175: note = a, c, u, g, unknown, or other
  misc_difference 182: note = a, c, u, g, unknown, or other
  misc_difference 183: note = a, c, u, g, unknown, or other
  misc_difference 187: note = a, c, u, g, unknown, or other
  misc_difference 188: note = a, c, u, g, unknown, or other
  misc_difference 189: note = a, c, u, g, unknown, or other
  misc_difference 190: note = a, c, u, g, unknown, or other
  misc_difference 191: note = a, c, u, g, unknown, or other
  misc_difference 192: note = a, c, u, g, unknown, or other
  misc_difference 196: note = a, c, u, g, unknown, or other
  misc_difference 197: note = a, c, u, g, unknown, or other
  misc_difference 199: note = a, c, u, g, unknown, or other
  misc_difference 200: note = a, c, u, g, unknown, or other
  misc_difference 201: note = a, c, u, g, unknown, or other
  misc_difference 202: note = a, c, u, g, unknown, or other
  misc_difference 203: note = a, c, u, g, unknown, or other
  misc_difference 204: note = a, c, u, g, unknown, or other
  misc_difference 205: note = a, c, u, g, unknown, or other
  misc_difference 206: note = a, c, u, g, unknown, or other
  misc_difference 207: note = a, c, u, g, unknown, or other
  misc_difference 208: note = a, c, u, g, unknown, or other
  misc_difference 211: note = a, c, u, g, unknown, or other
  misc_difference 216: note = a, c, u, g, unknown, or other
  misc_difference 217: note = a, c, u, g, unknown, or other
  misc_difference 218: note = a, c, u, g, unknown, or other
  misc_difference 219: note = a, c, u, g, unknown, or other
  misc_difference 225: note = a, c, u, g, unknown, or other
nyynnynnygattgcnnagyrnnnnnnnntgatggcrracnggtyrraccgnnrynnrnnrarccygnnnnnnncrnngnncnnnnnragnncgnyrnnnygatnagrnnynnrynngcrraynyccatyanggyyngngnnnnnnnnnyncrnnnnnarrccggatrtaygnnngcartcnnaycnnnnnnyyrnnrnnnnnnnnnnytngcaannnnggrggng

SEQ ID NO: 795427 - RNA, 232 nt, unidentified
  source 1..232: mol_type = unassigned RNA; note = ISPlu13
  misc_difference 1: note = a, c, u, g, unknown, or other
  misc_difference 2: note = a, c, u, g, unknown, or other
  misc_difference 3: note = a, c, u, g, unknown, or other
  misc_difference 5: note = a, c, u, g, unknown, or other
  misc_difference 26: note = a, c, u, g, unknown, or other
  misc_difference 27: note = a, c, u, g, unknown, or other
  misc_difference 33: note = a, c, u, g, unknown, or other
  misc_difference 34: note = a, c, u, g, unknown, or other
  misc_difference 35: note = a, c, u, g, unknown, or other
  misc_difference 53: note = a, c, u, g, unknown, or other
  misc_difference 68: note = a, c, u, g, unknown, or other
  misc_difference 69: note = a, c, u, g, unknown, or other
  misc_difference 76: note = a, c, u, g, unknown, or other
  misc_difference 77: note = a, c, u, g, unknown, or other
  misc_difference 78: note = a, c, u, g, unknown, or other
  misc_difference 79: note = a, c, u, g, unknown, or other
  misc_difference 80: note = a, c, u, g, unknown, or other
  misc_difference 81: note = a, c, u, g, unknown, or other
  misc_difference 85: note = a, c, u, g, unknown, or other
  misc_difference 86: note = a, c, u, g, unknown, or other
  misc_difference 92: note = a, c, u, g, unknown, or other
  misc_difference 93: note = a, c, u, g, unknown, or other
  misc_difference 102: note = a, c, u, g, unknown, or other
  misc_difference 103: note = a, c, u, g, unknown, or other
  misc_difference 104: note = a, c, u, g, unknown, or other
  misc_difference 105: note = a, c, u, g, unknown, or other
  misc_difference 106: note = a, c, u, g, unknown, or other
  misc_difference 107: note = a, c, u, g, unknown, or other
  misc_difference 112: note = a, c, u, g, unknown, or other
  misc_difference 116: note = a, c, u, g, unknown, or other
  misc_difference 130: note = a, c, u, g, unknown, or other
  misc_difference 131: note = a, c, u, g, unknown, or other
  misc_difference 139: note = a, c, u, g, unknown, or other
  misc_difference 148: note = a, c, u, g, unknown, or other
  misc_difference 150: note = a, c, u, g, unknown, or other
  misc_difference 151: note = a, c, u, g, unknown, or other
  misc_difference 152: note = a, c, u, g, unknown, or other
  misc_difference 153: note = a, c, u, g, unknown, or other
  misc_difference 155: note = a, c, u, g, unknown, or other
  misc_difference 159: note = a, c, u, g, unknown, or other
  misc_difference 160: note = a, c, u, g, unknown, or other
  misc_difference 161: note = a, c, u, g, unknown, or other
  misc_difference 162: note = a, c, u, g, unknown, or other
  misc_difference 163: note = a, c, u, g, unknown, or other
  misc_difference 189: note = a, c, u, g, unknown, or other
  misc_difference 191: note = a, c, u, g, unknown, or other
  misc_difference 192: note = a, c, u, g, unknown, or other
  misc_difference 195: note = a, c, u, g, unknown, or other
  misc_difference 196: note = a, c, u, g, unknown, or other
  misc_difference 208: note = a, c, u, g, unknown, or other
  misc_difference 219: note = a, c, u, g, unknown, or other
  misc_difference 225: note = a, c, u, g, unknown, or other
nnnrnyyryyyayctggttttgcgannrctgannnttgatgacrtraacggcnyaycggcctgrygrnnarcctrnnnnnnraannggctynnyraagccgnnnnnnttttnaggnycrycaggygcgrnnctcatcgnggcgcggrnrnnnnynyycnnnnngacgccgratagattyargcaagccnannrynnrtcarratyrgnrttgcaaaaangrgggngaccata

SEQ ID NO: 795428 - RNA, 226 nt, unidentified
  source 1..226: mol_type = unassigned RNA; note = ISVisp2
  misc_difference 1: note = a, c, u, g, unknown, or other
  misc_difference 2: note = a, c, u, g, unknown, or other
  misc_difference 4: note = a, c, u, g, unknown, or other
  misc_difference 7: note = a, c, u, g, unknown, or other
  misc_difference 14: note = a, c, u, g, unknown, or other
  misc_difference 17: note = a, c, u, g, unknown, or other
  misc_difference 19: note = a, c, u, g, unknown, or other
  misc_difference 20: note = a, c, u, g, unknown, or other
  misc_difference 25: note = a, c, u, g, unknown, or other
  misc_difference 26: note = a, c, u, g, unknown, or other
  misc_difference 30: note = a, c, u, g, unknown, or other
  misc_difference 31: note = a, c, u, g, unknown, or other
  misc_difference 35: note = a, c, u, g, unknown, or other
  misc_difference 36: note = a, c, u, g, unknown, or other
  misc_difference 38: note = a, c, u, g, unknown, or other
  misc_difference 39: note = a, c, u, g, unknown, or other
  misc_difference 49: note = a, c, u, g, unknown, or other
  misc_difference 54: note = a, c, u, g, unknown, or other
  misc_difference 64: note = a, c, u, g, unknown, or other
  misc_difference 65: note = a, c, u, g, unknown, or other
  misc_difference 66: note = a, c, u, g, unknown, or other
  misc_difference 67: note = a, c, u, g, unknown, or other
  misc_difference 68: note = a, c, u, g, unknown, or other
  misc_difference 71: note = a, c, u, g, unknown, or other
  misc_difference 72: note = a, c, u, g, unknown, or other
  misc_difference 73: note = a, c, u, g, unknown, or other
  misc_difference 74: note = a, c, u, g, unknown, or other
  misc_difference 75: note = a, c, u, g, unknown, or other
  misc_difference 76: note = a, c, u, g, unknown, or other
  misc_difference 77: note = a, c, u, g, unknown, or other
  misc_difference 78: note = a, c, u, g, unknown, or other
  misc_difference 79: note = a, c, u, g, unknown, or other
  misc_difference 80: note = a, c, u, g, unknown, or other
  misc_difference 81: note = a, c, u, g, unknown, or other
  misc_difference 82: note = a, c, u, g, unknown, or other
  misc_difference 83: note = a, c, u, g, unknown, or other
  misc_difference 84: note = a, c, u, g, unknown, or other
  misc_difference 87: note = a, c, u, g, unknown, or other
  misc_difference 90: note = a, c, u, g, unknown, or other
  misc_difference 93: note = a, c, u, g, unknown, or other
  misc_difference 96: note = a, c, u, g, unknown, or other
  misc_difference 107: note = a, c, u, g, unknown, or other
  misc_difference 116: note = a, c, u, g, unknown, or other
  misc_difference 122: note = a, c, u, g, unknown, or other
  misc_difference 124: note = a, c, u, g, unknown, or other
  misc_difference 135: note = a, c, u, g, unknown, or other
  misc_difference 136: note = a, c, u, g, unknown, or other
  misc_difference 137: note = a, c, u, g, unknown, or other
  misc_difference 138: note = a, c, u, g, unknown, or other
  misc_difference 139: note = a, c, u, g, unknown, or other
  misc_difference 140: note = a, c, u, g, unknown, or other
  misc_difference 141: note = a, c, u, g, unknown, or other
  misc_difference 143: note = a, c, u, g, unknown, or other
  misc_difference 145: note = a, c, u, g, unknown, or other
  misc_difference 146: note = a, c, u, g, unknown, or other
  misc_difference 149: note = a, c, u, g, unknown, or other
  misc_difference 150: note = a, c, u, g, unknown, or other
  misc_difference 151: note = a, c, u, g, unknown, or other
  misc_difference 152: note = a, c, u, g, unknown, or other
  misc_difference 153: note = a, c, u, g, unknown, or other
  misc_difference 154: note = a, c, u, g, unknown, or other
  misc_difference 155: note = a, c, u, g, unknown, or other
  misc_difference 156: note = a, c, u, g, unknown, or other
  misc_difference 157: note = a, c, u, g, unknown, or other
  misc_difference 175: note = a, c, u, g, unknown, or other
  misc_difference 176: note = a, c, u, g, unknown, or other
  misc_difference 178: note = a, c, u, g, unknown, or other
  misc_difference 179: note = a, c, u, g, unknown, or other
  misc_difference 185: note = a, c, u, g, unknown, or other
  misc_difference 188: note = a, c, u, g, unknown, or other
  misc_difference 189: note = a, c, u, g, unknown, or other
  misc_difference 190: note = a, c, u, g, unknown, or other
  misc_difference 191: note = a, c, u, g, unknown, or other
  misc_difference 197: note = a, c, u, g, unknown, or other
  misc_difference 207: note = a, c, u, g, unknown, or other
  misc_difference 208: note = a, c, u, g, unknown, or other
  misc_difference 210: note = a, c, u, g, unknown, or other
  misc_difference 213: note = a, c, u, g, unknown, or other
  misc_difference 220: note = a, c, u, g, unknown, or other
  misc_difference 221: note = a, c, u, g, unknown, or other
  misc_difference 222: note = a, c, u, g, unknown, or other
  misc_difference 224: note = a, c, u, g, unknown, or other
  misc_difference 225: note = a, c, u, g, unknown, or other
  misc_difference 226: note = a, c, u, g, unknown, or other
nnrnyyngrryyanygnrnnrgrynnrgcnncggnntnnggyryaaycnycgrnggcgttargnnnnnarnnnnnnnnnnnnnnranccncgnrcntagayygargnyaggyrccncgrcgnanyragtaaggtnnnnnnngntnnyynnnnnnnnnaayccacgrataycagcnnrnnaaccgncgnnnnytacyngctycryyynnynyrntrryyynnnynnn

SEQ ID NO: 795429 - RNA, 188 nt, unidentified
  source 1..188: mol_type = unassigned RNA; note = ISGka2
  misc_difference 1: note = a, c, u, g, unknown, or other
  misc_difference 2: note = a, c, u, g, unknown, or other
  misc_difference 4: note = a, c, u, g, unknown, or other
  misc_difference 5: note = a, c, u, g, unknown, or other
  misc_difference 6: note = a, c, u, g, unknown, or other
  misc_difference 7: note = a, c, u, g, unknown, or other
  misc_difference 8: note = a, c, u, g, unknown, or other
  misc_difference 9: note = a, c, u, g, unknown, or other
  misc_difference 10: note = a, c, u, g, unknown, or other
  misc_difference 12: note = a, c, u, g, unknown, or other
  misc_difference 13: note = a, c, u, g, unknown, or other
  misc_difference 14: note = a, c, u, g, unknown, or other
  misc_difference 16: note = a, c, u, g, unknown, or other
  misc_difference 17: note = a, c, u, g, unknown, or other
  misc_difference 18: note = a, c, u, g, unknown, or other
  misc_difference 21: note = a, c, u, g, unknown, or other
  misc_difference 23: note = a, c, u, g, unknown, or other
  misc_difference 24: note = a, c, u, g, unknown, or other
  misc_difference 25: note = a, c, u, g, unknown, or other
  misc_difference 27: note = a, c, u, g, unknown, or other
  misc_difference 28: note = a, c, u, g, unknown, or other
  misc_difference 29: note = a, c, u, g, unknown, or other
  misc_difference 30: note = a, c, u, g, unknown, or other
  misc_difference 34: note = a, c, u, g, unknown, or other
  misc_difference 37: note = a, c, u, g, unknown, or other
  misc_difference 38: note = a, c, u, g, unknown, or other
  misc_difference 39: note = a, c, u, g, unknown, or other
  misc_difference 40: note = a, c, u, g, unknown, or other
  misc_difference 41: note = a, c, u, g, unknown, or other
  misc_difference 44: note = a, c, u, g, unknown, or other
  misc_difference 45: note = a, c, u, g, unknown, or other
  misc_difference 51: note = a, c, u, g, unknown, or other
  misc_difference 52: note = a, c, u, g, unknown, or other
  misc_difference 53: note = a, c, u, g, unknown, or other
  misc_difference 54: note = a, c, u, g, unknown, or other
  misc_difference 55: note = a, c, u, g, unknown, or other
  misc_difference 62: note = a, c, u, g, unknown, or other
  misc_difference 63: note = a, c, u, g, unknown, or other
  misc_difference 64: note = a, c, u, g, unknown, or other
  misc_difference 65: note = a, c, u, g, unknown, or other
  misc_difference 66: note = a, c, u, g, unknown, or other
  misc_difference 67: note = a, c, u, g, unknown, or other
  misc_difference 74: note = a, c, u, g, unknown, or other
  misc_difference 78: note = a, c, u, g, unknown, or other
  misc_difference 79: note = a, c, u, g, unknown, or other
  misc_difference 82: note = a, c, u, g, unknown, or other
  misc_difference 85: note = a, c, u, g, unknown, or other
  misc_difference 87: note = a, c, u, g, unknown, or other
  misc_difference 89: note = a, c, u, g, unknown, or other
  misc_difference 91: note = a, c, u, g, unknown, or other
  misc_difference 94: note = a, c, u, g, unknown, or other
  misc_difference 95: note = a, c, u, g, unknown, or other
  misc_difference 96: note = a, c, u, g, unknown, or other
  misc_difference 97: note = a, c, u, g, unknown, or other
  misc_difference 98: note = a, c, u, g, unknown, or other
  misc_difference 99: note = a, c, u, g, unknown, or other
  misc_difference 107: note = a, c, u, g, unknown, or other
  misc_difference 108: note = a, c, u, g, unknown, or other
  misc_difference 109: note = a, c, u, g, unknown, or other
  misc_difference 110: note = a, c, u, g, unknown, or other
  misc_difference 111: note = a, c, u, g, unknown, or other
  misc_difference 112: note = a, c, u, g, unknown, or other
  misc_difference 113: note = a, c, u, g, unknown, or other
  misc_difference 114: note = a, c, u, g, unknown, or other
  misc_difference 115: note = a, c, u, g, unknown, or other
  misc_difference 116: note = a, c, u, g, unknown, or other
  misc_difference 117: note = a, c, u, g, unknown, or other
  misc_difference 118: note = a, c, u, g, unknown, or other
  misc_difference 121: note = a, c, u, g, unknown, or other
  misc_difference 126: note = a, c, u, g, unknown, or other
  misc_difference 128: note = a, c, u, g, unknown, or other
  misc_difference 131: note = a, c, u, g, unknown, or other
  misc_difference 134: note = a, c, u, g, unknown, or other
  misc_difference 135: note = a, c, u, g, unknown, or other
  misc_difference 137: note = a, c, u, g, unknown, or other
  misc_difference 139: note = a, c, u, g, unknown, or other
  misc_difference 140: note = a, c, u, g, unknown, or other
  misc_difference 141: note = a, c, u, g, unknown, or other
  misc_difference 142: note = a, c, u, g, unknown, or other
  misc_difference 143: note = a, c, u, g, unknown, or other
  misc_difference 145: note = a, c, u, g, unknown, or other
  misc_difference 147: note = a, c, u, g, unknown, or other
  misc_difference 148: note = a, c, u, g, unknown, or other
  misc_difference 151: note = a, c, u, g, unknown, or other
  misc_difference 154: note = a, c, u, g, unknown, or other
  misc_difference 156: note = a, c, u, g, unknown, or other
  misc_difference 158: note = a, c, u, g, unknown, or other
  misc_difference 159: note = a, c, u, g, unknown, or other
  misc_difference 163: note = a, c, u, g, unknown, or other
  misc_difference 164: note = a, c, u, g, unknown, or other
  misc_difference 165: note = a, c, u, g, unknown, or other
  misc_difference 166: note = a, c, u, g, unknown, or other
  misc_difference 168: note = a, c, u, g, unknown, or other
  misc_difference 169: note = a, c, u, g, unknown, or other
  misc_difference 170: note = a, c, u, g, unknown, or other
  misc_difference 171: note = a, c, u, g, unknown, or other
  misc_difference 172: note = a, c, u, g, unknown, or other
  misc_difference 173: note = a, c, u, g, unknown, or other
  misc_difference 174: note = a, c, u, g, unknown, or other
  misc_difference 175: note = a, c, u, g, unknown, or other
  misc_difference 181: note = a, c, u, g, unknown, or other
  misc_difference 183: note = a, c, u, g, unknown, or other
  misc_difference 184: note = a, c, u, g, unknown, or other
  misc_difference 185: note = a, c, u, g, unknown, or other
  misc_difference 186: note = a, c, u, g, unknown, or other
nnynnnnnnnrnnnynnnrynrnnnrnnnnarrncgnnnnnyynntgrygnnnnnayccygnnnnnnarryygnyyrnnrynrynynrngnacnnnnnnytgtyrynnnnnnnnnnnnranyacgnrnrrnarnntnynnnnnynynnrynrynynrnnyrynnnnynnnnnnnnrgaggnrnnnnat

SEQ ID NO: 795430 - RNA, 230 nt, unidentified
  source 1..230: mol_type = unassigned RNA; note = ISSpi2
  misc_difference 1: note = a, c, u, g, unknown, or other
  misc_difference 2: note = a, c, u, g, unknown, or other
  misc_difference 3: note = a, c, u, g, unknown, or other
  misc_difference 4: note = a, c, u, g, unknown, or other
  misc_difference 5: note = a, c, u, g, unknown, or other
  misc_difference 12: note = a, c, u, g, unknown, or other
  misc_difference 13: note = a, c, u, g, unknown, or other
  misc_difference 15: note = a, c, u, g, unknown, or other
  misc_difference 16: note = a, c, u, g, unknown, or other
  misc_difference 17: note = a, c, u, g, unknown, or other
  misc_difference 23: note = a, c, u, g, unknown, or other
  misc_difference 24: note = a, c, u, g, unknown, or other
  misc_difference 25: note = a, c, u, g, unknown, or other
  misc_difference 28: note = a, c, u, g, unknown, or other
  misc_difference 29: note = a, c, u, g, unknown, or other
  misc_difference 30: note = a, c, u, g, unknown, or other
  misc_difference 31: note = a, c, u, g, unknown, or other
  misc_difference 37: note = a, c, u, g, unknown, or other
  misc_difference 40: note = a, c, u, g, unknown, or other
  misc_difference 41: note = a, c, u, g, unknown, or other
  misc_difference 42: note = a, c, u, g, unknown, or other
  misc_difference 44: note = a, c, u, g, unknown, or other
  misc_difference 54: note = a, c, u, g, unknown, or other
  misc_difference 56: note = a, c, u, g, unknown, or other
  misc_difference 57: note = a, c, u, g, unknown, or other
  misc_difference 58: note = a, c, u, g, unknown, or other
  misc_difference 60: note = a, c, u, g, unknown, or other
  misc_difference 61: note = a, c, u, g, unknown, or other
  misc_difference 69: note = a, c, u, g, unknown, or other
  misc_difference 71: note = a, c, u, g, unknown, or other
  misc_difference 73: note = a, c, u, g, unknown, or other
  misc_difference 74: note = a, c, u, g, unknown, or other
  misc_difference 75: note = a, c, u, g, unknown, or other
  misc_difference 76: note = a, c, u, g, unknown, or other
  misc_difference 78: note = a, c, u, g, unknown, or other
  misc_difference 79: note = a, c, u, g, unknown, or other
  misc_difference 83: note = a, c, u, g, unknown, or other
  misc_difference 84: note = a, c, u, g, unknown, or other
  misc_difference 85: note = a, c, u, g, unknown, or other
  misc_difference 87: note = a, c, u, g, unknown, or other
  misc_difference 90: note = a, c, u, g, unknown, or other
  misc_difference 95: note = a, c, u, g, unknown, or other
  misc_difference 109: note = a, c, u, g, unknown, or other
  misc_difference 110: note = a, c, u, g, unknown, or other
  misc_difference 111: note = a, c, u, g, unknown, or other
  misc_difference 112: note = a, c, u, g, unknown, or other
  misc_difference 113: note = a, c, u, g, unknown, or other
  misc_difference 114: note = a, c, u, g, unknown, or other
  misc_difference 116: note = a, c, u, g, unknown, or other
  misc_difference 118: note = a, c, u, g, unknown, or other
  misc_difference 122: note = a, c, u, g, unknown, or other
  misc_difference 123: note = a, c, u, g, unknown, or other
  misc_difference 124: note = a, c, u, g, unknown, or other
  misc_difference 125: note = a, c, u, g, unknown, or other
  misc_difference 126: note = a, c, u, g, unknown, or other
  misc_difference 133: note = a, c, u, g, unknown, or other
  misc_difference 138: note = a, c, u, g, unknown, or other
  misc_difference 143: note = a, c, u, g, unknown, or other
  misc_difference 144: note = a, c, u, g, unknown, or other
  misc_difference 145: note = a, c, u, g, unknown, or other
  misc_difference 146: note = a, c, u, g, unknown, or other
  misc_difference 147: note = a, c, u, g, unknown, or other
  misc_difference 148: note = a, c, u, g, unknown, or other
  misc_difference 149: note = a, c, u, g, unknown, or other
  misc_difference 150: note = a, c, u, g, unknown, or other
  misc_difference 156: note = a, c, u, g, unknown, or other
  misc_difference 157: note = a, c, u, g, unknown, or other
  misc_difference 158: note = a, c, u, g, unknown, or other
  misc_difference 160: note = a, c, u, g, unknown, or other
  misc_difference 175: note = a, c, u, g, unknown, or other
  misc_difference 176: note = a, c, u, g, unknown, or other
  misc_difference 185: note = a, c, u, g, unknown, or other
  misc_difference 186: note = a, c, u, g, unknown, or other
  misc_difference 189: note = a, c, u, g, unknown, or other
  misc_difference 190: note = a, c, u, g, unknown, or other
  misc_difference 191: note = a, c, u, g, unknown, or other
  misc_difference 192: note = a, c, u, g, unknown, or other
  misc_difference 193: note = a, c, u, g, unknown, or other
  misc_difference 194: note = a, c, u, g, unknown, or other
  misc_difference 200: note = a, c, u, g, unknown, or other
  misc_difference 201: note = a, c, u, g, unknown, or other
  misc_difference 202: note = a, c, u, g, unknown, or other
  misc_difference 204: note = a, c, u, g, unknown, or other
  misc_difference 206: note = a, c, u, g, unknown, or other
  misc_difference 207: note = a, c, u, g, unknown, or other
  misc_difference 208: note = a, c, u, g, unknown, or other
  misc_difference 213: note = a, c, u, g, unknown, or other
  misc_difference 214: note = a, c, u, g, unknown, or other
  misc_difference 218: note = a, c, u, g, unknown, or other
  misc_difference 219: note = a, c, u, g, unknown, or other
  misc_difference 220: note = a, c, u, g, unknown, or other
  misc_difference 221: note = a, c, u, g, unknown, or other
nnnnnccyrccnnrnnnytgcrnnnrynnnngatgrnrrnnngntyagaccgrnrnnnrnnrarcctgntnannnnrnnggynnnrnranrycgnctaacgaatgaggnnnnnnynyngcgnnnnntcatcrnggycnrrgynnnnnnnnrcyyannnrnagrccgratrtagrnnygcagtcynnycnnnnnnyryyrnnnrnrnnnyygcnnrrynnnnggggragtc

SEQ ID NO: 795431 - RNA, 196 nt, unidentified
  source 1..196: mol_type = unassigned RNA; note = ISCARN111
  misc_difference 4: note = a, c, u, g, unknown, or other
  misc_difference 10: note = a, c, u, g, unknown, or other
  misc_difference 13: note = a, c, u, g, unknown, or other
  misc_difference 14: note = a, c, u, g, unknown, or other
  misc_difference 24: note = a, c, u, g, unknown, or other
  misc_difference 26: note = a, c, u, g, unknown, or other
  misc_difference 29: note = a, c, u, g, unknown, or other
  misc_difference 30: note = a, c, u, g, unknown, or other
  misc_difference 45: note = a, c, u, g, unknown, or other
  misc_difference 49: note = a, c, u, g, unknown, or other
  misc_difference 59: note = a, c, u, g, unknown, or other
  misc_difference 61: note = a, c, u, g, unknown, or other
  misc_difference 65: note = a, c, u, g, unknown, or other
  misc_difference 66: note = a, c, u, g, unknown, or other
  misc_difference 72: note = a, c, u, g, unknown, or other
  misc_difference 73: note = a, c, u, g, unknown, or other
  misc_difference 74: note = a, c, u, g, unknown, or other
  misc_difference 75: note = a, c, u, g, unknown, or other
  misc_difference 76: note = a, c, u, g, unknown, or other
  misc_difference 77: note = a, c, u, g, unknown, or other
  misc_difference 80: note = a, c, u, g, unknown, or other
  misc_difference 94: note = a, c, u, g, unknown, or other
  misc_difference 104: note = a, c, u, g, unknown, or other
  misc_difference 129: note = a, c, u, g, unknown, or other
  misc_difference 132: note = a, c, u, g, unknown, or other
  misc_difference 134: note = a, c, u, g, unknown, or other
  misc_difference 135: note = a, c, u, g, unknown, or other
  misc_difference 136: note = a, c, u, g, unknown, or other
  misc_difference 142: note = a, c, u, g, unknown, or other
  misc_difference 143: note = a, c, u, g, unknown, or other
  misc_difference 151: note = a, c, u, g, unknown, or other
  misc_difference 159: note = a, c, u, g, unknown, or other
  misc_difference 169: note = a, c, u, g, unknown, or other
  misc_difference 170: note = a, c, u, g, unknown, or other
  misc_difference 177: note = a, c, u, g, unknown, or other
  misc_difference 179: note = a, c, u, g, unknown, or other
  misc_difference 180: note = a, c, u, g, unknown, or other
  misc_difference 181: note = a, c, u, g, unknown, or other
  misc_difference 182: note = a, c, u, g, unknown, or other
  misc_difference 188: note = a, c, u, g, unknown, or other
  misc_difference 189: note = a, c, u, g, unknown, or other
  misc_difference 193: note = a, c, u, g, unknown, or other
  misc_difference 194: note = a, c, u, g, unknown, or other
  misc_difference 195: note = a, c, u, g, unknown, or other
  misc_difference 196: note = a, c, u, g, unknown, or other
rcynygyryngcnngcgttgatgngnrrnnggttggaccygcgyngggnryrccygrynanyyynnrgrgrnnnnnnyrnycycgrytaacganygrggyccyngcgygcgtctttcatcagggtccgngcnrnnngcycannatgaccgnttgtagtnyygcrgtccnncaycytnynnnnyrrygnnryrnnnn

SEQ ID NO: 795432 - RNA, 205 nt, unidentified
  source 1..205: mol_type = unassigned RNA; note = ISStma4
  misc_difference 3: note = a, c, u, g, unknown, or other
  misc_difference 9: note = a, c, u, g, unknown, or other
  misc_difference 10: note = a, c, u, g, unknown, or other
  misc_difference 11: note = a, c, u, g, unknown, or other
  misc_difference 12: note = a, c, u, g, unknown, or other
  misc_difference 13: note = a, c, u, g, unknown, or other
  misc_difference 14: note = a, c, u, g, unknown, or other
  misc_difference 15: note = a, c, u, g, unknown, or other
  misc_difference 16: note = a, c, u, g, unknown, or other
  misc_difference 17: note = a, c, u, g, unknown, or other
  misc_difference 18: note = a, c, u, g, unknown, or other
  misc_difference 19: note = a, c, u, g, unknown, or other
  misc_difference 20: note = a, c, u, g, unknown, or other
  misc_difference 21: note = a, c, u, g, unknown, or other
  misc_difference 22: note = a, c, u, g, unknown, or other
  misc_difference 23: note = a, c, u, g, unknown, or other
  misc_difference 24: note = a, c, u, g, unknown, or other
  misc_difference 25: note = a, c, u, g, unknown, or other
  misc_difference 26: note = a, c, u, g, unknown, or other
  misc_difference 27: note = a, c, u, g, unknown, or other
  misc_difference 28: note = a, c, u, g, unknown, or other
  misc_difference 29: note = a, c, u, g, unknown, or other
  misc_difference 30: note = a, c, u, g, unknown, or other
  misc_difference 31: note = a, c, u, g, unknown, or other
  misc_difference 32: note = a, c, u, g, unknown, or other
  misc_difference 39: note = a, c, u, g, unknown, or other
  misc_difference 40: note = a, c, u, g, unknown, or other
  misc_difference 44: note = a, c, u, g, unknown, or other
  misc_difference 45: note = a, c, u, g, unknown, or other
  misc_difference 51: note = a, c, u, g, unknown, or other
  misc_difference 55: note = a, c, u, g, unknown, or other
  misc_difference 57: note = a, c, u, g, unknown, or other
  misc_difference 58: note = a, c, u, g, unknown, or other
  misc_difference 59: note = a, c, u, g, unknown, or other
  misc_difference 63: note = a, c, u, g, unknown, or other
  misc_difference 68: note = a, c, u, g, unknown, or other
  misc_difference 69: note = a, c, u, g, unknown, or other
  misc_difference 70: note = a, c, u, g, unknown, or other
  misc_difference 71: note = a, c, u, g, unknown, or other
  misc_difference 72: note = a, c, u, g, unknown, or other
  misc_difference 73: note = a, c, u, g, unknown, or other
  misc_difference 74: note = a, c, u, g, unknown, or other
  misc_difference 78: note = a, c, u, g, unknown, or other
  misc_difference 85: note = a, c, u, g, unknown, or other
  misc_difference 94: note = a, c, u, g, unknown, or other
  misc_difference 95: note = a, c, u, g, unknown, or other
  misc_difference 103: note = a, c, u, g, unknown, or other
  misc_difference 104: note = a, c, u, g, unknown, or other
  misc_difference 105: note = a, c, u, g, unknown, or other
  misc_difference 108: note = a, c, u, g, unknown, or other
  misc_difference 111: note = a, c, u, g, unknown, or other
  misc_difference 112: note = a, c, u, g, unknown, or other
  misc_difference 115: note = a, c, u, g, unknown, or other
  misc_difference 119: note = a, c, u, g, unknown, or other
  misc_difference 120: note = a, c, u, g, unknown, or other
  misc_difference 121: note = a, c, u, g, unknown, or other
  misc_difference 129: note = a, c, u, g, unknown, or other
  misc_difference 130: note = a, c, u, g, unknown, or other
  misc_difference 131: note = a, c, u, g, unknown, or other
  misc_difference 134: note = a, c, u, g, unknown, or other
  misc_difference 148: note = a, c, u, g, unknown, or other
  misc_difference 149: note = a, c, u, g, unknown, or other
  misc_difference 155: note = a, c, u, g, unknown, or other
  misc_difference 156: note = a, c, u, g, unknown, or other
  misc_difference 158: note = a, c, u, g, unknown, or other
  misc_difference 159: note = a, c, u, g, unknown, or other
  misc_difference 160: note = a, c, u, g, unknown, or other
  misc_difference 161: note = a, c, u, g, unknown, or other
  misc_difference 162: note = a, c, u, g, unknown, or other
  misc_difference 163: note = a, c, u, g, unknown, or other
  misc_difference 165: note = a, c, u, g, unknown, or other
  misc_difference 176: note = a, c, u, g, unknown, or other
  misc_difference 177: note = a, c, u, g, unknown, or other
  misc_difference 185: note = a, c, u, g, unknown, or other
  misc_difference 188: note = a, c, u, g, unknown, or other
  misc_difference 190: note = a, c, u, g, unknown, or other
  misc_difference 191: note = a, c, u, g, unknown, or other
  misc_difference 194: note = a, c, u, g, unknown, or other
  misc_difference 196: note = a, c, u, g, unknown, or other
  misc_difference 198: note = a, c, u, g, unknown, or other
  misc_difference 199: note = a, c, u, g, unknown, or other
  misc_difference 200: note = a, c, u, g, unknown, or other
  misc_difference 201: note = a, c, u, g, unknown, or other
  misc_difference 202: note = a, c, u, g, unknown, or other
  misc_difference 203: note = a, c, u, g, unknown, or other
rtnyygrynnnnnnnnnnnnnnnnnnnnnnnnyyyygrnngrynnycrrrngrrnrnnnrrangyygnnnnnnncctnrggcyyngagcyygynnygtagatnnnrynycnnyynyycnnnyyyryyynnnagnycgracrgtatcynnrgccynnynnnnnnrnragcyygyatnnryaaggyngrncnnrrnrnrnnnnnnry

SEQ ID NO: 795433 - RNA, 232 nt, unidentified
  source 1..232: mol_type = unassigned RNA; note = ISHar6
  misc_difference 1: note = a, c, u, g, unknown, or other
  misc_difference 2: note = a, c, u, g, unknown, or other
  misc_difference 3: note = a, c, u, g, unknown, or other
  misc_difference 4: note = a, c, u, g, unknown, or other
  misc_difference 5: note = a, c, u, g, unknown, or other
  misc_difference 11: note = a, c, u, g, unknown, or other
  misc_difference 26: note = a, c, u, g, unknown, or other
  misc_difference 32: note = a, c, u, g, unknown, or other
  misc_difference 33: note = a, c, u, g, unknown, or other
  misc_difference 34: note = a, c, u, g, unknown, or other
  misc_difference 35: note = a, c, u, g, unknown, or other
  misc_difference 36: note = a, c, u, g, unknown, or other
  misc_difference 53: note = a, c, u, g, unknown, or other
  misc_difference 56: note = a, c, u, g, unknown, or other
  misc_difference 69: note = a, c, u, g, unknown, or other
  misc_difference 71: note = a, c, u, g, unknown, or other
  misc_difference 76: note = a, c, u, g, unknown, or other
  misc_difference 77: note = a, c, u, g, unknown, or other
  misc_difference 78: note = a, c, u, g, unknown, or other
  misc_difference 79: note = a, c, u, g, unknown, or other
  misc_difference 80: note = a, c, u, g, unknown, or other
  misc_difference 81: note = a, c, u, g, unknown, or other
  misc_difference 82: note = a, c, u, g, unknown, or other
  misc_difference 85: note = a, c, u, g, unknown, or other
  misc_difference 92: note = a, c, u, g, unknown, or other
  misc_difference 101: note = a, c, u, g, unknown, or other
  misc_difference 102: note = a, c, u, g, unknown, or other
  misc_difference 103: note = a, c, u, g, unknown, or other
  misc_difference 104: note = a, c, u, g, unknown, or other
  misc_difference 105: note = a, c, u, g, unknown, or other
  misc_difference 106: note = a, c, u, g, unknown, or other
  misc_difference 111: note = a, c, u, g, unknown, or other
  misc_difference 115: note = a, c, u, g, unknown, or other
  misc_difference 129: note = a, c, u, g, unknown, or other
  misc_difference 147: note = a, c, u, g, unknown, or other
  misc_difference 149: note = a, c, u, g, unknown, or other
  misc_difference 150: note = a, c, u, g, unknown, or other
  misc_difference 151: note = a, c, u, g, unknown, or other
  misc_difference 152: note = a, c, u, g, unknown, or other
  misc_difference 154: note = a, c, u, g, unknown, or other
  misc_difference 158: note = a, c, u, g, unknown, or other
  misc_difference 159: note = a, c, u, g, unknown, or other
  misc_difference 160: note = a, c, u, g, unknown, or other
  misc_difference 161: note = a, c, u, g, unknown, or other
  misc_difference 162: note = a, c, u, g, unknown, or other
  misc_difference 166: note = a, c, u, g, unknown, or other
  misc_difference 180: note = a, c, u, g, unknown, or other
  misc_difference 188: note = a, c, u, g, unknown, or other
  misc_difference 189: note = a, c, u, g, unknown, or other
  misc_difference 190: note = a, c, u, g, unknown, or other
  misc_difference 194: note = a, c, u, g, unknown, or other
  misc_difference 195: note = a, c, u, g, unknown, or other
  misc_difference 198: note = a, c, u, g, unknown, or other
  misc_difference 201: note = a, c, u, g, unknown, or other
  misc_difference 202: note = a, c, u, g, unknown, or other
  misc_difference 203: note = a, c, u, g, unknown, or other
  misc_difference 209: note = a, c, u, g, unknown, or other
  misc_difference 210: note = a, c, u, g, unknown, or other
  misc_difference 220: note = a, c, u, g, unknown, or other
  misc_difference 225: note = a, c, u, g, unknown, or other
  misc_difference 226: note = a, c, u, g, unknown, or other
nnnnnyrycynycyggttttgcgaynrcygannnnnygatgacrtgaacggcnyancggcctgryrrrnancctgnnnnnnnaanyggcyynyrargcygnnnnnnttttnaggnyyrycrggcgcgrnyctcatcryggcgcggrnrnnnnynyccnnnnngacnccggatagattyrngcaagccnnnyrynncrncrnnnrycrgnnttgcaaaarnggggnngaccat

SEQ ID NO: 795434 - RNA, 249 nt, unidentified
  source 1..249: mol_type = unassigned RNA; note = ISCARN18
  misc_difference 1: note = a, c, u, g, unknown, or other
  misc_difference 2: note = a, c, u, g, unknown, or other
  misc_difference 3: note = a, c, u, g, unknown, or other
  misc_difference 6: note = a, c, u, g, unknown, or other
  misc_difference 7: note = a, c, u, g, unknown, or other
  misc_difference 9: note = a, c, u, g, unknown, or other
  misc_difference 10: note = a, c, u, g, unknown, or other
  misc_difference 11: note = a, c, u, g, unknown, or other
  misc_difference 13: note = a, c, u, g, unknown, or other
  misc_difference 14: note = a, c, u, g, unknown, or other
  misc_difference 15: note = a, c, u, g, unknown, or other
  misc_difference 16: note = a, c, u, g, unknown, or other
  misc_difference 17: note = a, c, u, g, unknown, or other
  misc_difference 18: note = a, c, u, g, unknown, or other
  misc_difference 22: note = a, c, u, g, unknown, or other
  misc_difference 30: note = a, c, u, g, unknown, or other
  misc_difference 34: note = a, c, u, g, unknown, or other
  misc_difference 39: note = a, c, u, g, unknown, or other
  misc_difference 41: note = a, c, u, g, unknown, or other
  misc_difference 43: note = a, c, u, g, unknown, or other
  misc_difference 44: note = a, c, u, g, unknown, or other
  misc_difference 46: note = a, c, u, g, unknown, or other
  misc_difference 53: note = a, c, u, g, unknown, or other
  misc_difference 54: note = a, c, u, g, unknown, or other
  misc_difference 70: note = a, c, u, g, unknown, or other
  misc_difference 74: note = a, c, u, g, unknown, or other
  misc_difference 75: note = a, c, u, g, unknown, or other
  misc_difference 86: note = a, c, u, g, unknown, or other
  misc_difference 89: note = a, c, u, g, unknown, or other
  misc_difference 90: note = a, c, u, g, unknown, or other
  misc_difference 91: note = a, c, u, g, unknown, or other
  misc_difference 92: note = a, c, u, g, unknown, or other
  misc_difference 93: note = a, c, u, g, unknown, or other
  misc_difference 94: note = a, c, u, g, unknown, or other
  misc_difference 95: note = a, c, u, g, unknown, or other
  misc_difference 96: note = a, c, u, g, unknown, or other
  misc_difference 101: note = a, c, u, g, unknown, or other
  misc_difference 103: note = a, c, u, g, unknown, or other
  misc_difference 112: note = a, c, u, g, unknown, or other
  misc_difference 113: note = a, c, u, g, unknown, or other
  misc_difference 114: note = a, c, u, g, unknown, or other
  misc_difference 128: note = a, c, u, g, unknown, or other
  misc_difference 129: note = a, c, u, g, unknown, or other
  misc_difference 141: note = a, c, u, g, unknown, or other
  misc_difference 152: note = a, c, u, g, unknown, or other
  misc_difference 157: note = a, c, u, g, unknown, or other
  misc_difference 158: note = a, c, u, g, unknown, or other
  misc_difference 159: note = a, c, u, g, unknown, or other
  misc_difference 161: note = a, c, u, g, unknown, or other
  misc_difference 163: note = a, c, u, g, unknown, or other
  misc_difference 165: note = a, c, u, g, unknown, or other
  misc_difference 171: note = a, c, u, g, unknown, or other
  misc_difference 172: note = a, c, u, g, unknown, or other
  misc_difference 188: note = a, c, u, g, unknown, or other
  misc_difference 190: note = a, c, u, g, unknown, or other
  misc_difference 197: note = a, c, u, g, unknown, or other
  misc_difference 198: note = a, c, u, g, unknown, or other
  misc_difference 199: note = a, c, u, g, unknown, or other
  misc_difference 203: note = a, c, u, g, unknown, or other
  misc_difference 206: note = a, c, u, g, unknown, or other
  misc_difference 210: note = a, c, u, g, unknown, or other
  misc_difference 211: note = a, c, u, g, unknown, or other
  misc_difference 218: note = a, c, u, g, unknown, or other
  misc_difference 220: note = a, c, u, g, unknown, or other
  misc_difference 221: note = a, c, u, g, unknown, or other
  misc_difference 222: note = a, c, u, g, unknown, or other
  misc_difference 223: note = a, c, u, g, unknown, or other
  misc_difference 224: note = a, c, u, g, unknown, or other
  misc_difference 231: note = a, c, u, g, unknown, or other
  misc_difference 232: note = a, c, u, g, unknown, or other
nnnrynnrnnnrnnnnnnyyrnaaggyyrnryrnggyanyngnnrngtgatgnnaaacaggtcrgaccgngrcnngcyaarcctgnaynnnnnnnngrrcnynragyycrynnnrrrratgaggygynngtcagcgrattncatcrgggccngcrgnnnynyngnyygcannaaggccgratatarrnyngcagccnnnyytnyynycrnnrcryrrnrnnnnnyyygyrnncgggaggcrtycatata

SEQ ID NO: 795435 - RNA, 146 nt, unidentified
  source 1..146: mol_type = unassigned RNA; note = ISArsp5
  misc_difference 1: note = a, c, u, g, unknown, or other
  misc_difference 2: note = a, c, u, g, unknown, or other
  misc_difference 3: note = a, c, u, g, unknown, or other
  misc_difference 4: note = a, c, u, g, unknown, or other
  misc_difference 5: note = a, c, u, g, unknown, or other
  misc_difference 6: note = a, c, u, g, unknown, or other
  misc_difference 7: note = a, c, u, g, unknown, or other
  misc_difference 8: note = a, c, u, g, unknown, or other
  misc_difference 9: note = a, c, u, g, unknown, or other
  misc_difference 10: note = a, c, u, g, unknown, or other
  misc_difference 11: note = a, c, u, g, unknown, or other
  misc_difference 12: note = a, c, u, g, unknown, or other
  misc_difference 13: note = a, c, u, g, unknown, or other
  misc_difference 14: note = a, c, u, g, unknown, or other
  misc_difference 15: note = a, c, u, g, unknown, or other
  misc_difference 16: note = a, c, u, g, unknown, or other
  misc_difference 17: note = a, c, u, g, unknown, or other
  misc_difference 23: note = a, c, u, g, unknown, or other
  misc_difference 30: note = a, c, u, g, unknown, or other
  misc_difference 57: note = a, c, u, g, unknown, or other
  misc_difference 63: note = a, c, u, g, unknown, or other
  misc_difference 68: note = a, c, u, g, unknown, or other
  misc_difference 70: note = a, c, u, g, unknown, or other
  misc_difference 73: note = a, c, u, g, unknown, or other
  misc_difference 90: note = a, c, u, g, unknown, or other
  misc_difference 91: note = a, c, u, g, unknown, or other
  misc_difference 96: note = a, c, u, g, unknown, or other
  misc_difference 98: note = a, c, u, g, unknown, or other
  misc_difference 99: note = a, c, u, g, unknown, or other
  misc_difference 100: note = a, c, u, g, unknown, or other
  misc_difference 101: note = a, c, u, g, unknown, or other
  misc_difference 102: note = a, c, u, g, unknown, or other
  misc_difference 103: note = a, c, u, g, unknown, or other
  misc_difference 104: note = a, c, u, g, unknown, or other
  misc_difference 105: note = a, c, u, g, unknown, or other
  misc_difference 106: note = a, c, u, g, unknown, or other
  misc_difference 113: note = a, c, u, g, unknown, or other
  misc_difference 132: note = a, c, u, g, unknown, or other
  misc_difference 133: note = a, c, u, g, unknown, or other
  misc_difference 136: note = a, c, u, g, unknown, or other
  misc_difference 143: note = a, c, u, g, unknown, or other
  misc_difference 145: note = a, c, u, g, unknown, or other
nnnnnnnnnnnnnnnnnyyyyyngtcryynatgatcyrgggggtgttgtcaccgggnyygrynggyrnynrgnratcgctratagggrcnngrcynrnnnnnnnnnaggycrnycgtaacgtggatgccgrnnyynryyrccnyng

SEQ ID NO: 795436 - RNA, 242 nt, unidentified
  source 1..242: mol_type = unassigned RNA; note = ISRta3
  misc_difference 3: note = a, c, u, g, unknown, or other
  misc_difference 4: note = a, c, u, g, unknown, or other
  misc_difference 5: note = a, c, u, g, unknown, or other
  misc_difference 11: note = a, c, u, g, unknown, or other
  misc_difference 19: note = a, c, u, g, unknown, or other
  misc_difference 20: note = a, c, u, g, unknown, or other
  misc_difference 25: note = a, c, u, g, unknown, or other
  misc_difference 29: note = a, c, u, g, unknown, or other
  misc_difference 30: note = a, c, u, g, unknown, or other
  misc_difference 31: note = a, c, u, g, unknown, or other
  misc_difference 32: note = a, c, u, g, unknown, or other
  misc_difference 34: note = a, c, u, g, unknown, or other
  misc_difference 44: note = a, c, u, g, unknown, or other
  misc_difference 65: note = a, c, u, g, unknown, or other
  misc_difference 76: note = a, c, u, g, unknown, or other
  misc_difference 77: note = a, c, u, g, unknown, or other
  misc_difference 78: note = a, c, u, g, unknown, or other
  misc_difference 79: note = a, c, u, g, unknown, or other
  misc_difference 80: note = a, c, u, g, unknown, or other
  misc_difference 81: note = a, c, u, g, unknown, or other
  misc_difference 82: note = a, c, u, g, unknown, or other
  misc_difference 85: note = a, c, u, g, unknown, or other
  misc_difference 87: note = a, c, u, g, unknown, or other
  misc_difference 92: note = a, c, u, g, unknown, or other
  misc_difference 97: note = a, c, u, g, unknown, or other
  misc_difference 100: note = a, c, u, g, unknown, or other
  misc_difference 101: note = a, c, u, g, unknown, or other
  misc_difference 103: note = a, c, u, g, unknown, or other
  misc_difference 104: note = a, c, u, g, unknown, or other
  misc_difference 114: note = a, c, u, g, unknown, or other
  misc_difference 116: note = a, c, u, g, unknown, or other
  misc_difference 141: note = a, c, u, g, unknown, or other
  misc_difference 148: note = a, c, u, g, unknown, or other
  misc_difference 149: note = a, c, u, g, unknown, or other
  misc_difference 159: note = a, c, u, g, unknown, or other
  misc_difference 160: note = a, c, u, g, unknown, or other
  misc_difference 161: note = a, c, u, g, unknown, or other
  misc_difference 162: note = a, c, u, g, unknown, or other
  misc_difference 163: note = a, c, u, g, unknown, or other
  misc_difference 188: note = a, c, u, g, unknown, or other
  misc_difference 189: note = a, c, u, g, unknown, or other
  misc_difference 190: note = a, c, u, g, unknown, or other
  misc_difference 194: note = a, c, u, g, unknown, or other
  misc_difference 195: note = a, c, u, g, unknown, or other
  misc_difference 196: note = a, c, u, g, unknown, or other
  misc_difference 198: note = a, c, u, g, unknown, or other
  misc_difference 199: note = a, c, u, g, unknown, or other
  misc_difference 201: note = a, c, u, g, unknown, or other
  misc_difference 204: note = a, c, u, g, unknown, or other
  misc_difference 205: note = a, c, u, g, unknown, or other
  misc_difference 208: note = a, c, u, g, unknown, or other
  misc_difference 209: note = a, c, u, g, unknown, or other
  misc_difference 210: note = a, c, u, g, unknown, or other
  misc_difference 212: note = a, c, u, g, unknown, or other
  misc_difference 213: note = a, c, u, g, unknown, or other
  misc_difference 214: note = a, c, u, g, unknown, or other
  misc_difference 221: note = a, c, u, g, unknown, or other
  misc_difference 222: note = a, c, u, g, unknown, or other
  misc_difference 227: note = a, c, u, g, unknown, or other
  misc_difference 232: note = a, c, u, g, unknown, or other
rrnnnryyrrnrggttgcnnaggtnrrynnnnrnrtgatggcrnracaggtcggaccgcrrrrrnryaarcctgrnnnnnnnyyngnrcyynragyncrnnrnnragatgaggnynyyyyyrgcgraytccatcarggccngcagrcnnyrgyytgcannnnnaggccggatataagrcygcarccrnnncytnnnynngncrnnaynnnrnnnyyryytnncrarnygggnggygtycata

SEQ ID NO: 795437 - RNA, 241 nt, unidentified
  source 1..241: mol_type = unassigned RNA; note = ISBcen5
  misc_difference 22: note = a, c, u, g, unknown, or other
  misc_difference 31: note = a, c, u, g, unknown, or other
  misc_difference 44: note = a, c, u, g, unknown, or other
  misc_difference 45: note = a, c, u, g, unknown, or other
  misc_difference 51: note = a, c, u, g, unknown, or other
  misc_difference 76: note = a, c, u, g, unknown, or other
  misc_difference 77: note = a, c, u, g, unknown, or other
  misc_difference 78: note = a, c, u, g, unknown, or other
  misc_difference 79: note = a, c, u, g, unknown, or other
  misc_difference 80: note = a, c, u, g, unknown, or other
  misc_difference 81: note = a, c, u, g, unknown, or other
  misc_difference 82: note = a, c, u, g, unknown, or other
  misc_difference 83: note = a, c, u, g, unknown, or other
  misc_difference 84: note = a, c, u, g, unknown, or other
  misc_difference 100: note = a, c, u, g, unknown, or other
  misc_difference 101: note = a, c, u, g, unknown, or other
  misc_difference 102: note = a, c, u, g, unknown, or other
  misc_difference 103: note = a, c, u, g, unknown, or other
  misc_difference 104: note = a, c, u, g, unknown, or other
  misc_difference 133: note = a, c, u, g, unknown, or other
  misc_difference 140: note = a, c, u, g, unknown, or other
  misc_difference 146: note = a, c, u, g, unknown, or other
  misc_difference 147: note = a, c, u, g, unknown, or other
  misc_difference 148: note = a, c, u, g, unknown, or other
  misc_difference 149: note = a, c, u, g, unknown, or other
  misc_difference 150: note = a, c, u, g, unknown, or other
  misc_difference 151: note = a, c, u, g, unknown, or other
  misc_difference 152: note = a, c, u, g, unknown, or other
  misc_difference 154: note = a, c, u, g, unknown, or other
  misc_difference 162: note = a, c, u, g, unknown, or other
  misc_difference 163: note = a, c, u, g, unknown, or other
  misc_difference 188: note = a, c, u, g, unknown, or other
  misc_difference 189: note = a, c, u, g, unknown, or other
  misc_difference 197: note = a, c, u, g, unknown, or other
  misc_difference 199: note = a, c, u, g, unknown, or other
  misc_difference 201: note = a, c, u, g, unknown, or other
  misc_difference 202: note = a, c, u, g, unknown, or other
  misc_difference 203: note = a, c, u, g, unknown, or other
  misc_difference 208: note = a, c, u, g, unknown, or other
  misc_difference 209: note = a, c, u, g, unknown, or other
  misc_difference 212: note = a, c, u, g, unknown, or other
  misc_difference 213: note = a, c, u, g, unknown, or other
  misc_difference 214: note = a, c, u, g, unknown, or other
  misc_difference 217: note = a, c, u, g, unknown, or other
  misc_difference 218: note = a, c, u, g, unknown, or other
  misc_difference 219: note = a, c, u, g, unknown, or other
  misc_difference 225: note = a, c, u, g, unknown, or other
  misc_difference 230: note = a, c, u, g, unknown, or other
rygrrcgtcraaaggttgcgynrgyaatygnrygtgatgacarnncaggtnggaccgggactcrcyaaacctgrannnnnnnnngagcyyyragctcgynnnnnraatgaggygygrgtcagcgrattycatngrggccngcagcnnnnnnnynrgctgcannaaggccgratatararcygcarycnnycctgyynrncnnnrcrynnrrnnncynnngcarangggrnrcgyycatata

SEQ ID NO: 795438 - RNA, 223 nt, unidentified
  source 1..223: mol_type = unassigned RNA; note = ISBcen3
  misc_difference 23: note = a, c, u, g, unknown, or other
  misc_difference 24: note = a, c, u, g, unknown, or other
  misc_difference 42: note = a, c, u, g, unknown, or other
  misc_difference 56: note = a, c, u, g, unknown, or other
  misc_difference 57: note = a, c, u, g, unknown, or other
  misc_difference 65: note = a, c, u, g, unknown, or other
  misc_difference 66: note = a, c, u, g, unknown, or other
  misc_difference 67: note = a, c, u, g, unknown, or other
  misc_difference 68: note = a, c, u, g, unknown, or other
  misc_difference 69: note = a, c, u, g, unknown, or other
  misc_difference 70: note = a, c, u, g, unknown, or other
  misc_difference 71: note = a, c, u, g, unknown, or other
  misc_difference 73: note = a, c, u, g, unknown, or other
  misc_difference 74: note = a, c, u, g, unknown, or other
  misc_difference 75: note = a, c, u, g, unknown, or other
  misc_difference 82: note = a, c, u, g, unknown, or other
  misc_difference 91: note = a, c, u, g, unknown, or other
  misc_difference 92: note = a, c, u, g, unknown, or other
  misc_difference 93: note = a, c, u, g, unknown, or other
  misc_difference 94: note = a, c, u, g, unknown, or other
  misc_difference 95: note = a, c, u, g, unknown, or other
  misc_difference 99: note = a, c, u, g, unknown, or other
  misc_difference 100: note = a, c, u, g, unknown, or other
  misc_difference 105: note = a, c, u, g, unknown, or other
  misc_difference 106: note = a, c, u, g, unknown, or other
  misc_difference 117: note = a, c, u, g, unknown, or other
  misc_difference 132: note = a, c, u, g, unknown, or other
  misc_difference 134: note = a, c, u, g, unknown, or other
  misc_difference 138: note = a, c, u, g, unknown, or other
  misc_difference 139: note = a, c, u, g, unknown, or other
  misc_difference 140: note = a, c, u, g, unknown, or other
  misc_difference 142: note = a, c, u, g, unknown, or other
  misc_difference 146: note = a, c, u, g, unknown, or other
  misc_difference 149: note = a, c, u, g, unknown, or other
  misc_difference 150: note = a, c, u, g, unknown, or other
  misc_difference 151: note = a, c, u, g, unknown, or other
  misc_difference 169: note = a, c, u, g, unknown, or other
  misc_difference 178: note = a, c, u, g, unknown, or other
  misc_difference 180: note = a, c, u, g, unknown, or other
  misc_difference 184: note = a, c, u, g, unknown, or other
  misc_difference 186: note = a, c, u, g, unknown, or other
  misc_difference 187: note = a, c, u, g, unknown, or other
  misc_difference 196: note = a, c, u, g, unknown, or other
  misc_difference 199: note = a, c, u, g, unknown, or other
  misc_difference 204: note = a, c, u, g, unknown, or other
  misc_difference 215: note = a, c, u, g, unknown, or other
accgattgcycaggcratcaygnngtgatggcaaracaggtnagaccgtggyygrnnaarccygnnnnnnncnnngcrcyynragygcgynnnnnygannrrgrnnycrrycagcrnatyccatcagggacngnggcnnnrngccncrnnnaaagtccgratrtayggntgcaatctnyncctnynnrycrtcaynrantgarngcttggcaaanyrggggcg

SEQ ID NO: 795439 - RNA, 282 nt, unidentified
  source 1..282: mol_type = unassigned RNA; note = ISBli31
  misc_difference 1: note = a, c, u, g, unknown, or other
  misc_difference 5: note = a, c, u, g, unknown, or other
  misc_difference 6: note = a, c, u, g, unknown, or other
  misc_difference 7: note = a, c, u, g, unknown, or other
  misc_difference 36: note = a, c, u, g, unknown, or other
  misc_difference 53: note = a, c, u, g, unknown, or other
  misc_difference 55: note = a, c, u, g, unknown, or other
  misc_difference 57: note = a, c, u, g, unknown, or other
  misc_difference 59: note = a, c, u, g, unknown, or other
  misc_difference 68: note = a, c, u, g, unknown, or other
  misc_difference 69: note = a, c, u, g, unknown, or other
  misc_difference 70: note = a, c, u, g, unknown, or other
  misc_difference 71: note = a, c, u, g, unknown, or other
  misc_difference 72: note = a, c, u, g, unknown, or other
  misc_difference 73: note = a, c, u, g, unknown, or other
  misc_difference 74: note = a, c, u, g, unknown, or other
  misc_difference 75: note = a, c, u, g, unknown, or other
  misc_difference 76: note = a, c, u, g, unknown, or other
  misc_difference 77: note = a, c, u, g, unknown, or other
  misc_difference 84: note = a, c, u, g, unknown, or other
  misc_difference 85: note = a, c, u, g, unknown, or other
  misc_difference 86: note = a, c, u, g, unknown, or other
  misc_difference 87: note = a, c, u, g, unknown, or other
  misc_difference 88: note = a, c, u, g, unknown, or other
  misc_difference 89: note = a, c, u, g, unknown, or other
  misc_difference 98: note = a, c, u, g, unknown, or other
  misc_difference 99: note = a, c, u, g, unknown, or other
  misc_difference 100: note = a, c, u, g, unknown, or other
  misc_difference 101: note = a, c, u, g, unknown, or other
  misc_difference 102: note = a, c, u, g, unknown, or other
  misc_difference 103: note = a, c, u, g, unknown, or other
  misc_difference 106: note = a, c, u, g, unknown, or other
  misc_difference 114: note = a, c, u, g, unknown, or other
  misc_difference 117: note = a, c, u, g, unknown, or other
  misc_difference 120: note = a, c, u, g, unknown, or other
  misc_difference 121: note = a, c, u, g, unknown, or other
  misc_difference 122: note = a, c, u, g, unknown, or other
  misc_difference 137: note = a, c, u, g, unknown, or other
  misc_difference 138: note = a, c, u, g, unknown, or other
  misc_difference 177: note = a, c, u, g, unknown, or other
  misc_difference 181: note = a, c, u, g, unknown, or other
  misc_difference 182: note = a, c, u, g, unknown, or other
  misc_difference 183: note = a, c, u, g, unknown, or other
  misc_difference 184: note = a, c, u, g, unknown, or other
  misc_difference 185: note = a, c, u, g, unknown, or other
  misc_difference 188: note = a, c, u, g, unknown, or other
  misc_difference 204: note = a, c, u, g, unknown, or other
  misc_difference 205: note = a, c, u, g, unknown, or other
  misc_difference 225: note = a, c, u, g, unknown, or other
  misc_difference 245: note = a, c, u, g, unknown, or other
  misc_difference 246: note = a, c, u, g, unknown, or other
  misc_difference 247: note = a, c, u, g, unknown, or other
  misc_difference 248: note = a, c, u, g, unknown, or other
  misc_difference 256: note = a, c, u, g, unknown, or other
  misc_difference 257: note = a, c, u, g, unknown, or other
  misc_difference 260: note = a, c, u, g, unknown, or other
  misc_difference 266: note = a, c, u, g, unknown, or other
  misc_difference 268: note = a, c, u, g, unknown, or other
  misc_difference 269: note = a, c, u, g, unknown, or other
  misc_difference 270: note = a, c, u, g, unknown, or other
  misc_difference 271: note = a, c, u, g, unknown, or other
  misc_difference 279: note = a, c, u, g, unknown, or other
  misc_difference 280: note = a, c, u, g, unknown, or other
  misc_difference 281: note = a, c, u, g, unknown, or other
  misc_difference 282: note = a, c, u, g, unknown, or other
ntyrnnnyrgctggtcygggacyggctgrcrgrrynggyryyggycgyyyyrnynynrnygtgactcnnnnnnnnnntgrccynnnnnnggtgycytnnnnnnganytgtccrnyynrrnnnggryggccggyrccnnycyggcccacyycggtrrcytgatyagaagrytgyccrncyynnnnnrgnygtgrcycrtcacagnnytgyyccgrrgtgayyyyyncccrgrcyggyrccggccrnnnnrcggccrnnycnyryccnynnnnrggaaggnnnn

SEQ ID NO: 795440 - RNA, 221 nt, unidentified
  source 1..221: mol_type = unassigned RNA; note = ISPst6
  misc_difference 1: note = a, c, u, g, unknown, or other
  misc_difference 2: note = a, c, u, g, unknown, or other
  misc_difference 9: note = a, c, u, g, unknown, or other
  misc_difference 10: note = a, c, u, g, unknown, or other
  misc_difference 11: note = a, c, u, g, unknown, or other
  misc_difference 15: note = a, c, u, g, unknown, or other
  misc_difference 16: note = a, c, u, g, unknown, or other
  misc_difference 17: note = a, c, u, g, unknown, or other
  misc_difference 18: note = a, c, u, g, unknown, or other
  misc_difference 19: note = a, c, u, g, unknown, or other
  misc_difference 20: note = a, c, u, g, unknown, or other
  misc_difference 21: note = a, c, u, g, unknown, or other
  misc_difference 22: note = a, c, u, g, unknown, or other
  misc_difference 23: note = a, c, u, g, unknown, or other
  misc_difference 24: note = a, c, u, g, unknown, or other
  misc_difference 25: note = a, c, u, g, unknown, or other
  misc_difference 26: note = a, c, u, g, unknown, or other
  misc_difference 33: note = a, c, u, g, unknown, or other
  misc_difference 34: note = a, c, u, g, unknown, or other
  misc_difference 35: note = a, c, u, g, unknown, or other
  misc_difference 37: note = a, c, u, g, unknown, or other
  misc_difference 44: note = a, c, u, g, unknown, or other
  misc_difference 47: note = a, c, u, g, unknown, or other
  misc_difference 52: note = a, c, u, g, unknown, or other
  misc_difference 56: note = a, c, u, g, unknown, or other
  misc_difference 57: note = a, c, u, g, unknown, or other
  misc_difference 69: note = a, c, u, g, unknown, or other
  misc_difference 70: note = a, c, u, g, unknown, or other
  misc_difference 71: note = a, c, u, g, unknown, or other
  misc_difference 72: note = a, c, u, g, unknown, or other
  misc_difference 73: note = a, c, u, g, unknown, or other
  misc_difference 79: note = a, c, u, g, unknown, or other
  misc_difference 80: note = a, c, u, g, unknown, or other
  misc_difference 82: note = a, c, u, g, unknown, or other
  misc_difference 90: note = a, c, u, g, unknown, or other
  misc_difference 92: note = a, c, u, g, unknown, or other
  misc_difference 93: note = a, c, u, g, unknown, or other
  misc_difference 94: note = a, c, u, g, unknown, or other
  misc_difference 96: note = a, c, u, g, unknown, or other
  misc_difference 109: note = a, c, u, g, unknown, or other
  misc_difference 118: note = a, c, u, g, unknown, or other
  misc_difference 125: note = a, c, u, g, unknown, or other
  misc_difference 132: note = a, c, u, g, unknown, or other
  misc_difference 136: note = a, c, u, g, unknown, or other
  misc_difference 138: note = a, c, u, g, unknown, or other
  misc_difference 139: note = a, c, u, g, unknown, or other
  misc_difference 140: note = a, c, u, g, unknown, or other
  misc_difference 141: note = a, c, u, g, unknown, or other
  misc_difference 143: note = a, c, u, g, unknown, or other
  misc_difference 144: note = a, c, u, g, unknown, or other
  misc_difference 145: note = a, c, u, g, unknown, or other
  misc_difference 150: note = a, c, u, g, unknown, or other
  misc_difference 151: note = a, c, u, g, unknown, or other
  misc_difference 152: note = a, c, u, g, unknown, or other
  misc_difference 153: note = a, c, u, g, unknown, or other
  misc_difference 154: note = a, c, u, g, unknown, or other
  misc_difference 163: note = a, c, u, g, unknown, or other
  misc_difference 178: note = a, c, u, g, unknown, or other
  misc_difference 179: note = a, c, u, g, unknown, or other
  misc_difference 180: note = a, c, u, g, unknown, or other
  misc_difference 183: note = a, c, u, g, unknown, or other
  misc_difference 184: note = a, c, u, g, unknown, or other
  misc_difference 185: note = a, c, u, g, unknown, or other
  misc_difference 186: note = a, c, u, g, unknown, or other
  misc_difference 187: note = a, c, u, g, unknown, or other
  misc_difference 190: note = a, c, u, g, unknown, or other
  misc_difference 192: note = a, c, u, g, unknown, or other
  misc_difference 193: note = a, c, u, g, unknown, or other
  misc_difference 194: note = a, c, u, g, unknown, or other
  misc_difference 195: note = a, c, u, g, unknown, or other
  misc_difference 197: note = a, c, u, g, unknown, or other
  misc_difference 198: note = a, c, u, g, unknown, or other
  misc_difference 199: note = a, c, u, g, unknown, or other
  misc_difference 200: note = a, c, u, g, unknown, or other
  misc_difference 201: note = a, c, u, g, unknown, or other
  misc_difference 202: note = a, c, u, g, unknown, or other
  misc_difference 203: note = a, c, u, g, unknown, or other
  misc_difference 204: note = a, c, u, g, unknown, or other
  misc_difference 207: note = a, c, u, g, unknown, or other
  misc_difference 208: note = a, c, u, g, unknown, or other
  misc_difference 210: note = a, c, u, g, unknown, or other
  misc_difference 214: note = a, c, u, g, unknown, or other
nnrrytgynnngrrnnnnnnnnnnnnatgrcrnnncngryyrgnccnryrynrgrnnargccgataacnnnnntgrycnnynrrggycgnynnnancgattggcyccynrygcgcgrnytycatnatggccnggrnynnnnrnnnyccannnnnaggccgranatacgrytgcarycnnncynnnnnygnynnnnynnnnnnnnrynnynygynrgrggag

SEQ ID NO: 795441 - RNA, 176 nt, unidentified
  source 1..176: mol_type = unassigned RNA; note = ISRfsp2
  misc_difference 1: note = a, c, u, g, unknown, or other
  misc_difference 2: note = a, c, u, g, unknown, or other
  misc_difference 3: note = a, c, u, g, unknown, or other
  misc_difference 4: note = a, c, u, g, unknown, or other
  misc_difference 5: note = a, c, u, g, unknown, or other
  misc_difference 6: note = a, c, u, g, unknown, or other
  misc_difference 7: note = a, c, u, g, unknown, or other
  misc_difference 9: note = a, c, u, g, unknown, or other
  misc_difference 10: note = a, c, u, g, unknown, or other
  misc_difference 11: note = a, c, u, g, unknown, or other
  misc_difference 12: note = a, c, u, g, unknown, or other
  misc_difference 13: note = a, c, u, g, unknown, or other
  misc_difference 14: note = a, c, u, g, unknown, or other
  misc_difference 15: note = a, c, u, g, unknown, or other
  misc_difference 16: note = a, c, u, g, unknown, or other
  misc_difference 17: note = a, c, u, g, unknown, or other
  misc_difference 18: note = a, c, u, g, unknown, or other
  misc_difference 19: note = a, c, u, g, unknown, or other
  misc_difference 20: note = a, c, u, g, unknown, or other
  misc_difference 21: note = a, c, u, g, unknown, or other
  misc_difference 22: note = a, c, u, g, unknown, or other
  misc_difference 23: note = a, c, u, g, unknown, or other
  misc_difference 25: note = a, c, u, g, unknown, or other
  misc_difference 26: note = a, c, u, g, unknown, or other
  misc_difference 27: note = a, c, u, g, unknown, or other
  misc_difference 28: note = a, c, u, g, unknown, or other
  misc_difference 29: note = a, c, u, g, unknown, or other
  misc_difference 30: note = a, c, u, g, unknown, or other
  misc_difference 42: note = a, c, u, g, unknown, or other
  misc_difference 46: note = a, c, u, g, unknown, or other
  misc_difference 48: note = a, c, u, g, unknown, or other
  misc_difference 49: note = a, c, u, g, unknown, or other
  misc_difference 50: note = a, c, u, g, unknown, or other
  misc_difference 51: note = a, c, u, g, unknown, or other
  misc_difference 54: note = a, c, u, g, unknown, or other
  misc_difference 55: note = a, c, u, g, unknown, or other
  misc_difference 60: note = a, c, u, g, unknown, or other
  misc_difference 61: note = a, c, u, g, unknown, or other
  misc_difference 62: note = a, c, u, g, unknown, or other
  misc_difference 63: note = a, c, u, g, unknown, or other
  misc_difference 72: note = a, c, u, g, unknown, or other
  misc_difference 74: note = a, c, u, g, unknown, or other
  misc_difference 75: note = a, c, u, g, unknown, or other
  misc_difference 76: note = a, c, u, g, unknown, or other
  misc_difference 80: note = a, c, u, g, unknown, or other
  misc_difference 81: note = a, c, u, g, unknown, or other
  misc_difference 96: note = a, c, u, g, unknown, or other
  misc_difference 97: note = a, c, u, g, unknown, or other
  misc_difference 98: note = a, c, u, g, unknown, or other
  misc_difference 99: note = a, c, u, g, unknown, or other
  misc_difference 100: note = a, c, u, g, unknown, or other
  misc_difference 102: note = a, c, u, g, unknown, or other
  misc_difference 103: note = a, c, u, g, unknown, or other
  misc_difference 104: note = a, c, u, g, unknown, or other
  misc_difference 105: note = a, c, u, g, unknown, or other
  misc_difference 106: note = a, c, u, g, unknown, or other
  misc_difference 107: note = a, c, u, g, unknown, or other
  misc_difference 124: note = a, c, u, g, unknown, or other
  misc_difference 129: note = a, c, u, g, unknown, or other
  misc_difference 130: note = a, c, u, g, unknown, or other
  misc_difference 131: note = a, c, u, g, unknown, or other
  misc_difference 132: note = a, c, u, g, unknown, or other
  misc_difference 144: note = a, c, u, g, unknown, or other
  misc_difference 152: note = a, c, u, g, unknown, or other
  misc_difference 158: note = a, c, u, g, unknown, or other
  misc_difference 159: note = a, c, u, g, unknown, or other
  misc_difference 160: note = a, c, u, g, unknown, or other
  misc_difference 161: note = a, c, u, g, unknown, or other
  misc_difference 162: note = a, c, u, g, unknown, or other
  misc_difference 163: note = a, c, u, g, unknown, or other
  misc_difference 164: note = a, c, u, g, unknown, or other
  misc_difference 165: note = a, c, u, g, unknown, or other
  misc_difference 166: note = a, c, u, g, unknown, or other
  misc_difference 167: note = a, c, u, g, unknown, or other
  misc_difference 172: note = a, c, u, g, unknown, or other
  misc_difference 175: note = a, c, u, g, unknown, or other
  misc_difference 176: note = a, c, u, g, unknown, or other
nnnnnnnrnnnnnnnnnnnnnnnrnnnnnnrgryrygryagnccgnynnnnyynnggtynnnnragrccgynrnnnagcnnrggtcgycryrycynnnnnynnnnnnagcccgracagttgyyngggcnnnnragcccgyatynygcaaggnygggynnnnnnnnnnggrgnrynn

SEQ ID NO: 795442 - RNA, 236 nt, unidentified
  source 1..236: mol_type = unassigned RNA; note = ISPpr8
  misc_difference 3: note = a, c, u, g, unknown, or other
  misc_difference 4: note = a, c, u, g, unknown, or other
  misc_difference 7: note = a, c, u, g, unknown, or other
  misc_difference 8: note = a, c, u, g, unknown, or other
  misc_difference 9: note = a, c, u, g, unknown, or other
  misc_difference 10: note = a, c, u, g, unknown, or other
  misc_difference 17: note = a, c, u, g, unknown, or other
  misc_difference 18: note = a, c, u, g, unknown, or other
  misc_difference 22: note = a, c, u, g, unknown, or other
  misc_difference 23: note = a, c, u, g, unknown, or other
  misc_difference 24: note = a, c, u, g, unknown, or other
  misc_difference 25: note = a, c, u, g, unknown, or other
  misc_difference 26: note = a, c, u, g, unknown, or other
  misc_difference 28: note = a, c, u, g, unknown, or other
  misc_difference 29: note = a, c, u, g, unknown, or other
  misc_difference 30: note = a, c, u, g, unknown, or other
  misc_difference 31: note = a, c, u, g, unknown, or other
  misc_difference 32: note = a, c, u, g, unknown, or other
  misc_difference 40: note = a, c, u, g, unknown, or other
  misc_difference 43: note = a, c, u, g, unknown, or other
  misc_difference 44: note = a, c, u, g, unknown, or other
  misc_difference 54: note = a, c, u, g, unknown, or other
  misc_difference 57: note = a, c, u, g, unknown, or other
  misc_difference 59: note = a, c, u, g, unknown, or other
  misc_difference 60: note = a, c, u, g, unknown, or other
  misc_difference 62: note = a, c, u, g, unknown, or other
  misc_difference 71: note = a, c, u, g, unknown, or other
  misc_difference 72: note = a, c, u, g, unknown, or other
  misc_difference 73: note = a, c, u, g, unknown, or other
  misc_difference 74: note = a, c, u, g, unknown, or other
  misc_difference 75: note = a, c, u, g, unknown, or other
  misc_difference 76: note = a, c, u, g, unknown, or other
  misc_difference 77: note = a, c, u, g, unknown, or other
  misc_difference 79: note = a, c, u, g, unknown, or other
  misc_difference 80: note = a, c, u, g, unknown, or other
  misc_difference 81: note = a, c, u, g, unknown, or other
  misc_difference 86: note = a, c, u, g, unknown, or other
  misc_difference 87: note = a, c, u, g, unknown, or other
  misc_difference 88: note = a, c, u, g, unknown, or other
  misc_difference 89: note = a, c, u, g, unknown, or other
  misc_difference 90: note = a, c, u, g, unknown, or other
  misc_difference 97: note = a, c, u, g, unknown, or other
  misc_difference 98: note = a, c, u, g, unknown, or other
  misc_difference 99: note = a, c, u, g, unknown, or other
  misc_difference 101: note = a, c, u, g, unknown, or other
  misc_difference 102: note = a, c, u, g, unknown, or other
  misc_difference 107: note = a, c, u, g, unknown, or other
  misc_difference 111: note = a, c, u, g, unknown, or other
  misc_difference 113: note = a, c, u, g, unknown, or other
  misc_difference 115: note = a, c, u, g, unknown, or other
  misc_difference 117: note = a, c, u, g, unknown, or other
  misc_difference 125: note = a, c, u, g, unknown, or other
  misc_difference 126: note = a, c, u, g, unknown, or other
  misc_difference 127: note = a, c, u, g, unknown, or other
  misc_difference 139: note = a, c, u, g, unknown, or other
  misc_difference 144: note = a, c, u, g, unknown, or other
  misc_difference 145: note = a, c, u, g, unknown, or other
  misc_difference 146: note = a, c, u, g, unknown, or other
  misc_difference 147: note = a, c, u, g, unknown, or other
  misc_difference 148: note = a, c, u, g, unknown, or other
  misc_difference 149: note = a, c, u, g, unknown, or other
  misc_difference 150: note = a, c, u, g, unknown, or other
  misc_difference 151: note = a, c, u, g, unknown, or other
  misc_difference 152: note = a, c, u, g, unknown, or other
  misc_difference 153: note = a, c, u, g, unknown, or other
  misc_difference 159: note = a, c, u, g, unknown, or other
  misc_difference 160: note = a, c, u, g, unknown, or other
  misc_difference 161: note = a, c, u, g, unknown, or other
  misc_difference 162: note = a, c, u, g, unknown, or other
  misc_difference 163: note = a, c, u, g, unknown, or other
  misc_difference 178: note = a, c, u, g, unknown, or other
  misc_difference 179: note = a, c, u, g, unknown, or other
  misc_difference 180: note = a, c, u, g, unknown, or other
  misc_difference 186: note = a, c, u, g, unknown, or other
  misc_difference 187: note = a, c, u, g, unknown, or other
  misc_difference 188: note = a, c, u, g, unknown, or other
  misc_difference 189: note = a, c, u, g, unknown, or other
  misc_difference 191: note = a, c, u, g, unknown, or other
  misc_difference 193: note = a, c, u, g, unknown, or other
  misc_difference 195: note = a, c, u, g, unknown, or other
  misc_difference 196: note = a, c, u, g, unknown, or other
  misc_difference 198: note = a, c, u, g, unknown, or other
  misc_difference 199: note = a, c, u, g, unknown, or other
  misc_difference 200: note = a, c, u, g, unknown, or other
  misc_difference 202: note = a, c, u, g, unknown, or other
  misc_difference 204: note = a, c, u, g, unknown, or other
  misc_difference 205: note = a, c, u, g, unknown, or other
  misc_difference 206: note = a, c, u, g, unknown, or other
  misc_difference 207: note = a, c, u, g, unknown, or other
  misc_difference 208: note = a, c, u, g, unknown, or other
  misc_difference 209: note = a, c, u, g, unknown, or other
  misc_difference 210: note = a, c, u, g, unknown, or other
  misc_difference 211: note = a, c, u, g, unknown, or other
  misc_difference 212: note = a, c, u, g, unknown, or other
  misc_difference 213: note = a, c, u, g, unknown, or other
  misc_difference 221: note = a, c, u, g, unknown, or other
  misc_difference 222: note = a, c, u, g, unknown, or other
  misc_difference 223: note = a, c, u, g, unknown, or other
  misc_difference 227: note = a, c, u, g, unknown, or other
  misc_difference 228: note = a, c, u, g, unknown, or other
  misc_difference 231: note = a, c, u, g, unknown, or other
yynnyynnnnrrttgcnnrrrnnnnnynnnnngatgryrnrannggtyrraccngynynnynrraacctgnnnnnnncnnnggyynnnnnarrccgnnnrnntgatnaggnrnrnrngygcrrannnccatcrrggcynrrrrnnnnnnnnnnyyycrnnnnnargccgratataygnnngcarynnnnynynynnynnnynrnnnnnnnnnncttgcaannngrrnnrgnccatr

SEQ ID NO: 795443 - RNA, 176 nt, unidentified
  source 1..176: mol_type = unassigned RNA; note = ISHne3
  misc_difference 1: note = a, c, u, g, unknown, or other
  misc_difference 2: note = a, c, u, g, unknown, or other
  misc_difference 3: note = a, c, u, g, unknown, or other
  misc_difference 4: note = a, c, u, g, unknown, or other
  misc_difference 5: note = a, c, u, g, unknown, or other
  misc_difference 6: note = a, c, u, g, unknown, or other
  misc_difference 8: note = a, c, u, g, unknown, or other
  misc_difference 9: note = a, c, u, g, unknown, or other
  misc_difference 10: note = a, c, u, g, unknown, or other
  misc_difference 15: note = a, c, u, g, unknown, or other
  misc_difference 16: note = a, c, u, g, unknown, or other
  misc_difference 17: note = a, c, u, g, unknown, or other
  misc_difference 18: note = a, c, u, g, unknown, or other
  misc_difference 20: note = a, c, u, g, unknown, or other
  misc_difference 21: note = a, c, u, g, unknown, or other
  misc_difference 22: note = a, c, u, g, unknown, or other
  misc_difference 24: note = a, c, u, g, unknown, or other
  misc_difference 25: note = a, c, u, g, unknown, or other
  misc_difference 26: note = a, c, u, g, unknown, or other
  misc_difference 27: note = a, c, u, g, unknown, or other
  misc_difference 29: note = a, c, u, g, unknown, or other
  misc_difference 30: note = a, c, u, g, unknown, or other
  misc_difference 35: note = a, c, u, g, unknown, or other
  misc_difference 48: note = a, c, u, g, unknown, or other
  misc_difference 52: note = a, c, u, g, unknown, or other
  misc_difference 53: note = a, c, u, g, unknown, or other
  misc_difference 54: note = a, c, u, g, unknown, or other
  misc_difference 55: note = a, c, u, g, unknown, or other
  misc_difference 56: note = a, c, u, g, unknown, or other
  misc_difference 57: note = a, c, u, g, unknown, or other
  misc_difference 61: note = a, c, u, g, unknown, or other
  misc_difference 64: note = a, c, u, g, unknown, or other
  misc_difference 66: note = a, c, u, g, unknown, or other
  misc_difference 67: note = a, c, u, g, unknown, or other
  misc_difference 68: note = a, c, u, g, unknown, or other
  misc_difference 69: note = a, c, u, g, unknown, or other
  misc_difference 73: note = a, c, u, g, unknown, or other
  misc_difference 78: note = a, c, u, g, unknown, or other
  misc_difference 79: note = a, c, u, g, unknown, or other
  misc_difference 80: note = a, c, u, g, unknown, or other
  misc_difference 81: note = a, c, u, g, unknown, or other
  misc_difference 86: note = a, c, u, g, unknown, or other
  misc_difference 87: note = a, c, u, g, unknown, or other
  misc_difference 90: note = a, c, u, g, unknown, or other
  misc_difference 91: note = a, c, u, g, unknown, or other
  misc_difference 104: note = a, c, u, g, unknown, or other
  misc_difference 108: note = a, c, u, g, unknown, or other
  misc_difference 109: note = a, c, u, g, unknown, or other
  misc_difference 128: note = a, c, u, g, unknown, or other
  misc_difference 136: note = a, c, u, g, unknown, or other
  misc_difference 137: note = a, c, u, g, unknown, or other
  misc_difference 138: note = a, c, u, g, unknown, or other
  misc_difference 139: note = a, c, u, g, unknown, or other
  misc_difference 149: note = a, c, u, g, unknown, or other
  misc_difference 151: note = a, c, u, g, unknown, or other
  misc_difference 152: note = a, c, u, g, unknown, or other
  misc_difference 164: note = a, c, u, g, unknown, or other
  misc_difference 165: note = a, c, u, g, unknown, or other
  misc_difference 171: note = a, c, u, g, unknown, or other
  misc_difference 172: note = a, c, u, g, unknown, or other
  misc_difference 173: note = a, c, u, g, unknown, or other
  misc_difference 174: note = a, c, u, g, unknown, or other
  misc_difference 175: note = a, c, u, g, unknown, or other
nnnnnncnnnryyrnnnnannnynnnnrnngcggnrrcggrygggagnccgnnnnnnccynggnynnnnragnccgynnnngagcnnggnncyccryccgyyrntycnnyrarcccgaacagtcgcyngggccgynnnncgagcccgyntnngcaaggaygggnnatggannnnny

SEQ ID NO: 795444 - RNA, 139 nt, unidentified
  source 1..139: mol_type = unassigned RNA; note = ISC1190
  misc_difference 1: note = a, c, u, g, unknown, or other
  misc_difference 2: note = a, c, u, g, unknown, or other
  misc_difference 3: note = a, c, u, g, unknown, or other
  misc_difference 4: note = a, c, u, g, unknown, or other
  misc_difference 5: note = a, c, u, g, unknown, or other
  misc_difference 6: note = a, c, u, g, unknown, or other
  misc_difference 7: note = a, c, u, g, unknown, or other
  misc_difference 8: note = a, c, u, g, unknown, or other
  misc_difference 9: note = a, c, u, g, unknown, or other
  misc_difference 11: note = a, c, u, g, unknown, or other
  misc_difference 12: note = a, c, u, g, unknown, or other
  misc_difference 14: note = a, c, u, g, unknown, or other
  misc_difference 15: note = a, c, u, g, unknown, or other
  misc_difference 16: note = a, c, u, g, unknown, or other
  misc_difference 18: note = a, c, u, g, unknown, or other
  misc_difference 19: note = a, c, u, g, unknown, or other
  misc_difference 20: note = a, c, u, g, unknown, or other
  misc_difference 23: note = a, c, u, g, unknown, or other
  misc_difference 24: note = a, c, u, g, unknown, or other
  misc_difference 25: note = a, c, u, g, unknown, or other
  misc_difference 26: note = a, c, u, g, unknown, or other
  misc_difference 27: note = a, c, u, g, unknown, or other
  misc_difference 28: note = a, c, u, g, unknown, or other
  misc_difference 29: note = a, c, u, g, unknown, or other
  misc_difference 30: note = a, c, u, g, unknown, or other
  misc_difference 31: note = a, c, u, g, unknown, or other
  misc_difference 33: note = a, c, u, g, unknown, or other
  misc_difference 37: note = a, c, u, g, unknown, or other
  misc_difference 39: note = a, c, u, g, unknown, or other
  misc_difference 42: note = a, c, u, g, unknown, or other
  misc_difference 46: note = a, c, u, g, unknown, or other
  misc_difference 47: note = a, c, u, g, unknown, or other
  misc_difference 48: note = a, c, u, g, unknown, or other
  misc_difference 49: note = a, c, u, g, unknown, or other
  misc_difference 50: note = a, c, u, g, unknown, or other
  misc_difference 51: note = a, c, u, g, unknown, or other
  misc_difference 52: note = a, c, u, g, unknown, or other
  misc_difference 53: note = a, c, u, g, unknown, or other
  misc_difference 54: note = a, c, u, g, unknown, or other
  misc_difference 55: note = a, c, u, g, unknown, or other
  misc_difference 56: note = a, c, u, g, unknown, or other
  misc_difference 57: note = a, c, u, g, unknown, or other
  misc_difference 60: note = a, c, u, g, unknown, or other
  misc_difference 61: note = a, c, u, g, unknown, or other
  misc_difference 62: note = a, c, u, g, unknown, or other
  misc_difference 63: note = a, c, u, g, unknown, or other
  misc_difference 65: note = a, c, u, g, unknown, or other
  misc_difference 66: note = a, c, u, g, unknown, or other
  misc_difference 68: note = a, c, u, g, unknown, or other
  misc_difference 69: note = a, c, u, g, unknown, or other
  misc_difference 70: note = a, c, u, g, unknown, or other
  misc_difference 71: note = a, c, u, g, unknown, or other
  misc_difference 72: note = a, c, u, g, unknown, or other
  misc_difference 73: note = a, c, u, g, unknown, or other
  misc_difference 74: note = a, c, u, g, unknown, or other
  misc_difference 75: note = a, c, u, g, unknown, or other
  misc_difference 79: note = a, c, u, g, unknown, or other
  misc_difference 81: note = a, c, u, g, unknown, or other
  misc_difference 82: note = a, c, u, g, unknown, or other
  misc_difference 86: note = a, c, u, g, unknown, or other
  misc_difference 92: note = a, c, u, g, unknown, or other
  misc_difference 93: note = a, c, u, g, unknown, or other
  misc_difference 94: note = a, c, u, g, unknown, or other
  misc_difference 95: note = a, c, u, g, unknown, or other
  misc_difference 96: note = a, c, u, g, unknown, or other
  misc_difference 100: note = a, c, u, g, unknown, or other
  misc_difference 101: note = a, c, u, g, unknown, or other
  misc_difference 102: note = a, c, u, g, unknown, or other
  misc_difference 103: note = a, c, u, g, unknown, or other
  misc_difference 104: note = a, c, u, g, unknown, or other
  misc_difference 105: note = a, c, u, g, unknown, or other
  misc_difference 106: note = a, c, u, g, unknown, or other
  misc_difference 109: note = a, c, u, g, unknown, or other
  misc_difference 116: note = a, c, u, g, unknown, or other
  misc_difference 117: note = a, c, u, g, unknown, or other
  misc_difference 118: note = a, c, u, g, unknown, or other
  misc_difference 119: note = a, c, u, g, unknown, or other
  misc_difference 120: note = a, c, u, g, unknown, or other
  misc_difference 121: note = a, c, u, g, unknown, or other
  misc_difference 122: note = a, c, u, g, unknown, or other
  misc_difference 123: note = a, c, u, g, unknown, or other
  misc_difference 124: note = a, c, u, g, unknown, or other
  misc_difference 127: note = a, c, u, g, unknown, or other
  misc_difference 129: note = a, c, u, g, unknown, or other
  misc_difference 133: note = a, c, u, g, unknown, or other
  misc_difference 136: note = a, c, u, g, unknown, or other
  misc_difference 137: note = a, c, u, g, unknown, or other
  misc_difference 138: note = a, c, u, g, unknown, or other
  misc_difference 139: note = a, c, u, g, unknown, or other
nnnnnnnnnrnnrnnnrnnnyrnnnnnnnnnynrrrnynranyyynnnnnnnnnnnnrrnnnnynnynnnnnnnnyyynannyyrnayrrynnnnnrrrnnnnnnnrrnyyyryrnnnnnnnnnrrnynrrrnrrnnnn

SEQ ID NO: 795445 - RNA, 279 nt, unidentified
  source 1..279: mol_type = unassigned RNA; note = ISAar18
  misc_difference 2: note = a, c, u, g, unknown, or other
  misc_difference 3: note = a, c, u, g, unknown, or other
  misc_difference 28: note = a, c, u, g, unknown, or other
  misc_difference 32: note = a, c, u, g, unknown, or other
  misc_difference 33: note = a, c, u, g, unknown, or other
  misc_difference 50: note = a, c, u, g, unknown, or other
  misc_difference 52: note = a, c, u, g, unknown, or other
  misc_difference 53: note = a, c, u, g, unknown, or other
  misc_difference 56: note = a, c, u, g, unknown, or other
  misc_difference 65: note = a, c, u, g, unknown, or other
  misc_difference 66: note = a, c, u, g, unknown, or other
  misc_difference 67: note = a, c, u, g, unknown, or other
  misc_difference 68: note = a, c, u, g, unknown, or other
  misc_difference 69: note = a, c, u, g, unknown, or other
  misc_difference 70: note = a, c, u, g, unknown, or other
  misc_difference 71: note = a, c, u, g, unknown, or other
  misc_difference 72: note = a, c, u, g, unknown, or other
  misc_difference 73: note = a, c, u, g, unknown, or other
  misc_difference 74: note = a, c, u, g, unknown, or other
  misc_difference 82: note = a, c, u, g, unknown, or other
  misc_difference 83: note = a, c, u, g, unknown, or other
  misc_difference 84: note = a, c, u, g, unknown, or other
  misc_difference 85: note = a, c, u, g, unknown, or other
  misc_difference 86: note = a, c, u, g, unknown, or other
  misc_difference 95: note = a, c, u, g, unknown, or other
  misc_difference 96: note = a, c, u, g, unknown, or other
  misc_difference 97: note = a, c, u, g, unknown, or other
  misc_difference 98: note = a, c, u, g, unknown, or other
  misc_difference 99: note = a, c, u, g, unknown, or other
  misc_difference 100: note = a, c, u, g, unknown, or other
  misc_difference 103: note = a, c, u, g, unknown, or other
  misc_difference 111: note = a, c, u, g, unknown, or other
  misc_difference 114: note = a, c, u, g, unknown, or other
  misc_difference 115: note = a, c, u, g, unknown, or other
  misc_difference 117: note = a, c, u, g, unknown, or other
  misc_difference 118: note = a, c, u, g, unknown, or other
  misc_difference 119: note = a, c, u, g, unknown, or other
  misc_difference 134: note = a, c, u, g, unknown, or other
  misc_difference 135: note = a, c, u, g, unknown, or other
  misc_difference 166: note = a, c, u, g, unknown, or other
  misc_difference 174: note = a, c, u, g, unknown, or other
  misc_difference 178: note = a, c, u, g, unknown, or other
  misc_difference 179: note = a, c, u, g, unknown, or other
  misc_difference 180: note = a, c, u, g, unknown, or other
  misc_difference 184: note = a, c, u, g, unknown, or other
  misc_difference 200: note = a, c, u, g, unknown, or other
  misc_difference 201: note = a, c, u, g, unknown, or other
  misc_difference 221: note = a, c, u, g, unknown, or other
  misc_difference 241: note = a, c, u, g, unknown, or other
  misc_difference 242: note = a, c, u, g, unknown, or other
  misc_difference 243: note = a, c, u, g, unknown, or other
  misc_difference 244: note = a, c, u, g, unknown, or other
  misc_difference 253: note = a, c, u, g, unknown, or other
  misc_difference 256: note = a, c, u, g, unknown, or other
  misc_difference 257: note = a, c, u, g, unknown, or other
  misc_difference 262: note = a, c, u, g, unknown, or other
  misc_difference 263: note = a, c, u, g, unknown, or other
  misc_difference 264: note = a, c, u, g, unknown, or other
  misc_difference 265: note = a, c, u, g, unknown, or other
  misc_difference 266: note = a, c, u, g, unknown, or other
  misc_difference 267: note = a, c, u, g, unknown, or other
  misc_difference 268: note = a, c, u, g, unknown, or other
  misc_difference 269: note = a, c, u, g, unknown, or other
  misc_difference 276: note = a, c, u, g, unknown, or other
  misc_difference 277: note = a, c, u, g, unknown, or other
  misc_difference 278: note = a, c, u, g, unknown, or other
rnnryggctggtcygggacyggctgrcnrgrnnggyryyggycgyyyyrnynngrnygtgactcnnnnnnnnnntgrccyynnnnnrgtgycytnnnnnnganytgtccgnyynngnnnggryggccgrcrccnnycyggcccacyycggtgrcytgatyagragnytgyccrncyynnnrggnygtgrcycrtcacagnnytgyyccgrrgtgayyyyyncccrgryyggyrccggccrnnnngcgrccrrnccnnryccnnnnnnnngraaggnnny

SEQ ID NO: 795446 - RNA, 196 nt, unidentified
  source 1..196: mol_type = unassigned RNA; note = ISAli8
  misc_difference 1: note = a, c, u, g, unknown, or other
  misc_difference 2: note = a, c, u, g, unknown, or other
  misc_difference 3: note = a, c, u, g, unknown, or other
  misc_difference 4: note = a, c, u, g, unknown, or other
  misc_difference 9: note = a, c, u, g, unknown, or other
  misc_difference 12: note = a, c, u, g, unknown, or other
  misc_difference 13: note = a, c, u, g, unknown, or other
  misc_difference 14: note = a, c, u, g, unknown, or other
  misc_difference 15: note = a, c, u, g, unknown, or other
  misc_difference 16: note = a, c, u, g, unknown, or other
  misc_difference 19: note = a, c, u, g, unknown, or other
  misc_difference 20: note = a, c, u, g, unknown, or other
  misc_difference 23: note = a, c, u, g, unknown, or other
  misc_difference 25: note = a, c, u, g, unknown, or other
  misc_difference 28: note = a, c, u, g, unknown, or other
  misc_difference 32: note = a, c, u, g, unknown, or other
  misc_difference 36: note = a, c, u, g, unknown, or other
  misc_difference 41: note = a, c, u, g, unknown, or other
  misc_difference 46: note = a, c, u, g, unknown, or other
  misc_difference 47: note = a, c, u, g, unknown, or other
  misc_difference 49: note = a, c, u, g, unknown, or other
  misc_difference 56: note = a, c, u, g, unknown, or other
  misc_difference 61: note = a, c, u, g, unknown, or other
  misc_difference 66: note = a, c, u, g, unknown, or other
  misc_difference 72: note = a, c, u, g, unknown, or other
  misc_difference 83: note = a, c, u, g, unknown, or other
  misc_difference 84: note = a, c, u, g, unknown, or other
  misc_difference 85: note = a, c, u, g, unknown, or other
  misc_difference 90: note = a, c, u, g, unknown, or other
  misc_difference 91: note = a, c, u, g, unknown, or other
  misc_difference 95: note = a, c, u, g, unknown, or other
  misc_difference 104: note = a, c, u, g, unknown, or other
  misc_difference 106: note = a, c, u, g, unknown, or other
  misc_difference 107: note = a, c, u, g, unknown, or other
  misc_difference 112: note = a, c, u, g, unknown, or other
  misc_difference 114: note = a, c, u, g, unknown, or other
  misc_difference 127: note = a, c, u, g, unknown, or other
  misc_difference 129: note = a, c, u, g, unknown, or other
  misc_difference 158: note = a, c, u, g, unknown, or other
  misc_difference 159: note = a, c, u, g, unknown, or other
  misc_difference 171: note = a, c, u, g, unknown, or other
  misc_difference 192: note = a, c, u, g, unknown, or other
  misc_difference 193: note = a, c, u, g, unknown, or other
  misc_difference 195: note = a, c, u, g, unknown, or other
nnnnrgcrnyrnnnnnyrnnrrnrnygnygyngygngggrnccgrnngncrycggnycccncgcgnggcgrncggcrcccgynnnycctnnggynrcraccgyngnngagcnyngggaccgcygccnyngtcacgcacgaccgracagtcgcyygaynnycrrtcgcaygnacaaggcaggttaccgtgrcnnrna

SEQ ID NO: 795447 - RNA, 229 nt, unidentified
  source 1..229: mol_type = unassigned RNA; note = ISEch4
  misc_difference 1: note = a, c, u, g, unknown, or other
  misc_difference 2: note = a, c, u, g, unknown, or other
  misc_difference 3: note = a, c, u, g, unknown, or other
  misc_difference 4: note = a, c, u, g, unknown, or other
  misc_difference 7: note = a, c, u, g, unknown, or other
  misc_difference 10: note = a, c, u, g, unknown, or other
  misc_difference 11: note = a, c, u, g, unknown, or other
  misc_difference 17: note = a, c, u, g, unknown, or other
  misc_difference 22: note = a, c, u, g, unknown, or other
  misc_difference 24: note = a, c, u, g, unknown, or other
  misc_difference 25: note = a, c, u, g, unknown, or other
  misc_difference 30: note = a, c, u, g, unknown, or other
  misc_difference 31: note = a, c, u, g, unknown, or other
  misc_difference 32: note = a, c, u, g, unknown, or other
  misc_difference 33: note = a, c, u, g, unknown, or other
  misc_difference 41: note = a, c, u, g, unknown, or other
  misc_difference 44: note = a, c, u, g, unknown, or other
  misc_difference 46: note = a, c, u, g, unknown, or other
  misc_difference 49: note = a, c, u, g, unknown, or other
  misc_difference 50: note = a, c, u, g, unknown, or other
  misc_difference 51: note = a, c, u, g, unknown, or other
  misc_difference 52: note = a, c, u, g, unknown, or other
  misc_difference 53: note = a, c, u, g, unknown, or other
  misc_difference 54: note = a, c, u, g, unknown, or other
  misc_difference 59: note = a, c, u, g, unknown, or other
  misc_difference 64: note = a, c, u, g, unknown, or other
  misc_difference 65: note = a, c, u, g, unknown, or other
  misc_difference 66: note = a, c, u, g, unknown, or other
  misc_difference 67: note = a, c, u, g, unknown, or other
  misc_difference 69: note = a, c, u, g, unknown, or other
  misc_difference 71: note = a, c, u, g, unknown, or other
  misc_difference 72: note = a, c, u, g, unknown, or other
  misc_difference 73: note = a, c, u, g, unknown, or other
  misc_difference 74: note = a, c, u, g, unknown, or other
  misc_difference 75: note = a, c, u, g, unknown, or other
  misc_difference 76: note = a, c, u, g, unknown, or other
  misc_difference 77: note = a, c, u, g, unknown, or other
  misc_difference 78: note = a, c, u, g, unknown, or other
  misc_difference 79: note = a, c, u, g, unknown, or other
  misc_difference 80: note = a, c, u, g, unknown, or other
  misc_difference 81: note = a, c, u, g, unknown, or other
  misc_difference 83: note = a, c, u, g, unknown, or other
  misc_difference 84: note = a, c, u, g, unknown, or other
  misc_difference 88: note = a, c, u, g, unknown, or other
  misc_difference 89: note = a, c, u, g, unknown, or other
  misc_difference 90: note = a, c, u, g, unknown, or other
  misc_difference 91: note = a, c, u, g, unknown, or other
  misc_difference 93: note = a, c, u, g, unknown, or other
  misc_difference 94: note = a, c, u, g, unknown, or other
  misc_difference 99: note = a, c, u, g, unknown, or other
  misc_difference 100: note = a, c, u, g, unknown, or other
  misc_difference 101: note = a, c, u, g, unknown, or other
  misc_difference 102: note = a, c, u, g, unknown, or other
  misc_difference 103: note = a, c, u, g, unknown, or other
  misc_difference 104: note = a, c, u, g, unknown, or other
  misc_difference 106: note = a, c, u, g, unknown, or other
  misc_difference 107: note = a, c, u, g, unknown, or other
  misc_difference 108: note = a, c, u, g, unknown, or other
  misc_difference 109: note = a, c, u, g, unknown, or other
  misc_difference 110: note = a, c, u, g, unknown, or other
  misc_difference 113: note = a, c, u, g, unknown, or other
  misc_difference 120: note = a, c, u, g, unknown, or other
  misc_difference 126: note = a, c, u, g, unknown, or other
  misc_difference 127: note = a, c, u, g, unknown, or other
  misc_difference 128: note = a, c, u, g, unknown, or other
  misc_difference 129: note = a, c, u, g, unknown, or other
  misc_difference 132: note = a, c, u, g, unknown, or other
  misc_difference 133: note = a, c, u, g, unknown, or other
  misc_difference 134: note = a, c, u, g, unknown, or other
  misc_difference 135: note = a, c, u, g, unknown, or other
  misc_difference 136: note = a, c, u, g, unknown, or other
  misc_difference 140: note = a, c, u, g, unknown, or other
  misc_difference 142: note = a, c, u, g, unknown, or other
  misc_difference 145: note = a, c, u, g, unknown, or other
  misc_difference 147: note = a, c, u, g, unknown, or other
  misc_difference 148: note = a, c, u, g, unknown, or other
  misc_difference 149: note = a, c, u, g, unknown, or other
  misc_difference 150: note = a, c, u, g, unknown, or other
  misc_difference 151: note = a, c, u, g, unknown, or other
  misc_difference 153: note = a, c, u, g, unknown, or other
  misc_difference 154: note = a, c, u, g, unknown, or other
  misc_difference 156: note = a, c, u, g, unknown, or other
  misc_difference 157: note = a, c, u, g, unknown, or other
  misc_difference 158: note = a, c, u, g, unknown, or other
  misc_difference 159: note = a, c, u, g, unknown, or other
  misc_difference 160: note = a, c, u, g, unknown, or other
  misc_difference 161: note = a, c, u, g, unknown, or other
  misc_difference 163: note = a, c, u, g, unknown, or other
  misc_difference 168: note = a, c, u, g, unknown, or other
  misc_difference 172: note = a, c, u, g, unknown, or other
  misc_difference 173: note = a, c, u, g, unknown, or other
  misc_difference 174: note = a, c, u, g, unknown, or other
  misc_difference 175: note = a, c, u, g, unknown, or other
  misc_difference 176: note = a, c, u, g, unknown, or other
  misc_difference 177: note = a, c, u, g, unknown, or other
  misc_difference 179: note = a, c, u, g, unknown, or other
  misc_difference 182: note = a, c, u, g, unknown, or other
  misc_difference 183: note = a, c, u, g, unknown, or other
  misc_difference 184: note = a, c, u, g, unknown, or other
  misc_difference 185: note = a, c, u, g, unknown, or other
  misc_difference 187: note = a, c, u, g, unknown, or other
  misc_difference 188: note = a, c, u, g, unknown, or other
  misc_difference 189: note = a, c, u, g, unknown, or other
  misc_difference 190: note = a, c, u, g, unknown, or other
  misc_difference 191: note = a, c, u, g, unknown, or other
  misc_difference 192: note = a, c, u, g, unknown, or other
  misc_difference 193: note = a, c, u, g, unknown, or other
  misc_difference 194: note = a, c, u, g, unknown, or other
  misc_difference 195: note = a, c, u, g, unknown, or other
  misc_difference 198: note = a, c, u, g, unknown, or other
  misc_difference 201: note = a, c, u, g, unknown, or other
  misc_difference 207: note = a, c, u, g, unknown, or other
  misc_difference 212: note = a, c, u, g, unknown, or other
  misc_difference 213: note = a, c, u, g, unknown, or other
  misc_difference 216: note = a, c, u, g, unknown, or other
  misc_difference 219: note = a, c, u, g, unknown, or other
  misc_difference 220: note = a, c, u, g, unknown, or other
  misc_difference 221: note = a, c, u, g, unknown, or other
  misc_difference 222: note = a, c, u, g, unknown, or other
  misc_difference 223: note = a, c, u, g, unknown, or other
  misc_difference 224: note = a, c, u, g, unknown, or other
  misc_difference 226: note = a, c, u, g, unknown, or other
  misc_difference 227: note = a, c, u, g, unknown, or other
nnnnyanyynnyyggyntygcnrnnryygnnnnyygrtgrnrynrnyrnnnnnnygrcnyrrynnnnrncnnnnnnnnnnnrnnrgynnnnrnngycrnnnnnnynnnnngrnyyryyrngyrcrnnnnyynnnnnggcnyngrnrnnnnnynncnnnnnnrncryyngrtnnnnnnrngcnnnnynnnnnnnnntcnarnyyrrynyygcnnrrnygnnnnnnrnnay

SEQ ID NO: 795448 - RNA, 234 nt, unidentified
  source 1..234: mol_type = unassigned RNA; note = ISAzvi3
  misc_difference 1: note = a, c, u, g, unknown, or other
  misc_difference 2: note = a, c, u, g, unknown, or other
  misc_difference 3: note = a, c, u, g, unknown, or other
  misc_difference 4: note = a, c, u, g, unknown, or other
  misc_difference 5: note = a, c, u, g, unknown, or other
  misc_difference 9: note = a, c, u, g, unknown, or other
  misc_difference 10: note = a, c, u, g, unknown, or other
  misc_difference 11: note = a, c, u, g, unknown, or other
  misc_difference 15: note = a, c, u, g, unknown, or other
  misc_difference 16: note = a, c, u, g, unknown, or other
  misc_difference 18: note = a, c, u, g, unknown, or other
  misc_difference 24: note = a, c, u, g, unknown, or other
  misc_difference 25: note = a, c, u, g, unknown, or other
  misc_difference 27: note = a, c, u, g, unknown, or other
  misc_difference 28: note = a, c, u, g, unknown, or other
  misc_difference 29: note = a, c, u, g, unknown, or other
  misc_difference 30: note = a, c, u, g, unknown, or other
  misc_difference 31: note = a, c, u, g, unknown, or other
  misc_difference 33: note = a, c, u, g, unknown, or other
  misc_difference 41: note = a, c, u, g, unknown, or other
  misc_difference 42: note = a, c, u, g, unknown, or other
  misc_difference 43: note = a, c, u, g, unknown, or other
  misc_difference 44: note = a, c, u, g, unknown, or other
  misc_difference 58: note = a, c, u, g, unknown, or other
  misc_difference 62: note = a, c, u, g, unknown, or other
  misc_difference 63: note = a, c, u, g, unknown, or other
  misc_difference 65: note = a, c, u, g, unknown, or other
  misc_difference 66: note = a, c, u, g, unknown, or other
  misc_difference 67: note = a, c, u, g, unknown, or other
  misc_difference 69: note = a, c, u, g, unknown, or other
  misc_difference 75: note = a, c, u, g, unknown, or other
  misc_difference 76: note = a, c, u, g, unknown, or other
  misc_difference 77: note = a, c, u, g, unknown, or other
  misc_difference 78: note = a, c, u, g, unknown, or other
  misc_difference 79: note = a, c, u, g, unknown, or other
  misc_difference 80: note = a, c, u, g, unknown, or other
  misc_difference 81: note = a, c, u, g, unknown, or other
  misc_difference 82: note = a, c, u, g, unknown, or other
  misc_difference 83: note = a, c, u, g, unknown, or other
  misc_difference 84: note = a, c, u, g, unknown, or other
  misc_difference 89: note = a, c, u, g, unknown, or other
  misc_difference 98: note = a, c, u, g, unknown, or other
  misc_difference 99: note = a, c, u, g, unknown, or other
  misc_difference 100: note = a, c, u, g, unknown, or other
  misc_difference 101: note = a, c, u, g, unknown, or other
  misc_difference 102: note = a, c, u, g, unknown, or other
  misc_difference 103: note = a, c, u, g, unknown, or other
  misc_difference 104: note = a, c, u, g, unknown, or other
  misc_difference 113: note = a, c, u, g, unknown, or other
  misc_difference 114: note = a, c, u, g, unknown, or other
  misc_difference 116: note = a, c, u, g, unknown, or other
  misc_difference 117: note = a, c, u, g, unknown, or other
  misc_difference 128: note = a, c, u, g, unknown, or other
  misc_difference 147: note = a, c, u, g, unknown, or other
  misc_difference 149: note = a, c, u, g, unknown, or other
  misc_difference 150: note = a, c, u, g, unknown, or other
  misc_difference 151: note = a, c, u, g, unknown, or other
  misc_difference 152: note = a, c, u, g, unknown, or other
  misc_difference 153: note = a, c, u, g, unknown, or other
  misc_difference 162: note = a, c, u, g, unknown, or other
  misc_difference 188: note = a, c, u, g, unknown, or other
  misc_difference 189: note = a, c, u, g, unknown, or other
  misc_difference 190: note = a, c, u, g, unknown, or other
  misc_difference 194: note = a, c, u, g, unknown, or other
  misc_difference 195: note = a, c, u, g, unknown, or other
  misc_difference 196: note = a, c, u, g, unknown, or other
  misc_difference 197: note = a, c, u, g, unknown, or other
  misc_difference 200: note = a, c, u, g, unknown, or other
  misc_difference 201: note = a, c, u, g, unknown, or other
  misc_difference 206: note = a, c, u, g, unknown, or other
  misc_difference 207: note = a, c, u, g, unknown, or other
  misc_difference 208: note = a, c, u, g, unknown, or other
  misc_difference 209: note = a, c, u, g, unknown, or other
  misc_difference 210: note = a, c, u, g, unknown, or other
  misc_difference 211: note = a, c, u, g, unknown, or other
  misc_difference 212: note = a, c, u, g, unknown, or other
  misc_difference 217: note = a, c, u, g, unknown, or other
  misc_difference 218: note = a, c, u, g, unknown, or other
  misc_difference 219: note = a, c, u, g, unknown, or other
  misc_difference 220: note = a, c, u, g, unknown, or other
nnnnnryynnnargnnrngcargnnrnnnnnrngtgatggnnnnacaggtyrgaccgngrynnrnnnanycygrnnnnnnnnnngrrcnyyragyycnnnnnnnaratrrgrnnynnrycrgcgraynycatcagggccagcrggynynnnnnrcctgcrynayrggccgrayataarrcygcarccnnnyyynnnnycnnyryrnnnnnnncttgnnnnyygggaggcrycca

SEQ ID NO: 795449 - RNA, 237 nt, unidentified
  source 1..237: mol_type = unassigned RNA; note = ISBcen4
  misc_difference 4: note = a, c, u, g, unknown, or other
  misc_difference 5: note = a, c, u, g, unknown, or other
  misc_difference 10: note = a, c, u, g, unknown, or other
  misc_difference 11: note = a, c, u, g, unknown, or other
  misc_difference 22: note = a, c, u, g, unknown, or other
  misc_difference 23: note = a, c, u, g, unknown, or other
  misc_difference 27: note = a, c, u, g, unknown, or other
  misc_difference 30: note = a, c, u, g, unknown, or other
  misc_difference 32: note = a, c, u, g, unknown, or other
  misc_difference 44: note = a, c, u, g, unknown, or other
  misc_difference 59: note = a, c, u, g, unknown, or other
  misc_difference 78: note = a, c, u, g, unknown, or other
  misc_difference 79: note = a, c, u, g, unknown, or other
  misc_difference 80: note = a, c, u, g, unknown, or other
  misc_difference 81: note = a, c, u, g, unknown, or other
  misc_difference 82: note = a, c, u, g, unknown, or other
  misc_difference 83: note = a, c, u, g, unknown, or other
  misc_difference 84: note = a, c, u, g, unknown, or other
  misc_difference 85: note = a, c, u, g, unknown, or other
  misc_difference 91: note = a, c, u, g, unknown, or other
  misc_difference 92: note = a, c, u, g, unknown, or other
  misc_difference 101: note = a, c, u, g, unknown, or other
  misc_difference 102: note = a, c, u, g, unknown, or other
  misc_difference 103: note = a, c, u, g, unknown, or other
  misc_difference 105: note = a, c, u, g, unknown, or other
  misc_difference 114: note = a, c, u, g, unknown, or other
  misc_difference 141: note = a, c, u, g, unknown, or other
  misc_difference 146: note = a, c, u, g, unknown, or other
  misc_difference 147: note = a, c, u, g, unknown, or other
  misc_difference 148: note = a, c, u, g, unknown, or other
  misc_difference 149: note = a, c, u, g, unknown, or other
  misc_difference 151: note = a, c, u, g, unknown, or other
  misc_difference 152: note = a, c, u, g, unknown, or other
  misc_difference 153: note = a, c, u, g, unknown, or other
  misc_difference 160: note = a, c, u, g, unknown, or other
  misc_difference 161: note = a, c, u, g, unknown, or other
  misc_difference 186: note = a, c, u, g, unknown, or other
  misc_difference 187: note = a, c, u, g, unknown, or other
  misc_difference 196: note = a, c, u, g, unknown, or other
  misc_difference 198: note = a, c, u, g, unknown, or other
  misc_difference 199: note = a, c, u, g, unknown, or other
  misc_difference 200: note = a, c, u, g, unknown, or other
  misc_difference 205: note = a, c, u, g, unknown, or other
  misc_difference 206: note = a, c, u, g, unknown, or other
  misc_difference 207: note = a, c, u, g, unknown, or other
  misc_difference 210: note = a, c, u, g, unknown, or other
  misc_difference 211: note = a, c, u, g, unknown, or other
  misc_difference 212: note = a, c, u, g, unknown, or other
  misc_difference 215: note = a, c, u, g, unknown, or other
  misc_difference 216: note = a, c, u, g, unknown, or other
  misc_difference 220: note = a, c, u, g, unknown, or other
  misc_difference 222: note = a, c, u, g, unknown, or other
yrrnncryynnaaggttgcgynnggynaynrnrygtgatgrcrnracaggtcrgaccgngacycrcyaarcctgratnnnnnnnngrgcynnragcycrynnnrnraatgaggngygrgtcagcggattycatyrrggccngcrgnnnnynnnctgcarnnaggccggatatararcygcarccynnycygyyyrncnnnrcrynnnrrnnnyynnygcnrnygggrggcgtycata

SEQ ID NO: 795450 - RNA, 221 nt, unidentified
  source 1..221: mol_type = unassigned RNA; note = ISEc81
  misc_difference 2: note = a, c, u, g, unknown, or other
  misc_difference 10: note = a, c, u, g, unknown, or other
  misc_difference 24: note = a, c, u, g, unknown, or other
  misc_difference 42: note = a, c, u, g, unknown, or other
  misc_difference 52: note = a, c, u, g, unknown, or other
  misc_difference 56: note = a, c, u, g, unknown, or other
  misc_difference 57: note = a, c, u, g, unknown, or other
  misc_difference 58: note = a, c, u, g, unknown, or other
  misc_difference 65: note = a, c, u, g, unknown, or other
  misc_difference 66: note = a, c, u, g, unknown, or other
  misc_difference 67: note = a, c, u, g, unknown, or other
  misc_difference 68: note = a, c, u, g, unknown, or other
  misc_difference 69: note = a, c, u, g, unknown, or other
  misc_difference 70: note = a, c, u, g, unknown, or other
  misc_difference 71: note = a, c, u, g, unknown, or other
  misc_difference 73: note = a, c, u, g, unknown, or other
  misc_difference 74: note = a, c, u, g, unknown, or other
  misc_difference 77: note = a, c, u, g, unknown, or other
  misc_difference 80: note = a, c, u, g, unknown, or other
  misc_difference 81: note = a, c, u, g, unknown, or other
  misc_difference 82: note = a, c, u, g, unknown, or other
  misc_difference 87: note = a, c, u, g, unknown, or other
  misc_difference 90: note = a, c, u, g, unknown, or other
  misc_difference 91: note = a, c, u, g, unknown, or other
  misc_difference 92: note = a, c, u, g, unknown, or other
  misc_difference 93: note = a, c, u, g, unknown, or other
  misc_difference 94: note = a, c, u, g, unknown, or other
  misc_difference 95: note = a, c, u, g, unknown, or other
  misc_difference 98: note = a, c, u, g, unknown, or other
  misc_difference 100: note = a, c, u, g, unknown, or other
  misc_difference 104: note = a, c, u, g, unknown, or other
  misc_difference 105: note = a, c, u, g, unknown, or other
  misc_difference 109: note = a, c, u, g, unknown, or other
  misc_difference 116: note = a, c, u, g, unknown, or other
  misc_difference 129: note = a, c, u, g, unknown, or other
  misc_difference 131: note = a, c, u, g, unknown, or other
  misc_difference 133: note = a, c, u, g, unknown, or other
  misc_difference 137: note = a, c, u, g, unknown, or other
  misc_difference 138: note = a, c, u, g, unknown, or other
  misc_difference 139: note = a, c, u, g, unknown, or other
  misc_difference 140: note = a, c, u, g, unknown, or other
  misc_difference 144: note = a, c, u, g, unknown, or other
  misc_difference 147: note = a, c, u, g, unknown, or other
  misc_difference 148: note = a, c, u, g, unknown, or other
  misc_difference 149: note = a, c, u, g, unknown, or other
  misc_difference 154: note = a, c, u, g, unknown, or other
  misc_difference 161: note = a, c, u, g, unknown, or other
  misc_difference 175: note = a, c, u, g, unknown, or other
  misc_difference 177: note = a, c, u, g, unknown, or other
  misc_difference 178: note = a, c, u, g, unknown, or other
  misc_difference 182: note = a, c, u, g, unknown, or other
  misc_difference 184: note = a, c, u, g, unknown, or other
  misc_difference 185: note = a, c, u, g, unknown, or other
  misc_difference 186: note = a, c, u, g, unknown, or other
  misc_difference 187: note = a, c, u, g, unknown, or other
  misc_difference 190: note = a, c, u, g, unknown, or other
  misc_difference 194: note = a, c, u, g, unknown, or other
  misc_difference 196: note = a, c, u, g, unknown, or other
  misc_difference 197: note = a, c, u, g, unknown, or other
  misc_difference 198: note = a, c, u, g, unknown, or other
  misc_difference 201: note = a, c, u, g, unknown, or other
  misc_difference 202: note = a, c, u, g, unknown, or other
  misc_difference 211: note = a, c, u, g, unknown, or other
  misc_difference 212: note = a, c, u, g, unknown, or other
  misc_difference 213: note = a, c, u, g, unknown, or other
  misc_difference 214: note = a, c, u, g, unknown, or other
  misc_difference 215: note = a, c, u, g, unknown, or other
  misc_difference 216: note = a, c, u, g, unknown, or other
  misc_difference 217: note = a, c, u, g, unknown, or other
  misc_difference 218: note = a, c, u, g, unknown, or other
  misc_difference 219: note = a, c, u, g, unknown, or other
  misc_difference 220: note = a, c, u, g, unknown, or other
rncgattgcnyrggcrrtyryranrtgatggcraracaggtnagaccgygrnygrnnnarccygnnnnnnncnnrgnrcnnnragyncgnnnnnnygntnrgrnnycrnycrgcrnattccatcagggncngngrynnnnrycncrnnnrragnccggatntatggctgcaatcnynnyytnynnnnyrnyrynrnnnrrnnrcttrrcannnnnnnnnnr

SEQ ID NO: 795451 - RNA, 212 nt, unidentified
  source 1..212: mol_type = unassigned RNA; note = ISMno20
  misc_difference 1: note = a, c, u, g, unknown, or other
  misc_difference 3: note = a, c, u, g, unknown, or other
  misc_difference 4: note = a, c, u, g, unknown, or other
  misc_difference 5: note = a, c, u, g, unknown, or other
  misc_difference 10: note = a, c, u, g, unknown, or other
  misc_difference 53: note = a, c, u, g, unknown, or other
  misc_difference 54: note = a, c, u, g, unknown, or other
  misc_difference 55: note = a, c, u, g, unknown, or other
  misc_difference 56: note = a, c, u, g, unknown, or other
  misc_difference 57: note = a, c, u, g, unknown, or other
  misc_difference 58: note = a, c, u, g, unknown, or other
  misc_difference 59: note = a, c, u, g, unknown, or other
  misc_difference 60: note = a, c, u, g, unknown, or other
  misc_difference 62: note = a, c, u, g, unknown, or other
  misc_difference 69: note = a, c, u, g, unknown, or other
  misc_difference 72: note = a, c, u, g, unknown, or other
  misc_difference 73: note = a, c, u, g, unknown, or other
  misc_difference 78: note = a, c, u, g, unknown, or other
  misc_difference 79: note = a, c, u, g, unknown, or other
  misc_difference 80: note = a, c, u, g, unknown, or other
  misc_difference 81: note = a, c, u, g, unknown, or other
  misc_difference 82: note = a, c, u, g, unknown, or other
  misc_difference 83: note = a, c, u, g, unknown, or other
  misc_difference 120: note = a, c, u, g, unknown, or other
  misc_difference 129: note = a, c, u, g, unknown, or other
  misc_difference 143: note = a, c, u, g, unknown, or other
  misc_difference 146: note = a, c, u, g, unknown, or other
  misc_difference 157: note = a, c, u, g, unknown, or other
  misc_difference 165: note = a, c, u, g, unknown, or other
  misc_difference 167: note = a, c, u, g, unknown, or other
  misc_difference 170: note = a, c, u, g, unknown, or other
  misc_difference 172: note = a, c, u, g, unknown, or other
  misc_difference 173: note = a, c, u, g, unknown, or other
  misc_difference 176: note = a, c, u, g, unknown, or other
  misc_difference 180: note = a, c, u, g, unknown, or other
  misc_difference 182: note = a, c, u, g, unknown, or other
  misc_difference 183: note = a, c, u, g, unknown, or other
  misc_difference 190: note = a, c, u, g, unknown, or other
  misc_difference 200: note = a, c, u, g, unknown, or other
nynnnatcynccrggrccygatcagyccyggcggatccrggyggacgaaccgnnnnnnnnyntggcytnranngccgnnnnnnagaatggtcycgtcytcctgagccyyryccgccgyangcgggatrntggtgcrgccgyynyrnrcggcgaccgnatgtgagntngancnngynygrnrnnrrrccrngtcryryranygggctcrgacc

SEQ ID NO: 795452 - RNA, 272 nt, unidentified
  source 1..272: mol_type = unassigned RNA; note = ISMlo2
  misc_difference 13: note = a, c, u, g, unknown, or other
  misc_difference 15: note = a, c, u, g, unknown, or other
  misc_difference 21: note = a, c, u, g, unknown, or other
  misc_difference 22: note = a, c, u, g, unknown, or other
  misc_difference 27: note = a, c, u, g, unknown, or other
  misc_difference 28: note = a, c, u, g, unknown, or other
  misc_difference 29: note = a, c, u, g, unknown, or other
  misc_difference 30: note = a, c, u, g, unknown, or other
  misc_difference 31: note = a, c, u, g, unknown, or other
  misc_difference 32: note = a, c, u, g, unknown, or other
  misc_difference 33: note = a, c, u, g, unknown, or other
  misc_difference 34: note = a, c, u, g, unknown, or other
  misc_difference 37: note = a, c, u, g, unknown, or other
  misc_difference 38: note = a, c, u, g, unknown, or other
  misc_difference 70: note = a, c, u, g, unknown, or other
  misc_difference 73: note = a, c, u, g, unknown, or other
  misc_difference 101: note = a, c, u, g, unknown, or other
  misc_difference 118: note = a, c, u, g, unknown, or other
  misc_difference 119: note = a, c, u, g, unknown, or other
  misc_difference 120: note = a, c, u, g, unknown, or other
  misc_difference 121: note = a, c, u, g, unknown, or other
  misc_difference 122: note = a, c, u, g, unknown, or other
  misc_difference 123: note = a, c, u, g, unknown, or other
  misc_difference 124: note = a, c, u, g, unknown, or other
  misc_difference 127: note = a, c, u, g, unknown, or other
  misc_difference 133: note = a, c, u, g, unknown, or other
  misc_difference 134: note = a, c, u, g, unknown, or other
  misc_difference 135: note = a, c, u, g, unknown, or other
  misc_difference 136: note = a, c, u, g, unknown, or other
  misc_difference 137: note = a, c, u, g, unknown, or other
  misc_difference 145: note = a, c, u, g, unknown, or other
  misc_difference 146: note = a, c, u, g, unknown, or other
  misc_difference 147: note = a, c, u, g, unknown, or other
  misc_difference 148: note = a, c, u, g, unknown, or other
  misc_difference 149: note = a, c, u, g, unknown, or other
  misc_difference 154: note = a, c, u, g, unknown, or other
  misc_difference 189: note = a, c, u, g, unknown, or other
  misc_difference 200: note = a, c, u, g, unknown, or other
  misc_difference 205: note = a, c, u, g, unknown, or other
  misc_difference 206: note = a, c, u, g, unknown, or other
  misc_difference 207: note = a, c, u, g, unknown, or other
  misc_difference 209: note = a, c, u, g, unknown, or other
  misc_difference 225: note = a, c, u, g, unknown, or other
  misc_difference 243: note = a, c, u, g, unknown, or other
  misc_difference 245: note = a, c, u, g, unknown, or other
  misc_difference 247: note = a, c, u, g, unknown, or other
  misc_difference 252: note = a, c, u, g, unknown, or other
  misc_difference 253: note = a, c, u, g, unknown, or other
  misc_difference 256: note = a, c, u, g, unknown, or other
  misc_difference 257: note = a, c, u, g, unknown, or other
  misc_difference 258: note = a, c, u, g, unknown, or other
  misc_difference 268: note = a, c, u, g, unknown, or other
  misc_difference 269: note = a, c, u, g, unknown, or other
taragatcrgccngncrcggnnrgcrnnnnnnnngcnnccgygyygrgcygaygyyrgarcttgcaagrnrrnragcagatggtgygatcgatcgatccrngacgygrgayaytccgnnnnnnncantggccnnnnnaggycgynnnnntgttnggaacycrygtygcggaaaccatcttggccagcgntcatrygcgancgcrnnnanaggccgracatatgrnygcaagcgatcygatcanrnynctgynnrrnnnycttgcragnnggg

SEQ ID NO: 795453 - RNA, 183 nt, unidentified
  source 1..183: mol_type = unassigned RNA; note = IS621
  misc_difference 1: note = a, c, u, g, unknown, or other
  misc_difference 2: note = a, c, u, g, unknown, or other
  misc_difference 3: note = a, c, u, g, unknown, or other
  misc_difference 4: note = a, c, u, g, unknown, or other
  misc_difference 5: note = a, c, u, g, unknown, or other
  misc_difference 6: note = a, c, u, g, unknown, or other
  misc_difference 7: note = a, c, u, g, unknown, or other
  misc_difference 8: note = a, c, u, g, unknown, or other
  misc_difference 9: note = a, c, u, g, unknown, or other
  misc_difference 10: note = a, c, u, g, unknown, or other
  misc_difference 11: note = a, c, u, g, unknown, or other
  misc_difference 12: note = a, c, u, g, unknown, or other
  misc_difference 18: note = a, c, u, g, unknown, or other
  misc_difference 19: note = a, c, u, g, unknown, or other
  misc_difference 21: note = a, c, u, g, unknown, or other
  misc_difference 22: note = a, c, u, g, unknown, or other
  misc_difference 28: note = a, c, u, g, unknown, or other
  misc_difference 30: note = a, c, u, g, unknown, or other
  misc_difference 31: note = a, c, u, g, unknown, or other
  misc_difference 32: note = a, c, u, g, unknown, or other
  misc_difference 36: note = a, c, u, g, unknown, or other
  misc_difference 50: note = a, c, u, g, unknown, or other
  misc_difference 53: note = a, c, u, g, unknown, or other
  misc_difference 54: note = a, c, u, g, unknown, or other
  misc_difference 55: note = a, c, u, g, unknown, or other
  misc_difference 59: note = a, c, u, g, unknown, or other
  misc_difference 64: note = a, c, u, g, unknown, or other
  misc_difference 65: note = a, c, u, g, unknown, or other
  misc_difference 66: note = a, c, u, g, unknown, or other
  misc_difference 67: note = a, c, u, g, unknown, or other
  misc_difference 75: note = a, c, u, g, unknown, or other
  misc_difference 76: note = a, c, u, g, unknown, or other
  misc_difference 84: note = a, c, u, g, unknown, or other
  misc_difference 85: note = a, c, u, g, unknown, or other
  misc_difference 86: note = a, c, u, g, unknown, or other
  misc_difference 91: note = a, c, u, g, unknown, or other
  misc_difference 101: note = a, c, u, g, unknown, or other
  misc_difference 102: note = a, c, u, g, unknown, or other
  misc_difference 107: note = a, c, u, g, unknown, or other
  misc_difference 109: note = a, c, u, g, unknown, or other
  misc_difference 110: note = a, c, u, g, unknown, or other
  misc_difference 111: note = a, c, u, g, unknown, or other
  misc_difference 112: note = a, c, u, g, unknown, or other
  misc_difference 128: note = a, c, u, g, unknown, or other
  misc_difference 130: note = a, c, u, g, unknown, or other
  misc_difference 139: note = a, c, u, g, unknown, or other
  misc_difference 141: note = a, c, u, g, unknown, or other
  misc_difference 146: note = a, c, u, g, unknown, or other
  misc_difference 147: note = a, c, u, g, unknown, or other
  misc_difference 158: note = a, c, u, g, unknown, or other
  misc_difference 166: note = a, c, u, g, unknown, or other
  misc_difference 174: note = a, c, u, g, unknown, or other
  misc_difference 179: note = a, c, u, g, unknown, or other
  misc_difference 180: note = a, c, u, g, unknown, or other
  misc_difference 181: note = a, c, u, g, unknown, or other
  misc_difference 182: note = a, c, u, g, unknown, or other
  misc_difference 183: note = a, c, u, g, unknown, or other
nnnnnnnnnnnnyygrrnnrnnyyyyrnrnnngrrnrryyggaygccgynyynnncctnrgrynnnnarycygynnygtagatnnnygcrncrryyrcycnnyctynynnnnaraycgracagtatcnynggcccgrcnynrycgnnagccygcattnacaaggtngatyryrnrrgrnnnnn
